United States Patent Application Publication US 2014/0325702 A1 - sequence listing, part 14

SEQ ID NO: 13627 - DNA, 2321 bp, Heterodera glycines
tgctgctgcttttgaagtgagtgaacaacctttgaatgattgcggtggaaatggaccgtgccgtattaactgacagcagccttttttatttggggtgggcatttgtgtgcttttggcttttgcttgctttgacttcgttctgtccgaccgcccgtccgttctcttcccccctcccccattctcccaatgattttatgctcgacgctcttcaaaatgttccaaaaaatcattcgtcgtaaagtgaatgaatgcgatcaaacgaagcgccacattccctaaattgcttttccctcttattgttagacgatcaaatgaaaacgggcgaagcatttcgatgatgaatttgagatgatatttgatcagcccccgagggggggggggagggacggcagcaaaagcaatcactcagaaacatcaaaggcacgcgaattcttcacactttcgccgcaataataaacaattcccccaatcactcgccatcagtttcaaatttctctttactgatcatcaaaaagaaaaaagaaacaaaattgttttgttggaaaagtaaaacaataatttggaaaaccgacagtttttacacatttttaatcgcgccgcgagttttgcgaattatttaggctcccaattaaatatatgctgttcgtaattaaatgaaaaattgcccacctgaagggactggagaacctgttggattttccgagaaacgcgcgtcggttgaactgctgaaattgtctctattttaatgcaattaaatgcgttttgtaagacaaaaacttcgaggggtccccccgcgcctcttttgtcttacgaatgttcgtattcgcgtagtcctgcggcgcttttgatgaaccgccaattccggagtcgcctgtcgagttcacatacactgccgttgttccgtccccaatttcgtcctcctcctcgtcgtcggtcacggggggcaacggagggagtggccgatcctcgaggacgagcacctgaaaaaagatgcaaaggaacggataaaaacaaattggaaaaattgttgattttattaatcgcccctctctgcccgtaaaaggaacaaaacaaataaaaaagggcttttgtcagaccgaagttcgattggccatcggatggggaggacagcactcatttgaggatgaagcggcattgttgttgttcggaacaacttttgacggctggcgatgcttttgtcgcatttttgcacaattttcccctccgttgccattggtcggtcgtccgctgtccgtccgttccgctgccaaagtttgttgtttctgttgtccgtcccttttgtcaggcccatctttgccacccgccgcggccgagccgacggaaagcgacgcattcgctgctgcgggtgagtcgtgccgattctgttgctctgtttctgatcgctgaaacggggactggatcatttgaccaaacaaaggaatggatgagagaaattggaagtcacggaaaggatttccccgcattatcccacacaattagcagccaattcttcctccgtttatccttttatcatcccccccccccagctgggcaaagacccgcggagattttttagataataacagtaattgttgacattaaaggaactgtactaactaataaatatagtcagcgggagcatttaaaatgttttgtttgtccttacaattggatcgtttactgtactgggttttaacagtaaatatgcattaagctcctatttagtcaaatcaaagaatggggggattctctgacagttaaagtctttctccccattagctaattacccccacccccgccaattcatcgtcccctaatcacttttttaattgcctcttccgccatccttcctctcctcccatcaacacaatttgcgtttgcttcgtccccattgcccattttctgtcctttttccccttctctgccacttccatcgttttcttcggccgttccgctgtccatcgttttcttttcttcttcttcgtcatcggaactgctgtctgaaaagaaaaacagtgatcagaagctgagattagacaagagatgggtatatgtagtagtaccttttttgtcatttaaatttattttaaatcaaacccaaaagaattccttcgtttttttaatttcccagtaaatttccttacaaattgatacataagcaatttgtcgagatgtttccgcaacaataagttgcttttccattacaaaatatgtgttgtttattaaattgaattacaaagtaagcatttgcatagaatttgccttgaacgaatatttagtggggaattgcgagaaatttgagcaatttaggcgaatttgtt

SEQ ID NO: 13628 - DNA, 703 bp, Heterodera glycines
gaatgaaagacggcgagtgtccattcatccgccattgatgaattccgaccccccccccccccgccagcagcagaaatagtgttggccattgcccagcagtgcgggaaggaatggaaaaagcaacggcagaaggaaaaaaagaaagcgacggagagggagaggaaagggaggtggccgtgaaaaaaacaagggccaacagatgctcatttggaatgcacaacgatggaggtgagggagggacactttaaggtgtgagggggagagggggcaaaaggaagaggatcagacaaaaagaaagtgtaaaaaatcagatagagaaaacaaaaaaacgagggaagggagggaggtcgaatggaaaagagacatttttcaaatttataggttacaattttggtgattgattggtactggaagagtgggttttgaattgggaataactaaaaacgcaatgtattcccagctagctcattttgttgaaatcaaagttggatggtgagggatttatctgccccctcccccttctcttttctctctctcacgcgctgccctcccatttcgctgttgtgcctcacccgctccattcgccccttccattcatgctcaatgtttaatccccaattcgcaatcttccgattgttcaagcaagttgttccaccctcccactttcaccaaaactcggaccgtcgtcatcaacaacgagacc

SEQ ID NO: 13629 - DNA, 1157 bp, Heterodera glycines
ttttcataatcagagcatgattctaggggatgagcattttataattgattttttgcttttttctgcatagatttttgaacagttacaattgcccataattatggcaaaccttcacttttgtaattgatattctcatactgtttataaaaaatgccagaattttaaataagcagttttaagaatgacttttcaaaacatgactcttattactccacgttggtcattcaggtgcaacgtcgttcatcatagctcataggctaatcatatgcttgcttaaatagcccaaacttttcaaagtttctcgattagacctttgggcgtacatttaattttttgcttttatcatggaaaatcttttatgctcctcttttttgcaaagctgccaaaatttccatgtcatacaaaaggcggctccaactattgagttgttataagcacattttttcataatcagagcattgatttctaggatgagcattttataattgaatattttgcttttttctgcatagaatttttgaacagttacaattgcccataattatggcaaaccttcacttttgtaattgatattctcatactgtttataaaaaatgccagaattttaaataagcagttttaagaatgacttttcaaaacatgactcttattactccacgttggtcattcaggtgcaacgtcgttcatcatagctcataggctaatcatatgcttgcttaaatagcccaaacttttcaaagtttctcgattagacctttgggcgtacatttaattttttgcttttatcatggaaaatcttttatgctcctcttttttgcaaagctgccaaaatttccatgtcatacaaaaggcggctccaactattgagttgttataagcacattttttcataatcagagcattgatttctaggatgagcattttataattgaatattttgctttttttatgcatagaatttttgaactgttacaattgcccataattatggcaaaccttcacttttgtaattgatattctcatactgtttataaaaaatgccagaattttaaataagcagttttaagaatgacttttcaaaacatgactcttattactccactttggtcatcaaggtgcacgtcgttcatcatagctcataggctaatcatatgctt

SEQ ID NO: 13630 - DNA, 1028 bp, Heterodera glycines
gcatagaatttttgaacagttacaattgcccataattatggcaaaccttcacttttgtaattgatattctcatactgtttataaaaaatgccagaattttaaataagcagttttaagaatgacttttcaaaacatgactcttattactccacgttggtcattcaggtgcaacgtcgttcatcatagctcataggctaatcatatgcttgcttaaatagcccaaacttttcaaagtttctcgattagacctatggcatacatttaattttttgctttttatcatggaaaatcttttatgctcctcttttttgcaaagctgccaaaatttccatgtcatacaaaaggcggctccaactattgagttgttataagcacattttttcataatcagagcattgatttctaggatgagcattttataattgaatattttgctttttttatgcatagaatttttgaacagttacaattgcccataattatggcaaaccttcacttttgtaattgatattctcatactgtttataaaaaatgccagaattttaaataagcagttttaagaatgacttttcaaaacatgactcttattactccacgttggtcattcaggtgcaacgtcgttcatcatagctcataggctaatcatatgcttgcttaaatagcccaaacttttcaaagtttctcgattagacctttgggcgtacatttaattttttgctttttatcatggaaaatcttttatgctcctcttttttgcaaagctgccaaaatttccatgtcatacaaaaggcggccccaactattgagttgttataagcacattttttcataatcagagcattgatttctaggatgagcattttataattgaatattttgctttttttctgcatagaatttttgaacagttacaattgcccataattatggcaaaccttcacatttgtaattgatattctcatactgtttataaaaaatgccagaatatagataagcagttttaagaatgacttttcaaaaccatgact

SEQ ID NO: 13631 - DNA, 3540 bp, Heterodera glycines
  unsure (1)..(3540): unsure at all n locations
aatattcaattgaatttttaaatactcctacatagctaaaatttgtttttactttttcgagtggcggcatcacatcaaatttggcattgatcaggcgaatagtgctttttagtcgtctgtaagccttctgtgtaccgacaagcccgaggatcagaagagcatcctctggatcaactgactttttttgtcttgacagttgttgtttcttcttctgtggcgtgtaatgagcaaatttgtgccgaacttcccgactgattccttcgagggacgcccggctggcggaacgtgatctgtcgcggtttattacatccgcaatttgatctgccaatttgcgacgtgaggtgcgctgcaaatgatcgacattcatctttggtcgtcctgttggagttgctaaaattaaaaaagagaaaattatttgaaaaagataaaaaggggattttagtttcactcacttttgctggtggtcggtgtctccatcggtggtgccatcttttcctccaactgccgccgaagcgcagtgatcattgcgtctctgttgcggacctgctgtcgaagaaagctgatcacttgttcctgctccttcaactgtttgtccaattggtcggtttgtgtcgcggcgtcctcataagccaaatccacgtccgttgccttgtccaccgttgtcaaatccacttctgttgcactgtcggtagttgtgaagtccatgttcgttgctttgtcggcagttttttgatggacacgcacatggcgcctgatcggagttgctgacaatggccttgggcttgaacgcgggccttagtttaatttttgcttctaaaatagtgacttttttgacttacaaaggtccaaagttgacgttgatggtccactttcggcggcttgggtcgatgtcccctctccatctgctgttgtgtcggcttcggtctgctttagacctaaaaaatgcagtgtttttaaaataaaattaattttggtcaattttcatcactttttggggttgaaccaaccctgcgaccgtgctcctggcgccattccttgcgctttcgctttgcttcattcccacaatcactcattctttttaatttatcaatttttttacgtgtaagtaccattttttgccttaaaaagtaggtgattttgtnaatttgttgccatgngaaaaaattttttcctgtgggtaacttttcttgaaattttacctaggctagttttttggccctctctatcgaattctcttttgttttctgaaagtttcttttctatctcgagatcggctcttctatttttacaagggaaaatccccggaaatttttaagcattgcaaagttttggcgttctgattactaaataaaaaataagcataattgtactgggagcccaaaattgggccgctgtgtacagtattgatgatgttcatttgttcaccatcccccccttccttcacacataattttcccccgctgtcctgtaacattcattatttttttgtgtgctcaaagtgaatctcaagcctccattcaataattgttttattgataattagtagagaccggattttccaaaagtgccggaccggaccggtctgatattttcagaagcaaccggtttccgggcccggcctctcaaaaaccggtcaaaccggaaaaccggtgaaacaggattttcaaattgccgggcccggaaccggtttctggtttggtaaaaattttaattttcacatgtatttcacccaaaattgaccataaatcgtcccagatgtaaaatttcggctctacttcacttcaggcgtcaataatgacctcttcaataatttctgtttggaaataaaaaaaaatttgcgattttgagcaaatttttaaagaaaattaaggatttttagggtccggcgatgccgataggcgccgccgagaaattttttgaaaatttcgatgcaatttattaacagaaattgtataaaaatgaagaatttttggctatatcataaaccggtaaaaaccggtccaaaagtgccggaccggaccggtttggcattttcaaaatgaccggtttccgggcccggcctctcaaaaaccggtcaaaccggaattttccctaaaatcgccggaccgatttccgggcccggtccggtccgttctctaataattagtacttggctagtgtaaatgattctttaaataaacatttactgattataaatatatattagtaactagcgggtgcgtgaaccgtcggatctgggcttgggataaagcgcttcgcgcttcttgagcttcgctacctaggctgtaaagcgattcaaattgatagaattggttggagagatttttttgaatttttaaaaaattattatgggtttttagtccacatcgaggctcaagacgggcgcttcgcgcccgtttttcaaattttgttggccttacagagattagaagaggtacaacagtgattagaagaggtacaacagtgaaaaagtgatacaaaagtgattagaagaggtacaacagtgattagaagaggtagaatcatggtttaaaatgaaataaataagaaaattgtattattggatgtattataaatttatcaaattaaaaaaatccttttacttattaaaaataaagttagaaatttataatatagaatatttattgaaattgaaaggaattaatttctcgaaaattcaaattaaataaaacagttattcatcagaaaataatttaaaataaattaataaaacaatattaaattaaataaaaaaataaataatttaaaataccgtttgtgatttttcaaatattcgcccaaattctcgagggccaaaaaatttgaaaatattttcgaatttttaaaaaattctaaaatgtacaatgattgattatttattgtatattaatttttggacaaattctaaataaaaaaacaaataaattcttttattaatagttcaacaatgtttctaattataaatttccttttattaattaaaaagagagtttgaaatgtacaaggattgaatatttatttaaattgaaattaattttacaaattctaatttaaaaaatacaggagttctttaataaaagtaaataaattattattttaatttaaaacatcacaaaaaaataatttaatttaaattgaaaaattttattttttatggattaaacaaaactattaatatttattaaaatgaaaattaataatataatatttatttaatttgaaatgaaattaaacatgtaaaagtaatcaaaaaatgcacataaaaataatgtacaccggccggattcgaacctgccgccccccccccagaagatgactcagaatccccaatcacacagggattctgagggcttaacgatgtcaaaagtaaaatctgatcacgtattcgtgatncacggctcaaataacccctaaagacatgtttttgggagatttttgtgagaaaaattttttccactcaaaaaccatgtgcacccccctttggtccccgaatccaaaatcacttttatttttgtatccttttttaaaaatgtgataaaa

SEQ ID NO: 13632 - DNA, 1307 bp, Heterodera glycines
aagaggtacaaaagtgattagaagagggacaacagtgattagatgaggtacaaaagtgataaaagaggtacaaaagtgattagaagaggtacaaaagtgattagaagaggtacaaaagtgattagaagagggacaacagtgattagatgaggtacaaaagtgataaaagaggtacaacagcgattagaagacgtacaaaagtgattagaagaggtacaacagtgattagaagaggtacaacagtgaaaaagtgatacaaaagtgattagaagaggtacaacagtgattagaagaggtacaacagtgaaaaagtgatacaaaagtgattagaagaggtacaacagtgattagaagaggtagaatcatggtttaaaatgaaataaataagaaaattgtattattggatgtattataaatttatcaaattaaaaaaatccttttacttattaaaaataaagttagaaatttataatatagaatatttattgaaattgaaaggaattaatttctcgaaaattcaaattaaataaaacatttattcatcagaaaataatttaaaataattaataaaacaatattaaattaaataaaaaattaaataatttaaattaaaacatttgttcaccaaaataatttaatttaaattaaaattttttatttattattaataatacaaaacaaattaattaaaaaatgtaaaagtaagcaaaaaatgcatagaaaataatgtacaccggccggattcgaacctgcccccccccccagaagatgactcagaatccccaatcacacagggattctgagggcttaacgatgtcaaaagtaaaatctgatcacgtattcgtgatcagcggcccaaataacccctaaagacatgtttttggaagatttttggtgaaaaaatttctcaactcaaaaatcatgtgctcccccctttggtcccgaaccccaaaatcacttttatttttatatctttttttaaaaatgtgataaaaatgtaaaataaaatttatattatagagaaaaaaattgcggatttttctagtattttacttttcccgaatagcttttcataaggcagctacgaatttttttctgaaaattcgaatttttccagaaattctggaataacttttttcttttttgtgataaaaaactcaaataaatcccataaaattctccttatttttctctatttttaaagctttattatagttaaattgatgaaagcatcaccgagttatgaattttccgaatattagcccaaatttccaagggccaaaaaattccaaaaaataaagaatttt

SEQ ID NO: 13633 - DNA, 2904 bp, Heterodera glycines
  unsure (1)..(2904): unsure at all n locations
tttttaaatcctttctacccgtcgattcattntgtggctcatttgccgttttccaatgatttggtgtgtcaaaaaaggcaatgcaaaactctgttgttatgtacttaaaaagagagagttgggaaaaatgagagagcaaaaagaacgcaaaaacagaaattcatccaaaattcgcatttatataataaataaaatactgggactgggcagtggtgtaaaaaacaatggtcttttcttttttagacaccttcgtccttttcgtttttactccgaataaaaatgcgtcttagcaggaattatttcagatttttaagagccttttgaaatagttttttaaatgtgttcaaagacttttttccgccatgatttttcatttatttcaatttataaaccaatttacaaaaattgcatttttgttcaaagacttttttccacctgtgtataatatttatacacaattattttattggttatttttgttgaacaatttattatttcaatggaacgattgtctagtgaatttggaaataaagtagttaaggtgtttccccccagtaggggtcagttgcgtctgacccaagcataaaatatcacaaattttttctttgttggtcaaatttggcatcattcaaaagttctacatgtttagaagcttttggtaaggtatttctaagcgattgaacaacttatgtataaaaaagttgcaacaataaaaccaaaaaaagtcagaatttgcatattttaatttataacttttttacatgtcggtaaatctttatgttttttgggaagccgatagagcttgttaagagctttcgaatgataccaactttattggatttggtcaacaaagaaaaaaaagttataattgcgatattagagacgaaaaatttcgaaaaatatgtagttaatcttgaaaatcggcaaattttaaattttcttgcatgagggtcgatttcgagtacataggtaggtgccaataagtactaatccaagctaaacgagtaacattcaatgatttcgttcatttgaacgtgcatcggtgagtacatattactaaatccggaaaaattcggatcagagagtccaactcaatttcatagcactttttgcatgtttttgatttttttctaccacaattttttgggtcggggtcactttggcgcgggacattttggcgccgcaaaataggtctaagtgttctctaatagcctgcaagatgctagaaaaatatattcgttttaacaaaagatatggcgtgctgcgcgaaaatggccagaaaaagtcagttttttaggtttttggccaaacttttttgtatctcaactagattttttgaaattttgcaggctattagcgactatcaagcgcttaaaatcacatcaagattttttaatttgaatgataaataaaaatgttatagcgtttggcgccaaaatggagagtcttgcgccaaaatgaccggttcccaatttttcaatcattctatgttagttgacaataaaataatatagaaaatttgcttattgtttagaaaaggattttgcaggacaattattttgttcatcattttgtgccactaattaattgaaaaagggaaaagtgtgctaattgaaccacaaaaatgaaccgacggtaagaaaggatttaaaaaattgcaagttttcatttacccaattttcttatgtttcagttggatttgtggcgacgtttggatggacattctgccatcgtttgaccatgctcaactcggcctcaaaatggcattgctttccgaccggttcgacatcttagtggacagacatttggatggaaaaagcgaattcacaatttggagagcaatcgaaattcgcaagaaagaaggaccaaaaacgaaactgtctgaatggatcgatggcaaaagtgtggcatttccgttccccgaccgtccgctgcccaacaaaattcgttttaagaaccttcggatttagtaatttcaaacttttgggcgctagtttaaagaagccctcttttgaaaatttgttcactttttttgcataattttttttatgcaaaatttgtttttttaacatggaacgtattgcatactatttaataaattgaaaaaaacattttaaaagataatttagcgctagttaaaaattttctgtataaaaatacaaaaaaaaaattttctaaaaaagtgaaaaaattttcaaaagagggcttctttaaactagcaccaacttttgtgtttattaaagcattttttatatttcttcagctacattgaccattccgtcattgaatttctccgttcaaacaagcacatttgggacagaagaggcaccaatttggaagtgtttgtggatgcaattgatatgggtgttcaaccgatttgggatgtttttatccgtcaaatttggcctatttttgcgacaaacattcaccatttgggctttcgcaatgccgatgctttgaacaacttgcgcagtcgcacttcaccaacgattctcactgatcttgatcaattggtttcaatcgattccggttttctgttccccgatggaattgctgatgatgggccaaatgcaactgctggccaagcgttgaccaaatggctgcacactccgacaaaaaatgggcaaccgaagcaattacgtttccgtgcttatgtggttccaccaaatctcgaatggctcaacagcttcaaagaggtcgtctcgccagaattttcgtcaatttgtttttgttttaccaatttttgtgtttaggcattccgtcgtgccaccacttctgtcagtaccatattcaactttattttcgtgtggacccaatgccaactgaacaatttgaattgatgaacgaacggaccaaaaaaaaagctgacactgaaacaggagatcgacgaattccacctaaatg

SEQ ID NO: 13634 - DNA, 1281 bp, Heterodera glycines
  unsure (1)..(1281): unsure at all n locations
tgaattcgttcccttccaaaaacacctttgctcacgatcaatagggaagnganggaattggaaagggntaaaggnaaacattaaaggaaangnnnagnaaatngagggngagggnggaggaaagggaaaganaaagngnngganaantggtgnaaaagagnnaaagagagnaaaggggntgngantatttgggnagaggagnnanggggaatgganagangattgagnngnattgatnattaanatnaaatggggtaattaaaaagaatataaaatattataaaattgtttatnnaattaggaaaaagntattttggnaatattttnngntnnaagaatttgttggnatttntgggtgannnaattaaatggtntgagagagagagagagagagggaggggagaagaaaaagagagaaagaaggagaagagagagaggagagaaagagagagagaaggagaagagtgagaggagagaaagagagagagaaggagaagagagagagggaggggagaaaaaaagagagagaaagagaaggagaagagagagagagagggaggggagaagaaaaagagaaggagaagagagagaggagagaaagagagagagaaggagaagagagagagggaggggagaaaaaaagagagagaaagagaaggagaagagaaagagagagggaggggagaagaaaaagagagagagagagaaagagaaggagaagagagagagagagggaggggagaagaaaagagagagagaaggagaagagagagagaaagagaaggagaacagagagagagagggaggggagaagaaaagagagagagaaggagaagagagagagaaagagaaggagaacagagagagaatttgtgggatgaaattacaccaaacaaaaagaggtaaaattcggagcaaaaggcttcaaatgctaatttgaatttctttttgtgtgtgacactttcttcatgattaattggccgaatgtgaaggaataagaggacagaaaggacaaaagattgaaaggctcagataagccatcctccggaagttcggaagcagcagagaatgagggaaagggaaagaagggaaggaaaaagagacagatgaaagttggggaggggatgagaaagatttacatttttaagaggccaaaagagggggggggggggaagaagcaatgagatggccaaatttcgtccaaaagtcggacaaatgagggagaaatancaaancgacctttgaggacgcgcgagaggaaattgcgaaacagcaaaagga

SEQ ID NO: 13635 - DNA, 2331 bp, Heterodera glycines
  unsure (1)..(2331): unsure at all n locations
gaggggcggaggatggcccggcgggtcactctcccgcgacacttccgtctcctcccccacgtcccccgttttattccattctttggacagttggccaaatattatttgcttcgcttgcccaatttgcctttgctaaattttttgtattctattttttacccattttcttccttcctttccgtgtcagtgcttttcctctccatcggcggttggtcatttcgtgccaaattcggccgaagggagaagaagcggttttgaccaacagcagcagcggcacgaccaaagtcagctgtgccaacaacagcagaagcagccgttggcgtgccaaaggcacccaaatgagcaattgtttgccctgcggcaacagcaaagccaacagcagcaaaatcagcagcaacaacaacaacagctcgacctcttccgcccttaccacacaatcgccgccgccgattggctcccgcttcagtaccaacagcagctgaacagagcacaacgcccaactgacgcggttggttgcgcgaagaagcgcggcatttgtgccccttaaaattggatgaccgccccgaacatttcagcgccgcgttttgtcgccaccgcacaatttgatggtattaagcgatgacggggacacattgagtgttgccgcgggggaagtcggtggaacgacgcggggaacacccggcgcaacggcactccacggggcacaagcgatgactgcaaatcactttcacaatggtcagctggagggttcttcgtttccctgtccatcgggtcactttcgatcaattatcatttttctatcattgctccgatcacttcactctgattatccaatttctgtctgtcttcctcagattcgttgccccgtcggcaccccgcctaccacactcactcgcttgaccgtcacgcccatcttcgggtcctttccgccggcgcgcgacctccgccgcctaccgctgcggacgatccctccgcccaccagcagcatttcaccgccagcgcaacagccgcaagtgtttcgcgcaatttgccccaccagcgacttcagctcaactcgctgctgatcagtccgcggcaccattactcagtcaacggatattcgtcttttgcccatccgcagaatggaaatgcagcaatttccacgaattgtcagtgatcagagagggagagtgaagtgactgactgacaaatgagagaaggcagtttaatgacggaattcaattttcgaaaacaaaaaaaatcttacaaaaagttttcgctcgaaaaaagccaaaaattaaattgtcaaaagcctccatctgccgctgatctgcttaatattttattaatctctttgtttttcgctactaattacctgtctaattcgcttaagtcccttcccttatgctaacctttcgtttggccatttgcccttacgcttttcctccgtttccacgcgctttacctttcagttcatcgccgcagccgtggcggggacatttacagcaattgcttttcctccgtcgatgggcctttgctgccgcccctcgggcattatgcccctccgccgccccctccgggctcttccgctcgttcgtcctttgtctccggcactgccacccatcagcgttccgcttcgctgtccgccatgtcgcggtcgatggtcactgtgttggagcagcacgaggagagacaacgccgcagggggagggtggaggggcacgaagcgcagcagagagtgctggaatatgtgagggcattggcagcactgaacggcaccaacgcaaacaacaacatcaacaatatcaacaacaacgccatggacatagctcggagtgattgtgccatcgacccattttcagtggcacatcataaaagtgccaaacgtttgcacactcagccgccgttgcccattccgccgcggtcgccgcatttaatccgtcgtacgcccctttcactgccacgacagttggaactgaacaataatcacgcaacggctggtaaaatcagacaaatgcttattaacttggttaacctatagcttgccttttgctttgctgccttcgcttttcctctgtttttccatttaaattttaattgttttttttcaaattttaaattttcttccgtcccttttaggcggcactctctctgctaggggtcatgccgacccgcgcatttactcgaatttgaagtgcgctagcagaagcaatggcgttggttctcccattcgtccttccgttgcgcagccgggctcacaactctcgttggcttcttcccgntggttcggcttatttcgacggttggccaattaatcaaatttcttttgaatcaaaacgaattttcgtacag

SEQ ID NO: 13636 - DNA, 1786 bp, Heterodera glycines
tggcaaaactgcagcagaaacagaacgtaaaggtagtcagtcaaaacagcggcggaatggggtggcacaattgcacaacaaaaagcgaaatttgcacaaaaaaagaatggaatggaatgatgaaaatggcacattcggtcaaaatggcacagccaaaacaatgaatggtactgcacacattttgatcatcattttagcgagacgaggtggaaaaactgtgcaacgaaattgaacaattgcgagcgatgagtgtgaaggccggcgtaacaccgtattggaacacggaaggagcccagggtacggtagcgaaggggggcaaagaggaggagcaaccgcaacagaacggacggggcagcaaaaagagttgggtgagtaacaaagggcaaaaggcttaggggtgcaatttaaatttgaaatttaattctaaaatattgaaaataaaatttgcaactttaatgagaattaactcttaattaaattgcaacaaattaagaaaaacaatgtggacactcaggttagcaaaagaaaaagcaaaagttagtgtggtaaataaagtggaaatgtgccgtgtttggtgctaattggtgtacataattgagcagttaattttgataattagaccataaaaaacaacacaacaattagaagtttttattttaaactgcatccaatttattattaatttttttgttgtcactttggtgtttagtccgataaataaatgaatacttaattaattaattgttaataataaattctgttctgctaccgttcagattcgaagttcattcagccgcgcctttcacaaaggcaacaaaaagagcaagcagcaacagcagaaggagaacaacgacgccgcggacaacaactcgctcaattcgttctcctccttcgcccattccaatcccagcaaaagtgccaatgccatcagttcgtcttcgtccgtttcggtgacctccaaaaaatggacaccggccaacacagacggcaattgggcgagctgagtcaggtggaaatggcacttttgcagcgcgagttggacaacagagaagttggcattgaccgatgtgcaattggacgcactggacaaggccaaagagattgacattctgcgggagactgtcaacagactccaggtgggttacggtgtctcaatgtacgataattttatttttacagtaacccaaacggcacataagttaattcttggttttatgccttttctgtttagcatgaaaacaaactgctcaagtacaactactccctcttggagcgcaaagtccgctcggagtcgcggacgagttcgcacctgtcattgaacaccaccggcatcgccgggggcggcgcgttggagtttgacgcggtcgtgcaggacgaggtgccttgctattattgttgctctaaaaggtgcctttttgttgaaggtgctcgctgaggctagcgaacagcttgcgcccccctacgaattcgccgcctcgtcgccctccagcggcgatatttctgtcaacacgacgaccaccggcagcaacaactccgccggcggtaccacaccgttcattcccccacccgccgatctcgcggccacaaaatcggtgaaccgttgcagcttcgcctcctccacgacgacttcgtccaaacgtatgccatttggccattttcctattttctgaccctttcccatctcggcgttttcaggctcttcccacggcgctttgtccacggcactgccctcagccaaggtcgtcctctgcgttgacttgagcgggcgtgtcgactcgctcagtca

SEQ ID NO: 13637 - DNA, 1671 bp, Heterodera glycines
aaaattggctaatatgtaaaattgcgtccagaaatttttagactatccgaagcaaagcacgaatgaattaaataggcgaaagaattcacagtatcgtttctaatagggaaatattgacaggatattcggctaaaaacgggtttgatcatttttagcgcatttttaggtatacatttgagacaattgggcaggacaagaaaagaatgaagttgatgcctcatgaaactcggaattggttatgtttagtcgaaaatatccttacataatactcataaaaaatacaaataattcaacccacctattctatgaccacattctgaaaaaaatcccagaaatacgaggaaagatatgcttggtcacaataaaataaaaaatggctagtatgtaaaaatttgcggtcactaataaaataaaaaatggctaatatgtagaattggcgtccagaaatttttagactaatccgaagcaaagcacgaatgaattaaagaggcgaaagaattcacagtatcgtttctaatagggaaatattgacaggatattcggctaaaaacgggtttgatcatttttagcgcatttttaggtatacatttgagacaattgggcaggacaagaaaagaatgaagttgatgcctcatgaaactcggaattggttatgtttagtcgaaaatatccttacataatactcataaaaaatacaaataattcaacccacctattctatgaccacattctgaaaaaaatcccagaaatacgaggaaagatatgcttggtcacaataaaataaaaaatggctagtatgtaaaaatttgcggtcactaataaaataaaaaatggctaatatgtaaaattggcgtccagaaatttttagactaatccgaagcaaagcacgaatgaattaaagaggcgaaagaattcacagtatcgtttctaatagggaaatattgacaggatattcggctaaaaacgggtttgatcatttttagcgcatttttaggtatacatttgagacaattgggcaggacaagaaaagaatgaagttgatgcctcatgaaactcggaattggttatgttttgtcgaaaatatccttacataatactcataaaaaatacaaataattcaacccacctattctatgaccacattctgaaaaaaatcccagaaatacgaggaaagatatgcttggtcacaataaaataaaaaatggctagtatgtaaaatttgcggtcacaaataaaataaaaattggctaatatgtaaaattggcgtccagaaatttttagactaatccgaaaagcacgatgtaaagagtcgaaagaattcacagtatcgtttctaatagagaaatatgcttacatgatactcataaaaactacaatgatcatttttcccacctttttatgaccacatttgaaaaaattcggaaggacgaggaaagatatgcttgatgcctcattaaaataaaaaatggttagtatgtcgaaaatttgcgttacataataataataaaaaatactaataattcaaactacctattctatgaccacatttagactaatccgaagcaaagcacgaatgaatattaaagaggcgaaagaattcacagtatcgtttctaatagggaaatattgacaggatattcggctaaaaacgggtttgatcatttttagcgc

SEQ ID NO: 13638 - DNA, 1466 bp, Heterodera glycines
aaaaaaggagacaattataatgggaaatgaatagtaaagaaattaaagtaagaataatatacaagaatccgatttctcgtggggacccggcaggaccatggtcgaagcggatgatattgtaagaaaaaatttttagaacaaaatttcccaaaaaatcaatttagaaacaaaaagaaattttggcccactatgtgggccaaaaatgaaggctcttcggaaccaagtagactactatgagaacagagagggtcctcagatcaatgtgaccccaatggggggaatgctataattgtgactggggccgatggggtgccgccgattggtgcagaggtacaatgaaaataaaaattcaaaaaaacaagaagcgaagaaaaaacaggaaagagttagaggggaagaagaatacttcctcttctttgcgagaattgggggacagcaacgacgggacgaggacatgcaaagcgtggtagggaaaatgaaatatacattcaaaaaaaaattaaaattaattaaacaaaggagggatcagttgcaagcaccaccacaagcaagagaacgaataggagcagtggaaaaagaaagagagagaaggtgagagcggcgaagaagcttagaggggttgaggacgaggaggaaggggaagaaacacttgcatttttttgaaaagggggaatttaaaaaaatgtttttttttgatatcgatcaaaaatcatctgttaactttttttattaatgttgaataaaaatttaaaaaaataaagtgcaaaaaaaatattaaaaaataagctgtgaatggattacataaaaatataaatcggctgggaattgaaaagaattaaaatcaaaaaaagggggtgttggaaaaatacgttagtaaaattttaattacaaaaaaagaaaaaaagaaatcaatttgagacgctaaaaagttgttgagttttgggctgtatgagtccactcttcagcagattgcgctgtgtgcgatagagaacgaaaaggaagagagaaaaaagagagagaaagagagagagagaagaaaagaaaacaacataagtgtgggggagagaaaaagagaaaaaatgacacacacacacacaccgtccactcaataattgagcaaagaatgctcactctcccttcactaatcccaccgcccgccaacgttcgctgaccagcagcagccaacgacgccaaactttatcgaattaaattttatgtaaaatatccaatgccgtcgaaatgtagaaattttattaataaaaattacagtttaattaggaaaaaatttatttaaaaaaattacagtataatgaggaaaaagtgcggaaaataaacaccccacacccaccggtttaaaaaaattttttttaaatacagtaccccgaaaaagatgcgcgaaaaattttgcgcgaaaatgggccccggatacctgccggtaacagctgttttcacacctgtcaacgcac

SEQ ID NO: 13639 - DNA, 2976 bp, Heterodera glycines
aaaaaaagtaaaattttgcttttctagtatttttcgaaaatatcccatgcctaaaataaatatattttaaagtaaaataaataaacaaaaagacctaaaacatataaaatgaatggtaacaaaataataaatcattgtaattatacatcaataattttgcctctaaaaatcatagacttatgaaaatcatttgtagaaggagttttgggtcactttataagtgattttctcgacaaaattcattgaaataaaacacttaaaatagctaaaagataagagattggctaattaaaccaaaaaaaaaaaatcaaacataaaaacgtcattttattcaagttctaaggaactactatttaacgaataaaatgaaataaattattatagatttaacttaaccaatatataaaaaatcgatcgattacaaattttaaattgatacatgcaccagcaagaataattaagaattgcttgagcattgattttcatttttaaaaaacaatattaaataaataataaaaaataaagacataaaaatgtattcgtttaaggagtaaatccaccgattgaatcagttcgacttattggcacctacagcagggctgcaaattacaatagaaattaattaaatatttgcctattaaaagagagtattttaataaaaaaaagaaaaaaaatttaccatatagaaaatgagaaaagctaataaaatgcttttcaactaaatgtaattacttgcaaaacgtgtaaataataaaacaataatgaacaaaataataaattttatgttcaacaagttttattatttaaataagtgcttaaaaaaggcgaaataagtgcgaaaataagcatgaaaaaattcaaaatgtagaggtgaaatttgttaaaattgctgttttctttatgttaattagttaaaattaagtcaaacaattttatttactggttgcagttagaaatgaagtacatttagaaattttcaggatttaagggtcgattctcaggggtgtatttttccgaatttttttttgtcgattcttatgggtgtatttttcgtttttattgcatttttgttaataaatttccaaaaaatcgcgaaataagaacgaaatcgaataagtgcgttaaaacgcaaaattttcgaaccgaacaaaaaatgtgtttttcgtacatttctcgttgagttaatggcgcagaaaaaataagcaaaaacttataaatcccagccccaataatcaaataattaattatatgttttaaatgtatattataaaaattaaattaaaagatacttttattgataatataaatttataatagtaataaatgttaatttctcatttatattggttacacaaagtgaaccgaagtcgtctagactagggtaagccccgaaccctcggggggcaaaaagtcggaggccgtggacctcgggggggggcgacatgtcgggggtcggggcggggaaaaagactacaaaaatactttaaaaaaaagttcatgggtcaagggaatcgattaatgtgctaagtgtgaatgatatttatgagagtcgggaggttgtcaaagaaattgaagcgaaggagatgaggaaggagcgaaagatattaaagagaatttttgattcaatttcataaaacttatgcttttcttttctctaattccaaaaaggaaaattagagcaatttaaagtatataaaaaaatagtttgtttttttaattaaatttttatttaaatttgaaaattgaaataaaatctatattcatacaatatttaagacatgtttgagataatatgatattttaaaaataaaactattccttaaaagataacaagaaattttaggaaactgaataaaccagttaacattttttgaaacaaaaagtaattaacggtaaaatttacatttattgtgaacaaaaaataataattattaaaacttattttcagacttttgttttattgtagtctatttcaaattttacattttggtaccattcgatagccaagctttttcaaatatatattccaatttgcaaaatgaattaaagggggggggggggtaaattttaaatgatcaacgtttgatatttatttattacaattgtatattaactatgtattattcattcttctttatattgtcgttttggttatagttccaattattctttttaaattagaaattttattacattattgatttaaaaattattatttttcctccttctcattaattagatgttaaataattatgtctatttaaatattagttgttttctataaatttgatagtttcatttttttttattgaaattaaaaaaatattacttaaagcgattttattttaacaatttaaaaataatcattattgcattaaacattaccaagctcaacaatcctttttgcataggctaaattttaattttttaaaaactaaaataattcaatttataaaatttattatcattatcattctgaagttttactataataagaattaacataaaacatttaattttctttaacaaaatgaaaattaattttacattgaattaatttatttgctttctgctatttgataaaaaaactaaaaaaaaaatgatgcagacattaccatagattaaaaatttctcgctaaattgattttttgttttaaatattatgacaaacatttcttgtaatataattttttttaaatttccaaatatcaacattacttattttcaatttttctatgtttatttctttttcattgataaacaatctttttcggaaaaattcaataaataggtttttagttttattaaaattatttatttattaactaaaacaattttaaaatagcatattaaaattttattttcggtaaatatttttgtttttaacaattatttattcaaaatgatcagtttcgaaagtcggcttctgcaagtatgaggaaataagttttttctaaattatactttaaaagtaaa

SEQ ID NO: 13640 - DNA, 4421 bp, Heterodera glycines
aaatttctaaaaattcacgcagctttccattaaaaaaatcctcccccggggttgtgtttaccgattatctgaagaaaatggtcctctgtgcttttgtcacggacggtacagcaaataagcgcgacaacgccgccggggacactttccacacagagcaaaagtcggagaagttgagcaaaaggagggaaaagagacgggtcgaaagtcacatctgaaaatgggggagaaatgggcaaataaatttaaaaaaacatggtaataaaatgcagtgaaaacataaaatttatgtgttggtcttcaataaatcccatcccttctccgtttgtttacccgcagcgattattaattcggcgtccctcggcagtgtccgccgttcgaagtccgtccaatccaatcgctcaacggaaaccgctgatcgtgagctccgggaacagtcgaaattcagtgccacattctctcgcaattgtcggagaacggccggatgtgcgtcggagagagtgacttttgccgaggcattcgaagcagcgaaggaaatgccagcgaggccacagccggcgcccaattccaaggcatgagaaacatttgaaaaggcgacagaatggggcgaattcgcgaaaaaattggcaaaagcgaacgatgccttaagggaaaagccaaaagtgtgttaaagacattttgccaattggctactgaccccccaacaactgagtcccgtcgtcccatgcgaaatgtgttgcactctctgtttgagcaaaatgtaaggagctttggacaaatccgagtcgaagagattggggaaaatgcggaagaaacattcgtcttggccatcttctgagtcggaagccatcgaagcacaaagcgactcataaagaacatcactcggatcaaattggaactcattcatctgaaaaatgcgtcaatttgttggttattcaacggatggatcatgccctggcaattagtcgcttcagaagtgccctgaaccattcactctttggcgggaagcgaacactcgccggagaacggaagaccaacgcgtccaaattcgggaattgttgcatttgtttcaaaaatttgtccagtttttccacggtgatcggcgaagaagcaaaaaaggaggaaagaaacgcacggaaagtgacattttcagtgagttcagtcggaagagtttccgcgagaagcggcggacggaaggaatttggaagagatcggagagcggtgaagagtccgctgtttggccgacttggaagatgagtcgacatctgacgggcaaaaagcgatgctcaattccaaaaacggactaaaaccgaccgaaggaagaacgaggaggcaaataaaagggacggtcgtagggaatttggtaatgacaggcgatttccagacgcttttcggcttccttcagcaattcactaatcttttcagggtccttctccttaagatgatacgattgggttttttagtctttatttctctttaattacgtttttgtacgctttgaaccctttttgggcctcttctctgatgtatttttgttcttcgtttgtgttcgtcggttcttgggccacccaatcctttgaaaggcgaattatgcgtcggtataatcgtaaaacttcacttcttttgttcatagaaaatcttaaaagataaaaactctattagcatatccagattcacaaagatttgactacctgcaaaaaaaaagttataaaaaatgaaaatattttgactttttttcggcgctacttgcccgcctgtttttaatgttttttctctttggcgtaaaaaacaaattcccactttttttatattcgaatttttttttactaaaaaattgataatttaataattttaataatacataatccttctttcatttccaagcctaacaaaattatttgatattttatgggctttcatttgctttagcatcgtttgctcttcgattgttggccatattttgtttgatgagattcgatttctcgagtgttttcacccattttaacccatagtttcactgtcatgaaaattggacatcggaccccgccgaggcagaaaagagccactgaccctcccccacagttcgattcttccgatttgggctctccgcaaaaggttcttaacttgaataatttgaatgcatataacaaaataataataattgcatcaacaaattaaggtttggtcactgttatgcgagaaggacgagaaattgcgccgagatccgcacgtattttcgcgccagaagaaaataaacgccaaaatgcgtgccatgctgctcgactggctgatggacgtgagcggaattgtcattaattagcagtcaattaacgcgagaccaaattgaaaaggtctgtgccgacaaacagctccaccgcgaaactttccatctttgcatcgattacatcgaccgtttcatcgcattgagtgaccaccaaatgcagccccagcgattgcaactgttcggctccaccgccctggtaattgcgagcaaagtcgaggtccgtttgtcttttccgaagctttttcccaacgacgaaatttccaggaaatttatcctccgaaaattgcggagattgccgaatacacggacgggtcagtccctcattttgttgggattgaattccgaattgtattcagctgttgttctgaggctgacattcgaggcatcgaagagattatgctggagaagttggattggacgtgttatccggtgaccgctgtccattggctcgcacttttcatgcagctgatgaacacggacgaagtgatccccgcccagcgagtggtcatttcagccggttggtcgtcttctaacagacaaaaatgattaacacattggaaataattgggcctaatggccgtttgcctttgtgtcgctcgtattttccttttattggcactttctctcattgtcaggcaaacggccgctagacactccgtcactcaacggcgactcttcgttcgtcatcggtaaaccgtcgctggaggtgagcattgagtcggcactgcccaacgacgagaacaatcagccggacgatgcccagcgggcggagtcgcgtccttccgtgccgtccgtttcgtccccgtgcccttcgccctcttcttgcgcagttggcgaagatgttcagctcgaggttggagtgttcgtccatttattgtttgttcctctacaaatgtgcccatttccaggtttcgtccgtcgttttcgccggtgcgtcgcgcgtccgtcgcatttccttcagttgcgcctatccgcggatgcaactttgccacattggctcctccccacgcgtgctgctgcacaccacgctagcggacattagttacgtcggccataattcgtacagcagtggccacatttacccggaccagcgctgcaccgtgccgaaacttatgcggggcgaattcgtccgaatggccgcggtaaaatcttgcaattttttccgcttttccatggcgaaatcatagtttaagtaacaaaaagggggagtttgtacagtttcgtggtgatgtttcagattttggacttggccatgctcgactcgggctgtcttcgcttccgttacagtgaattggccactgctgtggtcctttgctgctatgagcccgaacatttgatttgccaactcaccggtgccgccccgaccgattgattgcccttcataaatatttctttcctttaggtttttcgcctgaaaaggtgcgcgatgcccgcgcttacattgagccgttcgtccgcgtgttcgacctcagcgagcccaccggcacagccattccttgcctggcggacgtgccccacggcgaccgacacaacattcaaacgtacacatcgaagtgtctcgaacatttggtgagcgaaaaccccttatggagatgggaccttccgaaaaacttttttgtaaccaaaaagaggcctggtccgttactattagcctggtctactctttggcaatctttttttcgttgctccgttttttacctataatttatcatttttaggagactgtgcagcaaattcgaaaagagactgagtcgcgtcgcaaggcggtggaattacgggtcgcggctcgggtgcgcaaacgcaaattcggctcggcaatgaatctctaatgatattcatcaataaatatctaatttattctcttatttcatctctttctcacacggaaaaatttgccatgtgtaaattgtttgtctgcgattgttttggatcgaactttcgctactggcttttgattccaatcccacagctacggaaattgtcaggctcacaaccagcagttttttattagtaaaatgcggtgattacaaaataaaatttacacaagaaaaaatggtaatttcgtgacttatacgttttgagcaaggatgactgagaaaaaaaatgagtgggtgtaaacggacataaaatcagcacaaat

SEQ ID NO: 13641 - DNA, 2112 bp, Heterodera glycines
cataaaacaactggggaaaatggacacggaattggatgggttaatctggcaaattgatgcaaggttatagtcaactattaatagaatgaggaaatccttgctaatcgttttcataaatttaaaattcttttattaaaattggataaaagaaaaagcaccccacccctccataaatttaccttattagaatctcagaaaatgcacgtttgaataaatgaatttatgtaataatgggataaatttttaatatttcatttttgtaggtgtttctcgttaattgaatattctcaataactaacattttttaagttaattaatttttcaaaattttgtacaaatattttatattttttgtcaatttatttgaatgaattgaattgaatttattttatttattttaaaatttaatttttttgaagaaatcctctgcaaaattcgcgtccgtttgggcttatcattgtaaatttacagatttgcgagaaaataaaaataatagccgagaaaacattttggaccttttactaatcgaagaccgaaacgaatttttgcgacaaatatttggtgaaaaggaaaaatttgatacaaaaaataatgaaacaaaaattgaggaaacattggaagaattgttaaatgaagaaaagaaaaagaagaaaaacaaaagaaacaaaaagaaaaatggaaaagaaaaaatcgataaatcaataaaaaacacaacaaacacagagacgaaaaacagtggggagggcagagaaggagaagagggcagagaccgagaggaagaaaaaaatgttattgaaaagagaaaaggggaagaaattggaaattgtgaaagtgataattattcaaaattggatggaaacaaaaatggaaatacaacggacgaacaaatgacggcgaaaatgccaacaaatgatgcaattcaggctaaagaattggacaaatttggcacatttagaggttgttaaaaagtttaataaattaaagagattttcaaattacagtgaataagtcagtgatgacattttttgatcaaatttttacatacatcaaaaattaggacaaatgcagctttcaacatgtttaatttctaaaattctcagacaagaaacctgctgctatgaaccttattaatctaaatttttgttttaacattttttttacaaaatacttaaaacctaaggttattttttgatttctaaataaaagttaaacattaatcaaaattcaattatagtagtgtaaggaagaagctggctgggcggttaaaacgcggaaagcggggttgataagatcaataaaagaaagggcggatgtgcctcggtagcttaatggttgagctgcccacgaaagggtccatgagtgggttcgattcccacccgaggtttaacattttgcccatttcttattgtagattataaaaataggggctttcaggtgtgaggatttggccttgcgaggtcgatgtggctaaatttcaaatgaggaattcaggcttttgtggagtttcaagattttatgaatctttttaacacctcataaactattcatttttgtgcaaaattttgttaaaaatccgtctaaaactcaaaaaactttcccctgcggcgcccgtgctgggtcgtttcttaaaaactgccaagttgtaggaaaataaaaaatgtaagacatgtaaattcataaattggccaatttcaacctaattaatatttcatgtgtcattcaatagctttatgtgttatttatcagaatattaattttcaaaatttttaaattagtataaaaaaacttatggttattaaattccacaaaatcataagtcagaattttttgttgataacttttttgaaactcaatgaaattttttgaaattttaaagataaatagagaattcttagagctaccgaatgatattaataagtttggctaaattgcattttatgactagaaaatttaaatgtttataattatattcgcatggccatggtaaaaaacatagtatgttcaatgctttataactttttttcagaagcaatgagattaaattttctttttaggatttaatgtcctcttttaatcaatatttttaaatttcaaaaaatttaactgggtttt

SEQ ID NO: 13642 - DNA, 2095 bp, Heterodera glycines
gggctggccgctgatttgaatttcccgatcacgggaaaatcccgtgagccgtgatcacaggggctttttaaaaaaaaatcccgtgacccgtgaaacccgtgatcacgggcttcccccaaaatatcctcgtgatttccgtgatccgtgatccgtgattataaaaaaaaaatttctaatgattttttatttaaatttatttaaaaaacggaatttaatcgcgggaaaaattcccaaaaaatgttttaaagaaaccaaaaccatataaaccgctttttttgcggcgaccttttccaaaaaatgactaagtttacgatttttggcaattttttgaggaaaattagagctttttgtagaaatctccaaggaaaatttgttatttttaactaatttattaagaaaatttttcttaaatttaaccaaaaatctatttatgtagagaaaaaaatttctctaagctaacttttgatgctgaaaaaatcttttggaccaacatgctcagtccttcatgacgatctgaacaccccaaaagatactgaaagtcgggaaaattttagaaaaaattcttagagggttgggaaaattttctgaaaattttgattaggcctgtcgttttaaatttaagcgacggagagaaaaatagggtttttagcagtttatatgccaaaaatggtaatttttctgccattttggtgtcaaaatttcaaaaatacggtaaaatgggggtccgtctgccggtggtgccgacaggcgccgccgggaaaaattttgaaattttgagtgaatttgttaacagtttttttccaaaatatgtccaatcattggttaatttattggtctatggacgttttaaaaaataaagaaaaataattttcaatgttatgaaatttcttgttaattaaatttcaattaaaattatcaaaacaaattatataaattgtcctatcccaatggggaattgaacccaagggacagacaacgaaagacagaaggcttaaccaccagactacatatatatgtttattttctaatttgtaagcagaaaagagtttatttatttttctcaaaaaattcttcacaccactttcctattttcgtctcaataaaaattccctatataaaatgccaatcacggatcaaaatcacggaaaatttgaaaaaatccgtgacccgtgatccgagatcacggcaccccaaaaaccccgtgatttccgtgatccgtgagccgtgatccgtgatcacggccagccctggtactgacgaggccaactctttcactcattttttcaatttttttttttttttgcaattttctgtaaactttttctattaccccggtataacttcttcactaatttaaacacttgttcataattattgattaattcttttgttttttttaaatttattattatcttttctcgtaattcaattttttcattaattatttgttcagtgggaaatgcaaaccctaaaaagctcgtgaattcaattgatttgccaatttatcatttcaattctgtgtaatccacccaaaaccctcaatggcccattgattattgaattattgaagaatcttttatttgaaattattttattaatatttatgtcatcacaacagttaggtttttattaatccagctaaactaataataataataaaaaaagattttctataatttatgcaaatatcacgatcatttttcaatcacagagcattaaaataagtttgctttaaacatttcaaaagcataaattaacaatttctaaaatgtttctctatttttcattctttttatgccattaaaacagggagcgtatttgtccttggatgccaaggatgtccttggaaatgagcattagaaaaaaacattcgaaatactacaattttttgaaattttctacctattttttaaaattaacttatggcatgaaatgatgaaaaaaattagcggaaaaaaatctttgaaaaaatctattctggtgaaaatataaaccatttgaataaattttaaccaattttttaatgtccttgggtttcttaaaatttgttcgttatgtccttgtaaatcagtatacctgtccttggaaagagagt

SEQ ID NO: 13643 - DNA, 4530 bp, Heterodera glycines
cttatgacatttttattctatagagaaataaatcttcctctagatataaaaaaataataataaattcaaaaataatttttaatttgttacttgattttctaataatttataaatcttagccttttttgtgtttttgtttataagtgaatcagtataccaaaaataatttaataattttttaaaaggaattaacaaaaaaaaatttgagaatttttgtattttttttatattttggttcttagaacacatcttactaaaaaactcagggaaatattaaaaagaattagttagagtaaaataaataaaatcatagtcattcaattaaatttcttttagttttttcttcgaatttaacacaataatatctacaattaaaaatgcttttaaatattgcgttaaaaagaattgaataaagcttttaaaattcactcactaatttattgaatttctccaaaaaactgaagatttttttaaaaataatttcttaaataaatatcatttaaataaacacaaaaataatttaacattatttcatttactgaaaattaaattaacaaaaaaagatttatttgagtcgcaaattttatatcaatttaaaatctgggaaattgttttaaaatttgaaagggatttttttggtacaaaatatttgattctccatgattaattaacaaatacaaatttttataattatcattaataaaaatttgcgtattaaataaatcctttaaaaggaatatatcgatttatttattcatataaatgcattttatatagatttttacgatacaaatttcaaacaaacaaaaacacgtataaagctacttaaaatatttgctagaagaataaataaattcttaagaaaattagccgaaacttatttaatctaattcattcaaataaataattaaagaattatttgacaatgaaaaatggaaatttatatttgacacaaaagataataaacgaattataaagaaataaagtaatcaaaaaagaagaattgactaattataacttatttgctccaccttaccatattaatgaaatagtgataaggaatacaaagaaaatattaaatgaattaaaaaaaatggaattatcaagaaaaaacagataatattcttataataatacaattaatttggtttttaattaaactcaaaaatttgtttattttaagttagtaattgaaaaaatgaaatgaaaagcttaaattaagacataataatgttttatgaatttgtaaaataaaaaaaaaaacaaatataataaaatttttattaatatgaatttcaaagaaaaaatctttagcaaataataacaacatttacagaattttataccacacacaaaatatgttaacatagttttttggaataaatgaattaaataataatttagaaaaattctcatcatgtttaataaaataaccctttattaattgtgaagtaaatgaaaataaataaaaaataaaacagaataaactataaaaatagaaatctttattcttaatcatttattgttattcataatattaacttcataaaatttaaagagagaaagcgccaagagccattatgattccgaggaaccatgaagaaacaaacatgaaaatagatttaaataaaaacagattaaaattaattaacaattataaacaatattatatatttaattatattattaaaagaaataacatattttgaaatgctcattaaaagttacatccgaatataataaacaaaacaaaaataatttcatttgataatataattaatttaataatgcattaaataattaaatttattttatttattcggttctattttcatattaaacttgtcaaatgtttataaggaaaatataaataaaaaacaaaattataaattaaaaaattctcaaaaaagaaaattaagataatactttgtaattttacatgtgaattaaaatatgtaccgaatttatttctttacaaacaaaattttgtcattatttttggatatgaaagaaattggattttaagaattaaaaaagggagtattaacttgaaaagaatcatattcataactttgtttttattaataattaagaagaaaaaatgaatttgatttaaataaagaaaagcataaaagataacaaaacaaatgtttatgtgctttttatatatttaccaaaattattaattaacaatttattagaaataaacaaaggttaaattattgttaaaaatgaataatgatccgcccccaaatatgagaatctgaacatgatgataaatagatttaataaagcaaattttttaagagaaatcacaataaagattaataaaaatatatatatataaaattaacataactaattgttactcagtaagaattgtttgctaaatttaacttacaatttactaatattattcttattttttttttggagaaaaggaattataaatctaatggaaataataactacctttttaaaaaatttaattcaacgatcgtaaattcttgaatgtaaacatgatttgattaaaatactaatgttcaataacaactttagaaattttcataaaaaattactggtggatgagacaaaaaatcacaaaaattttccctgataattagggttataattgtatgatttttttctggaaacgggttatttttctcaaaaaactcctttcaaaattccaatttcccattcgacgctgccctaaaccttaaattttctttaaaaaaagattggctcaaaatcaccaatggattaatttttagacagaatcttttggcaagttgcacataaattttcgattatcaggaggcacctatcgaccaccggcccacctcctgttcttcaatttggacacccccccccccagtcccatcgcaaattttgtgtgcaccgggacgcaccggaatttttattaatttttatttgaaaatttaaagttttttaaaaatatggaaattttaaaaattggaaaaagcagagaattccaaatccttttataaatacctttctactaagcattttatcttggtttgatgatcctagatctttgcttattcaacattttcgtacctaatgaataggcttgtaaattatatggattaacatattttttctgcgcatatgctatgaagaaaggggctcaaaaatagtattaaagagaaaaattttgaattttttgtaagaacttttggaaaaaaattgttgatataagaaaaatgtaattttgttttagcatatgataaaaattaaaaaaattcgaaattgcatatataaatttagaaaatcaaaatttttgcaattctctaaaaacgcgccttagctatttattgtttttgatgtttttaagtcaattctgtatttttgcaaaagttttttgcgtagatttttagggctgtattttttcaaaaatttttgcgttgatttttagcggtgtatttttgaaaaattttttggccgattcttaggggtgtatttttccttttcattgcatttgcaaaacgtcaaaataggtgaaaataagtttttacaaaatattttatgtttttaggtgctaaaaataaaaaccctaaaaataggtgctaataactcgaaaagtagcttaacaaccccccaaaaaacaaaattgacgacttttttttgtttagtttttcaaagagctttttttttctctgcgcgtttttttcaaaaaaattctgggttacagggagggtcaggcggtgccaataggcgccgccgcgaaaatttgaaatcttgggtgaaatttgttaacaaattttctaaaaaaatgaccaatcattgattaattggattttttggctattttaaaaataaagaaaaaataatttttaaattttacaattaattaaatttcaattaaaaaaatttcgagaatgggaaaacgaatttgtgcgggacgatattcccgaatgggactaccgtatttttttcccgttccagtaaaaatcccgccagggaaaaagacggaaaacgggaccgggattcccaggttttcatgcgggatatttaaaaaacaataattaaagcagcaaattaagtaaaaattctataaaataaaattcgggcttatgtgttagaaccttaatgaacatcacaacagcaaactacagtttgcaacacttgaccacaatacttctagtgagatgttgcattttttttaccaaaaaagtcattcttaaaattggccagatattattaataaaaagaaaaaatctaagcatttgttatttaatgagaaataattttttattatctcacaattaacatttaaacataatgtatgaagtttattaaaaaaattttgtgaattcaaaataatttgtcgcttttttttgtctcaaaaatttatggattaagattagggttcctccccgagcctcggggagcaaaatgtcggggaacggggaggaaattcaccgaaagaatttgtcggggatggctggagaaatttaaaaaatgtcggggagcaacaccttcgtcggggaggaaattttcataaaa

SEQ ID NO: 13644 - DNA, 1629 bp, Heterodera glycines
gtcgcattgtacgaaatgtgccatttcccaccccgggcaccaaaaatggcgacggtgcgcgttggctccctttggatagaacggtggtagacaatcgctgtttgcccaggaggcaagcgccggcggacaaagcgccggagggactgccgccctcgaggggtgccgtacttttgccataagcccaacggaacagaaggtccaggcaacggcaccgccgcagcaaataaaccaattgggcacggtaccttaaaatgtgcggtaaaggtggggatactgtggggaatgggagacgtaaagggtatacggtggaagggtaaaataccacaattgaaagttgggatgtatgtttgctataaatggctctgacaaagtcatgccgttttccattttagggggtgcgaatttaaaaagattggcattttcgttgggtttggcattggcatttttaaaaaaccttgaagagaattgggcataaaatacgaaggaggaggaggcgttgagaacgattaaaatgttgttgacatcgttgagcaaataaccaatttgagaacggaaaagggcgggcagaacgatttccaacacgttaaggcaaaaggacagcgaatagcagaagagaaacactgaaagggaggcgaaacattacgagtgattagtgagtggcagggaaagcctttgatcattccgcctaattagtcacgataattgtcaaggtcattcattaggcatttgattaagcggcacaaatgcgagcaattaacaaaataatgccccaataattgctcttattttgaagaaaaaaactaagaaatcctgcccaattagacacaaacaaataattgccagctcacccaacacaaccattagcatcattttggccgttttgtgctctctccgttccgccgcgctcagttcggcccacatttctcgcctttgctccaccgccaccaaaattgttctcgccaccttaaagaaacaatttaaaaaaaattggcatttttaattcgaaattttagttttttaattttctcattcatttcgccgccttttgccattgccttctttcccacctgaaaattcaatgcacaaagcacacaaagcggcaccagaaactgtgacagcattgtggccacgttttggtagagcaacatgtacaggtaattctcgcgcaacagtccgaccaccggcggcatttgctcatttttggcgtcggtgccgtcgccatcggacgaattgttgatacggtactcccaaaaacggatcaaattgtagcacacggaaaagaccaaaatggcaacgatggtcagctgggcacggcgcctgaacggcgaacggggaaaataataatcgaatttgccaattcgatgacagagagaagcagggaaattcacagttaaaaaattacatgactaatgagcctaattgcctcttaattagctttattttgtgccacttacacagtgcaatggatgcgcacagtgaacggataacaaatggcgatgaagcggtccaccgtaatgccgaccaaaatccacacggacatcgtctgggccatcagagtgaccgggtacagaacacaacaggtggctggtaacgcgggcggagtgctggcaacgaagggcaatcattaat

SEQ ID NO: 13645 - DNA, 1168 bp, Heterodera glycines
aaatttacatttgaaaggtatttttaattaaaaagaactcaaaatgactaaaggtacggaaagccaaagaatgacgggtcgggacggcactccccgaaatacacacaatgtattcatttttctcctcacttccgccgttggcagcatctcgtgatgggggagcgaatctccgcactgattaatgagggacttctttagtggggtaattaaagaagggaaattagggaggcgtgggggataagtgggccatcaaattgccaaattggctaagggatgcgctggaattgttaattcgccaatttgccagtgaaatgtccaagccgaacttaagctcgtaattcactgctgatcagacaaatggaagcaacagaaaatggaaaagcgaaaatttatggacggaatgacaaaaattcttgtttttatttgtgatttttggcaatttcaaaaattcttttgcctttgattttttcattgactgtcaagaaaataatgccaatttccaattgtcttccattttttccatctgttcggctgacctttcgcttttgcctcgaaatttgacgcctttggcaattcattggtactcatttgagaatttaattaactatttcttaactttttgttcgttttattaacgaatgagtgaaaagtgcccgggggaaaatgcgatggcattggcacggaggaaaagggggagggacaacgacgacagagcgggaccgcacaaagacggcattcatatggcagtaaagagagagcgcatgggcgggataatccgggaaagtgacacccctgcggggctataattattccgggagtgaatctcgtgcaacaaaattgttgtgaccaaaaattgccggggcatttttgcgccatttccatttgacaccattcgcattgcaattagtacactttccatttcaatgcaactttattttccaaatttggcaactttttaagatattaggagaattgaaaaaaattcaatatgacggacatttttggaactaaattaaaattttccctcgggaatttcctcaaatttattaaaaaatactccaacattttatttatttggttgaatgtatatttaattattataaggccaaggtataaaagtaaagaaacatttacgtcaaaggaaagggaaaagcgcgggaaaatgaaa

SEQ ID NO: 13646 - DNA, 2483 bp, Heterodera glycines
aaatctgaattttaatgttttttgtcctgaatttgaaaaaaaaaaatttgggagccctgttttacaacattaaaaatgaagagatagtacgccaaagtgagagagaaattgaaagaaaaagagaaacgacgagatagtatgtgctaggcttttctctgcacagcggagttaacccaaagtgcgcatacctatgtatataaaaggaattaatttgctcttctttttcatcatttctttttgccctctgatcatcctacagtttttcccctttaatttcattattttttttgctaaataatttctaaaatgataaatttttgctcaaagcattattatattttctttgcatgtactgataaatgtgtttcggtcgaaaagagaagaaaaagcggcccaattcgcctgcttacgacaaaaaagtgggttttgtccacgccgccatttctttttgcgctttttcattccctttttctgttaagcccgtccatccgtctgccgcgcgtgtcgtcgtttctcccactccaatcgctctctcgggcccttcctcgtctgctccgccttcgcttgttcctcgtactgctccaacttctgctgctccgagcgcgccgaacaaaaaagccgacttaggcaaagtgaataatattcctgttgtttttcggcatattccctcgtcacaatctcatcttttttctgtcttaaggctgtcgtccgtccttcacgtccttcgggcccgaccaaaccactcaaatcaaccgcagtgagcacagcgcggcgctttttccaataatttttgcatttgtttgattgcccccatcataagatctctccggtgggccttccgcatccgaaaaagggcgttagcgcgggaatagtgagttttgttttgcgcttttcctttttaaattcctattattaatacgtttcaggatgttccaacttctctgtattcagcggacccaattgattgtgcaaaaacaaccaaagggaaaaaagtgcgttgtttcttgtttcttcgtcttgtcttcatatttgcttccgcttccttaattaaggctgtttcgcgtcctccgccgccgtcgtcgggcaaaaaagcggatgcaaaaaccaaagtgagattcactgacgaagattctttttgccgttgttgttttcgaatccacgaactttttttctttaaggctgtctctcgtcctccaccaccaccggccaagaaaacagataaaggcaaagtgcgtttaattgggcaatcgtcaagaattggtaattcgttttttaaaaggtcgttcttccgccgcgtcgtcctccgccttcggataagaaaccattcgtcaaagccaaagtgagttcattcattttcgtcgtcatcatttttttatgaaatatgtattttggtttcctatcaattcatcgtaatttaaaatctgaaaattcgaaaatgaatttttatgggtcgggtcatagtgctttttactagatggtgctggacatgcacaaggacatcatgtatgctactaacccactcatcgcgggagatctccgactaacggaaatcgatgtgggcgaccattccggcgtctccgctgaagaagtaccagccaaaatggatgaatttttggaatggtttaacaccaacgagaacaccactaccatcacctcactaacagcggagattcattaccgccttgtaatgcatagattattattaaaaatgcattaatttgaaaagtacagaaaatatgctattaaagcattcttaatcttgaaaagcaaatttagtaaaatatataaaacaaaatagaaattaatgtacatacatttaattatcaactaaaaataattgtaattggatagcaaaatgcagttattgtccctttactcacccaatcaacatttagaccttcattcaccccttcgccgacggcaacgggcgctgttctcgttttttatctaattttgtgctggcccggttgacaaagagatgcggaaggaatataatgacgccctcacacatgctaacaaatccggaggccccggcgcccacacgcttgacctctcccgtttcactaatttatatgcccacctcatacagaatgcagagtttttctaatggataaatatttttggtctgggaactttaaaataacattttgccaaattcttattgcaatattaaaaaaaaacactgtattctgtatgagttctcagcatacttttctcatattatttctaatgtaatttcatatgttcccccccccccccccttcataaatataagttaatgtataaatataatttatccccccccccattcttattaatgatctaattaatttcatatccccgcctataattattttattttcatgtccctcccctctttgtatatatcccctaattaatgtattatcataccctttctccttataattaatgtatttccgtacccccccctcccattttcttatccattctaaattaatttt

SEQ ID NO: 13647 - DNA, 1050 bp, Heterodera glycines
catcgacggagcagcagtgggctgagcactgaaatagtcatcgacgcaatggcaaatgccattcgggtaaaaaaatgtttggagtttttaataactattttctgttctatctactataccatgttttgggggttgccatatgaaatgttatgggagcaggacaaaacgtcgccggccgaaacatctacggtacaaaacttcgcatgaaagtttttatagcgcttgtgccatatcacatttcgaattagcaatgcccattttctcggactcgtggtcacggaacgatttgtgagaccaaccctctttcctattccgttttaggctgcccctcctctttctcgcttccccttcatggaaaagaaaaacactgtgaccaaagtgagtttttcggatttgcatttcctttttttctcaattttcccttcattgtttaagattgtgcctccttcaatgctttcgaaaccgcagaaaattgaatcattcaaagtgagccaatcgtttttttgccatctttcccccaatttgcctgtcatttccttgtttaagccacagccatcgccgatgggccttccgcatccgaaaaaaggtgtccgcactggaattgtgagtttttgttttggggcgtttcaccggccccccccgtgaaaatttaaaaaagaaatttttactaacataaatttttaaagaaaaatcttataagttgttttcataagaaattctaaaaaaaattatttgagaaattttatagcgaattactaagattttcggaaaattttttcttagactttcctcatgaaaaaaaactaaaaaaattttaaaaatttcatggggtaagcgtagtacaacacactttgtttggctgtgtgttggtttaatgttttttgacaatcgatgtttaaggctgttcccacttcgatatgggcccccaacgatgatgacatgtacaagccgaagcagtacgaccagcaggagcagccgaagcaagcggagcgaccagcagcagcgcttaaaggctggccgacgacgacatttacaacccgaagcaataca

SEQ ID NO: 13648 - DNA, 1007 bp, Heterodera glycines
attcttttcatttttaaaaaaaaatttagttttaatatcctcaaaaataggcattttccttccatttaacaggcaagacaaaatcgatatccattagacaagttttgtttccgctttttgtgctaattaaaatgcaagattccgtcagttcattttgaaaaatcactggataattaacaaaattcaattagcaattaaagtcaattttttttagcagaaactcatcaatcagtgggcaacgaaaaactttgggcatttgattgatggaagagaaaaatatgttctaattgctctctaattatcattttttattaataatttgagcgaaatgatccacgggagagtgattgtgccgaaaagaattcagaaaacctgtaattttttttcgttcgatatcataaaaatttttttggtttataatagaaatcaaaaaatgtttttattcggaattcttgtttatttctcttcgattttcaacacttttcaattcttctcaaaatgattacgctattcacatgtaaaatcaatggccaaggtgactttatcctcgtctttgttgtacaagcctttgctcgggtccatcaattccttaatctgccatttaaaaataaagtcacattattttaattatattgccactcaccgcaaaagaaatgaaattttcaaaacccaaagacagtgtatcattgttaaaaacatctgtttcatcgcattctttaaaatcctcaacaccgttcttttgagaaacaattcgaggttttcacatgcattttttaatctccatttattcggacattcttttattgccaacactttttctggggttttcaggatcattgatcacgattttggtacccgtttcggcgtattggtatcgctgaacactaattcgaacaataagtaattttaatttgaagccgaaatttgagaaaaacactttcttttttgtgtctgcgtataaaagtcgggacttttatttgcatatttcgagatttttgtgcatattt

SEQ ID NO: 13649 - DNA, 1096 bp, Heterodera glycines
tcgaaatgtttatccaccaacgcatcgaaacgtggcgaaagatgtgccaatttgaggccgagttgagcatggtcaaaactgggcaaaatgtccatccaaacgtcgttgcaaatccaactgaaatggaaaaacagtttagctaaataaatgacgaatttgtgtgacttttaaaattcattaccgtcggttcatttttggcagcaattagcacaatttggccgagttccgaatgatgtcacacaaatagcagaagaattaattgcgttggaaactttatttttatataatgagaaaagcggaaacccaaaaattttaacgaaaatcacattttatccaacaatttttgaattttgttcgtcttaaattgttgccaatggccaatgggaggcgaaaaatcattgacaaaaacggaaggcgcggaaacattttgacataaaaaggccaaaccgttttttattagcctataaaatttcaaaaagtttcgttaagtttcaaaaaagttataacttgagaagctcaaaaacccaagttttttacaacattttagctcataactttcttgaaacttaacgaaactttttgaaattctgtaggctaatagaaaacatctagaactatcgaatgatataaggaattaaaaatttgattgattttcacacatgaacgcggcgaattgctgctaattttcaccaattgctacagaagaaatattatacctaattcaaattaacaaaaaacggaattcctaggccaaaattttcacaaattggaggtacttttccgttattatgcatcccctaaaaatgttacgaccaaattctatttatccccctgggggataaatggagactgggggattatttttcaaacccctcctagactgggggataattggagattgggggattaatggagattgggggataattagagcaaatacggtattttaatacggtatttacatatagattttcagcaaaatatgtacagtagcccaggccttaatggtgtcccgctcaccgcactcattttccaaatttttggacgttttaaaatgtaatagtaaaaaatgagaaaagggggcacagtaaaaaaa

SEQ ID NO: 13650 - DNA, 2062 bp, Heterodera glycines
ccgagaaaagagcggagacgacaaaaagtgggaatatctcgctgaacaaacgttgcacactttgcatttgtttccattaatataaaagtcagaaagtatctctgaaaagggaatgcttttgcgggtgctgtgacgaagttacaaaagtatcaattaaagaaatatttaaatttaatttttaataattatattcaaattcattggtacttttataagctcggctagcgcgactttggtgcataatttctcattattagggctgtcaattttatgtaaatacatatttttttcctggcttctctttgctctaaatagcaggaaaaacactttattttttgtgtttgcgaacaaaaaccgggacttttatttacatattttgggattttcttacatatttatgtacatatttggaccactttttgtacatatttttcgcagccatagtcattattagggatgcgataatacataaatttctgcacacttgatacgcacagataagcacgaaaattgcattttatgattggttaggggtgtctctgatgacttttatgcccccagtcgtaccggcccgtagtttttaacaaatttcaagtataacatttggtaaatcgcaatttttttttgtaaatttcgtttggaaaaaatgaattctctctctcttttcgctgccataacaccaaaaaaaaatccagtaaagtttcggaaaaaaaatttaaatggacattattggtaaacaaaaaatgcacagagtaccaggaatgatcgccttcatcacgaggtcaggccttgctacagccatacacgcaatgccagtacctgaaaaaaaggagggggcgtcaaattaggcacaaaaattggaatgtaatttagtaaaatttaaaaaattcatgaagatttaaaaatttgagagggagcttaagtttttggatgattttttgatatttccctaaggcgcataaatcagctccgtaattaatgcccatttcataataatttaaattcttttttctcaacaaaaaagctctaaaaacaattttggaaggcaaaatctggcgaaagaaaatcgcaagtttttcaggtatagggctgcgtcaagcgctcacaaattttcaaaattccaaccctccccctcccgcgcggaaaaaacttgccggattttgccgtgccataggccgacccggccgcggtgaaaatcatcgccgcagtgacgccaagtgagccaaaaaatgggccatacgccgcttgctccgctgcaataagtgccgaattgtcaccagacatccctcaaattgttggcacgaatttgtaaaatgctaaaattagtaaataagtcgtatgacaaaatccaaatttcttaaaatcatttaaatcaaaaattttcaagaatttctgattgtacctttattttttcatacaaattaataaaaaaaacggagttatagaaaaattttaactaatctttgggcctatacatcaattttaaaacgaaaaaagccaattcaatcgtcaaaatccaatgaaagagaagtatcaaagaatcaaagatcaaaaaaagttcttttgaaatttgaaaacaaaatgccaaaaaaattgccaaacaaattttgaaattttatttttattcgaactcgaagtaaaaggtaaaaacgcaccgaaccaaccctaacttaaaacaataaaactggcaatctttcggaattgcggtcccgaaaaaaaaattttttttttaattcgtaacactttttctaggcttaaaaatacgctaatcactgaactcggattttgaaaaatctgacatccatttttgaccaattcgaatccttaactcaaacaacaaaatagaatttcgactttttgattcaagttttagaacagcgctaaattttgaaaattatcagtttttaaattaaaatttttttttcattattccccctcaaaaaaaaaatccgaaaatccagtggtcatggccggcattgtggccatctacgggctggtggtggcggtgatcatttccggccggctggaggcggccgggcccggctacaccatcgaccgcggg

SEQ ID NO: 13651 - DNA, 3977 bp, Heterodera glycines
ctcttccgtctctcctccttccccaatgctattttcatccttttcctcctctttctccccctccttgcttcgaatttttccttttcctctctttctcttccgtctctcctccttccccactgctattttcatccttttcctcctctttctccccctccttgcttcgaatttttccttcttctctctttctcttccgtctctcctccttccccactgctattttcatccttttcctcctctttctccccctccttgcttcgaatttttccttttcctctctttctcttccgtctctcctccttccccactgctattttcatccttttcctcctctttctccccctccttgcttcgaatttttccttttcctctctttctcttccgtctctcctccttccccactgctattttcatccttttcctcctctttctccccctccttcttgcttcgaatttttccttttcctctctttctcttccgtctctcctccttccccactgctattttcatcctttccctctatccgtccaattgattatttgatcgattgatttgtgggtggggggataaggtaaaacgcccggcaaatggtcataattttgcaaaatattctctttggtggtcctcctctcctcttctgttgcgttccctttttctgtgtttttcgagcttctcaaattttgttttcattgttttccgctttgttctctaattataaaaatggtactacaggagtttgtatccacatttttggtcaacattttttcaaattctttttttggtttaaaaagttcagaaaacaagtatccgccgggggtttccgaggtcgctgatcaatgatcacgaatatggaatcctcttgattttctacttctttcccttggttcaatcactctgcagaaattcaaatattttgattttctttttgttcatgggttcctacatatcgacaagctatgcttcctcatacttttttttaattgcgcatattttataattttttaaagaaaatccatacaaattgagcccagtagtccaaaaaaccagccttttttgttgaaattcgtaaacaaatctcactcaaattttcaaaatttttccccggcggcgcctaactgcaccgccggacccctttcttcccaaaaagttttttggaaaaacgtgccgaaaaattatgtgaaaagcaattctggatttctaagattattcgatcatttagtccaaaatgattaattgtttgaaataactgaagtaaattcgtttaaaaatttcattaatttaatttagctttaacttttagattttataaaataaatagcaaaataaaaattaattttgtgttattttcacttgaaataaattaaaatttgaattttttttttaattaaaaaattcccggaaaaccaaggtcccgtcccggcttctcaggtcccggtcccggttttgcccaacattcccggtccgctcaactctacggtagtaccataaaaataaagtttccaacgcaattaattcgctgcaatttgtgttatgtgccaaaaaacccccaaaatatgtgctaaaacccaaaaaaaggccaaaatatgtgccaaaaattgaaaaaaactgctcaaaaaataagttaatttctcaaaaaagtctcattttttatcaatttcgctagcttaatgtaatgctttttggcgtaaattttttttcgctctcaaagatttactcatttttcggaatttcttcgctaaaaatcaaattttgctttaaaagtgaaaaagtcatgaaaagggtcaaaaaaatacaaaaaaaaagaaaattttgaaaaattattgggcatttatttgaccacgaatttgagtgccaaaaaagacatttttgtaaaaaaaaaaaacctaatttttccaaaaaatcgccaaaatatgtgacaaaaactgccgaaaccccaaaatatgtttttattcctaaaaagtccaaaatatgttttttatatgtgctaaaaactcgctctgattgaaaggaaaacaggtaaaaatgctatttttgagattttcatgcgatagcatatgcgcaaaaaaaaagtaaaaacatataaatccgttccctgataatatacgtcaagaaataggaaaaccctaaaaatccaagctttacccaactcaattaattcttctgctatttgtgtgacatcattcggagctcggccaaattgtgctaattgccacaaaaatgaaccgacggtaattaaattaaaagtcacacaaattcgtcgtttatttaactaaactgtttttccataatttcagttggatttgcaacgacgtttggatggacattttcccctcttttgaccgtgctcaactcggcctcaaattggcattgctttcgccacgtttcaatgcgttggtggacaaacatttcgatggcaaaagcgaattgacaatttggagacgaatcgaaattcgcaaggacaaaggaccagaaccgaagctgtctgtgcggatggatgacaaatctttgccggaccgtccgctgcccagcaaaattcgctttgattctattcagattgagtacttaaaaatcaaaagctattgcaataaaagcattcttttcctttttcagttacttcgatcactccgtcatcgcttttcttcgttccaatcatcaaattttcgacaaaagaggcaccaatttatatttgtggattccatcaccacacaacacggacggccagccaattcgggacgttttcgttcgtgaaatttggccaattttttcggcaaacattcgctcgtttgggctttaacaatgctgagcatttggacaatttgcttcgtcgcacttcgccgacaagtggtgcggaggggggggggggggggagcaggaacaaatactgctgaaaatccccgaatgagaaatttctcgagcttttttgaactatgagttgggttcaaggggtaaaccaaaaatacgtttaatggtcttaaatggcgttaattaaaaggtataatcattttttggcgtaaaaccaatgatttcagagtgaaatacaattttttgtttaccgaaaaaatggacaaaataggacaatttagccttttaaaaaggtcaaattcagacaaatttagggtaatactaccgatggtaccacttcagaatgtttccatgtgattacccatttttagacgaaaaatgcaaaatttgaacttacgaaattttgttcgagttcgggtccggggttcgaaattagtcgaaatggatgtcttattggtgatcagcaaccccaaaaaccccagggaacatgttttcacggcttttgaaaacaaaaaaatttttttttcaaaaaagttgtggtaccatcgggtagtattaccaaatttagtatcattcgaaagctcttggtgagttaagtctaaaaatcaaagaaaaatgtcaaaacgggagccacctaagcacaaggacaactgagtcccattgaatatagacagttctgtaccaaaaaataatgaaagaaattaacaattaaaagtagagtgccacgggaccgggaccgggccgggaattcccggtcatccgaggtcccggtcccggttcccggtcccgggttttgaaaagctcaggtcccggtcccggtcccggtagggcaaccgggaaccgggaaaaacaagcactggtaagaatggggggtctgagtgaaaaattagtgaagaaaattggagtcaaagggaaaaataaaaaataataattaatatattctttaaaagtaaaactcctaagtgtgcaaatggcctagtggctagtctccttgactttccttgcttctttcccctggttcaatccctctacagaaattagattattttcaatttttttttgtatactcgtgggtttcctataaagaaaatatgattcctcatagttttttttaaattgatacatattttatcattttttaaatgaaaatcctaccaattgagcttaataatcc

SEQ ID NO: 13652 - DNA, 1187 bp, Heterodera glycines
  unsure (1)..(1187): unsure at all n locations
ggtccttaatgaaacggttggcgtcttttgatgcggcgttttccttgacgaagcagtagcagtatcagtagcagcatcagcagcagcaggctcaaactgatcagaagcagttgaaaagtccgtgtcctcttctacatcagtgttgctcttacttactgctgcaccaattgattgaattgaagccgaattgcggtgtggtgtgctcacatgcgacggtgtttgttgtttttgaatgcccatatacggcgcaacgtttggtgctgtaactgagccactctcaacaattactttttgaggtttattatcaataatatcttttagctggtgtctacgtttgtacaaccatgagtgacgcttcatttttatttctgcgttcctttttggatcagccaaattcttttgaatctgtacatcaagcagcgttttctcgccctgtaacgggtcggcaagaggaggatatacgccgctgcttcctttcagtaaattaatgagtgccaaatactcactctctggcaccataaccatcttttttgtatatttcattggtagctcccgcctgttaggccgtaattttttcgaccaggtgttgagctagtgcgccaagaataggcactaatattgctcctaatgctataccacttccctgttgtagcctttttctagcagtcttttcgctacgcgagcgtgcaattgcacgataatagtccgcgtattcggccaaccgtttcctctggtttctgtttaggctgaaattgaattttaatatgtttgcacaaatttcaacaagtcctaatatttgttcggctgttgcgtcttgcagaaggatgtttttctttttttccgatttcgtagaggcgattttttttaaaaattctgcgttttcacttatatatggactgaattcatacatttgtagtgaaaattacagattttctcaaccttttatactctttctctattcaattggtaggtacacctcacgctgttcatccgggaaaattttagttgttaaacgttcagactcgggcgcattaggatgcatatttataaccaaatagctgaacggttcgcttgttgcatcgttgtatgcctccataaaatagtttagcctcttcggaaacaattgagagcctaccgttctgacctgaagttgaccagaaggattccngggttaaaaccaaataatg

SEQ ID NO: 13653 - DNA, 1052 bp, Heterodera glycines
cagtgattggaatgtcattgaaagtggttgggttgagtcccagtgtttggaatgccggagatttagtcccagagattagaatgccggagaattgagtcccagtattggaatgctggtgggttgagtttcagtgattggaatgtcattgaaagttggtgggttgagtcccaatgtttagaatgccgcagatttgagtcccagtgttttggaatgccattgaaagttggtgggttgagtcccagtgattggaatgccggagatttgagtcccagagattgaaatgctggtgggttgagtcccagtgattggaatgccggagaattgagtcccagagattggaatgccggagagttgagtcccagagattgaaatgctggtgggttgagtcccagagattggaatgccattgaaagttggtgggttgagtcccagtgtttggaatgccggagatttgagtcccagagattgaaatgccggtgggttgagtcccagcgattggaaagcctgagaattgagtcccagagattgaaatgctggtgggttgagtcccagagattggaatgtcattgaaagttggtgggttgagtcccagtgtttggaatgccggagattttagtcccagagattggaatgccggagaattgagtcccagtattggaatgctggtgggctgattttcagtgattggaatgtcattgaaagttggtgggttgagtcccagtgtttggaatgccggagattttagtcccagagattagaatgccggagaattgagtcccagtattggaatgctggtgggttgagttatgattggaatgtcattgaaagttggtgggttgagtcccaatgtttagaatgccgcagatttgagtcccagtgtttggaatgccggagatttgagtcccagtgtttggaatgccagagatttgagttccagtgattggaaagcctgagaattgagtcccagagattgaaatgctggtgggttgagtcccagtgtctggaatgccgaaaaggtgagtcaccgagattgaaatgctggtgggttgagt

SEQ ID NO: 13654 - DNA, 1265 bp, Heterodera glycines
ttaattaattgtgtccattttaaaaatattttccctttgacctttgccagcaattcggcgattgcgttttacttatttttcatttcccattatttctttaaaatcttttgggaatggcaactcgcctggagggcaaagccctgtggaagtgacccgtagttgttgttgcggttgatgtggtgttgtgcgtttgccgggcgtcgtcacggcccccgcccgtggtgtcagcccgcgcttcaaagccggcgagacaagctgaggagtgccgccattggaagagccttcgcaggaggagctgggcctgtactctgccaccttctgccattgctttatcagcgcacgacaacgtttggagaagtcgggccattgctgggcagtctgcttccgcacgtcgttcacaaaacggccgatacgagttgcctggaaaaagcaaaccccgtaaatggttgtcaggcccgaagaaaaatttgtaaatccccaaaaaacgccattccctctgggtcatgatcatctgtggtgcccataaataaaatgataatatgattttccattttcggcacaaaatccgtggtgtccttcaaccaaaacacatttcttcatttgggttcgtttaattttaataattttcccactcatcataatttgttacctgtttctcttttcctacattatttcggaagtatgaaaactgttcacgcttcgtcctttatattatataaatttccaatttttatttgcgttgttaactgacaatttctctttttacgccgtttcaaatcttttttttcacattgtcatttgttttcctcaatttacttccactttccatgtataaaaggaaagaaaaaggagcactttccacacattcagcccattttctacccccaaagtcccgtccgtcgtctcattagtcgggagagaagggcacccgttgcccaatacactcaaggcggcgctaatgcccgtgatcgatatttacggcattcattcattcgcacgcgccaccacatttatactcgcacactcaccaacaacacaacccattgacgacgacgaccaaatgacgatgggggaggggggcttcgccctatcgtcgtcaaaatgaaattggagagaggggaagaggcggaggggactgcaacaacacacactctctctctcacacttccttccctcctctttctccaacatagcaaacgactgctgcttcatcataaacgctccaagggaaacagcttcgcaatgataacgcgtgagggggtggg

SEQ ID NO: 13655 - DNA, 2843 bp, Heterodera glycines
tctaccataaaaataatatttcaaaataaaagcaaaacaaaaaatggtaaaattatcaaatcaaaacatcataaatttatgaaagtatgaacaggtcaccagctcaaccacttctgaattttcctgggatttggccagttggatgtctttcctaaaaatagcggttttcaaagtaaccgtaaaccaaaaaggaccaatgatcacgtaggcaaaaggtttgttgacaaaatagcgacgtccgatgctccgtatggtgtctggtgttattgactaaataaacaacaaatacacattaaatgcacaaatttgatttaattggtctattatttatatcaatatattgcagtttttcagtgttcgttcaaaaattaattttatgaaaacttacatttattttctcttccaattcctctgttgaaatgcgccgatcaaaacacagcaattgtctaaattatgcaattggttgcatgcaagggttaatgaaggttcgtaaaataccaatgctgggtcggtgcaccccaaaactctcagccgaccaaaattcagccgggaataaatttaaaaaaaaatttttaaacagaaatttttcaagaaaaaattcttagaaaaattttcctttgaaaattatgagaaaaaattttttttttaatttattcccgactgaattattattaatggatggccatacctgtgcaagggggtagttaaggaggggggggggggtcatgacgtcgaaaaagtcttcactgggcaaaaatggtcgaacgttggaaaatggggctctgaccccccatgggggagtcaaagtcgaacgtaagaccctttcactgcccacccccttgcacaggtatgtggatggctataaattgacaaatgaaaaccataacgttgcttaaaagtgcggttttttgtattttattagaaagggataccgaaatttgagtcttcgaatttgttttaaggatgccaaaataccttccaatatcctcgcaaataggcgtagaaccatccaacatcagaagagaattggtgagaagagaccgtttggcacgttccaactcgtccacgtccacctcttcacaaagttgccgccattccttgcatacggactgggccaaattgaacaatgcgtccggctcggcacagaaaaataacccagtcaggcccgtgtctttataggaagtctaaacaataatttatactttgggcgtagatccatctattaatcagaatcacgacaatttatgtataaaaaggggtcgttcctgatcattcgtataacttattttcaaaaagattaaatttcaataaagatcttaataattgtctcccaaatcataccgtatatgacatgaatgaactaacgccggaatttgggctcaatgttctagccaatcgtgaactattccgacagtgagttctgtcgaattggccgattagctgaagagaattttgacgtgtaagagaaactttgtgggagcattgacgtcacccaccgtgttcacaacttgcacaggaatgttgtcctcacttgtccaactcgtgccttcgactgccaacgaaccgtagaccatctccatctgtttgtcctcaatgagttgctaaaaaagaacgtcttaacatttcgaattattttttgctgtgtacatgtgactctgtgaaaattccaggctcataatcgagcacatgttcatctccgtgctcaattttgccaaaatatttcttggcaagttcgaccaaatgcgaatggtcgacaccaccagcagcggccaatagcattcgcggaccttaaaatttaatggaaaatgaaatttattaataaataattttaatttttgaaatcgttgcgaaaaaggcgatggtagactgggcgacagcctggtttttataaattcctttcagattgtccgaattgagtcaaactattatgattcgatagtcatatatcattcggtagtcaatgttttcttgtccgaaaaagaaattgaaattttttcttcataactttaaacaaaatcatccgaaacaattttgcccttgttggaaaaataaccgttaattgttctacctttgtaatatttcccaatgtaagcgatcagttgttcgcgatgcatacgactgaaaaatgcatgatacaattcgccttttactgcttacggcccaccgaatgttttcatctgtgccgaggattgtccgggacaaagaacagccggcgtaagcaccggcatgcaaatggtcaaagaccacctcctgcatattctgcgcaacttcttccgcctcacggatgatcacctgtcgttcgcgccaaatctcattctccccgtacacactgttcaacaaaatgtcagagagcatttcgactgctaaatttgagatttttgagacagaaaaaagaaaggggaaaacaaataagccccacccatccaacttaatgtagaaaagacaaacctctttccaagtcttgggcaaaacatttcgcataatacaccgtctgctcctagggtatggaaaggaagtgagtttttccaaccattggtctatggtcttacccgagaagtgtacgcgttgagatgggcacccatattctccacttcaatttccaaatccgactgtttacgacgacttgtacccttgtaatttgttaaaatcaaataactaggaaattagaaatgtgatactttgaaggccatatgttccaagaaatgggcaactccgttattgctcgcgtcctcgtaacgactgccggcgtctatccaaactccgacctgaaaaatgaaagtcaccacttgctataaagaaatttaaaatgacgaattaaggataaaaattgtccaaatgattcg

SEQ ID NO: 13656 - DNA, 1762 bp, Heterodera glycines
ctttttatgttacatataatattacttgtggctatggaatttctttacatatctcccatcttattgcgcgatcgatcctctacttcccttaattttattatccctaacagtgaaaagttcactattacaacagaattccatatcattattcttattattttatatttcaccacgaaatttcgccacattaatattataattataataaatatctttattgcaaactgtatctgatctctattatatattcatatttaaaagaacctgatcttatctaatatatgatgtactgagatttcaaatatatactaattattaggttattatcaagatttaatccacattatgctgttttacaaccctataaattactttctataatattatataaatctttcttaatacagttatcaatattttattatatttataaatttgtttttaaaattatattttgcaattaatggttagtatttagagcacaccatttgtccggattacggtagccccccccacacttatgggaggggtgcatggccaactgagcgccagccatttgagcgccaaaatttttcagtactgaagcaaaaccttttgcgcgacttttcttgcaaacccaaacctattgtaagggggtgcgcggcttttttcttactgcgcgacttttttgctgcgcgactttatttacattattttaattaattttaaattcaatttaaacatctaaaggtcaaaatatcttaacgtgttgaatttaaatgcatttaaaatttatcaaaaattccccgcaccgagcggatccgaaccacggagggggtagccagactgacgtactacccattcggccacattggcaatgggtgataaacattaatttgctctcataaagggaaaaattgacgtcaccagcggggggaggggggcgagagcgtgtggcaagaagggcgggggtgttgaaaaggtgccaaataaacaaatcaattaaataatttccaatttacgtttttaaagacaaaatgaagcgagggactatataataaaaataatattattaaaataattataaaaatgtttaaataactaataattatttcaaaaaaaaatattttaagtgaaaattaacaataattttaactttatttatttctcattaatttttagagtttaatttatcgtttgctgtcgggtgttttttactaataaaataatttacttgaatttattgatttgtctgttcatttttatctgctcaaaaataattacagcaaccgttcaggtgttgaactttgtttattttgccgtataattttaatttcgcatccttgcgctgcccctcactctcacctgctcattactttattccaataaattaaatttcaattaatgttatttaacatttggacacaaaaacaaatcatgagcctaaaccgtgacgaaaactcgcagtcccctgtactcgatggaccgtacccgcgggctcaagatgacattgagtttgtggaagatgaagcaccggtgctgcttgaagtgttggatcgtctgtcacgagagtgtgtttttgtttctatttttaaaaatattttaaaattacacatttaaaattaattgttttattgtttagggaattcgtgaagtcaggcctgtgggcccggggcggtcgggttgtctctatgcctatgcaaaattgttatcgaccatttgtgggcaagggaattgttggtccaaacttcaaagttttgaattttggtcacactttgtaaca

SEQ ID NO: 13657 - DNA, 1679 bp, Heterodera glycines
  unsure (1)..(1679): unsure at all n locations
tgaaacaaccggccaaaacccaaattcatttntcgtcaaaatgaagaaatccgttaccatctctgtccctgagcaaaaagaaattaaccagcctaatgcagaagcggagccaccaaagacggacactacaaaaaagcgcaaggtggaggaccgggagctatggaaactggcaaaaggaaagttcatgctagcgacatatttgtgcgcaggtaaaaatgaaaataattttaaattttgtgaaataaaatttttaagacgactgggaccgactgttccataaccaacagaaagttgcgcgcttgggtgatggccgttttgcggtcagctttgagctctgtgaagaatgcgcgtgggccaattgtcgcgcaaccgacatcattgcccctgtgaagaaaaagctgaacaatgcatgcgagacgaattttttgagtgatcgatcaacaatcaataaaatttttgaaatatttcttattgttgtcatcatcatcatcatcagcaagttcaagcaactccatcgggtagtggcggtcctcccctccttctcccaaaaatcgttcaattatgcatggcaaataggggaagtgaagccttatgcggtggcgtgcataaaaatgcgcggtaatattgatgttaaatgaaacgcgcagctgtccatatgctggaataaatgccgcccctttactcgaaatgccgccgacgaaaaatgttttggtcattccgttccgatcgttgtaggttgtgcgcacttttcggccaataagatgctttagaacaaggctccgatcctttggatgatttaaccgatcgcgcagcgacttgggttaacaattgagcagtttagagcaaaagacagtgacaagcaccatttcagaagaatgacaaatttgcaaaataggacacaaatttatactctaaaattttagccacgttcattaaattcaaatttgacaccgcccattttagcgaaattgaaacaaccggccaaaacccaaattcattttcgtcaaaatgaagaaatccgttaccatctctgtccctgagcaaaaagaaattaaccagcctaatgcagaagcggagccaccaaagacggacactacaaaaaagcgcaaggtggaggaccgggagctatggaaactgacaaaaggaagttcatgctagcgacatatttgtgcgcaggtaaaaatgaaaataattttaaattttgtgaaataaaatttttaagacgactgggaccgactgttccataaccaacagaaagttgcgcgcttgggagatggccgttttgcggtcagctttgagctctgtgaagaatgcgcgtgggccaattgtcgcgcaaccgacatcattgccctgtgaagaaaaagctgaacaatgcatgcgagacgaattttttgagtgatcgatcaacaatcaataaaatttttgaaatatttctctttctttaaattttatttgttaataaaattatttagtgagaatatccccactgtgttcatttcgcgagactttagccgggcgaccggatatctatgattaataggcgtcactcgtacagttgaatctgaacagtgatgggagggaggggggtgtggggatgagccgctgaaacatcattaattattagagggtgatgacaggcacaagaaagaccatattgttcattttttgccgtttactta

SEQ ID NO: 13658 - DNA, 1785 bp, Heterodera glycines
tggcataaaatgaccgattgaagaggaagaaaaagtgaacgcaacataagaggacccatcaaacaggagaatattttgcaaaatgatgactagggctgtgaattttaggttttaactaaattttttgctcgattgatttgaagaaaggagctcaaaaaacgcatttctgcattaaaaattttcgattctgatgtcattatcgggcactagaaatcactattttggcgacttcgtcactaaaatagttaaaaatcactattttggcgacttcgtcactaaaatagttaaaaatcactattttggcgttttgtcactattttttcactatttcgacattttttgaaaaattctttaacaaaaatgcaataaaaccaaaaaatacactcctaagaatcgacctaaaaattttttcaaaaaatacacccctaagaatcgacaaaaaaaatttcaaaaagcactcctaagaaatagagttgctcggtaccggtaccggtactggccggtaattaccggtttttttggtaccgttaccggtttgtctagtaccggtaccgccggtaaaaatttgcactggtaagaatgggggtctggtcgagaaaaaaatagtaaattggtaaagaaggagaaatttttgagaaaaaaataaattttatttcgtttagcaaccatgcatatgtggtgtaatggttaaaccttttgcctttcattatttttcgcttgggttcaattccccactgggatagaatattcttcatattttctttaccattattttaattgaaattttaatttaaaaaaatattccaactttttttctttcattttaagcatcctaaaaacccaaaaattaatcaattggtctttttttacaaattctgttaacaaatcgcattaaaaaatacaaaatttttcccggcggcgcctatcggcaccgccggccctccttgttccccaaaagtcttgagaaaaacgtgccgcgaaaaaagcggtgttgaaagcaaaaaaggtcattgatttacattaatttacatggccggagaccccttcgcaaaattggaaaattggctgctgatcccttgttttgcaataatctgaattttgaggtctacatctgaattttagtgttctttatcctgaatttgaaaaaaaaacttggtcaccctcaatatacatatacttctgaacaattctaatgctaaaaaacaggcactcgcgcgaaaactgaataaaaattttgtatttggaaaattttgtccaaaaatttttacgttggaaaattaccggtttttaccggtaccggtaccggtaccggtggaaaaagttggtaccggtaccggtaccggtttttgcattaccggtcagtaccggtaccggttttttagcaattaccgattaccgagcaactctagaatcaaggagcaaacacatgttttttggctgcctttttaaatcattctcacaacctttagtacaccattcaatagagtttcaatagctctacaattttactcagaggaatttttgctttttctattaatagacacaccgtttcaaaaaacgagagatgaaccaataaatagagagtgcggagaaaaaaacatctctctttttggcgtactattttttatctctgttaatagagaaaaaccgaatttacttcgtgacgtttaacttttttcctgcacgttaaatccacactaaatttggcagatcgatggagaaaaaaattctgcatttttctatactgatttctatttttgtttatactcccattcaaaaattatt

SEQ ID NO: 13659 - DNA, 1709 bp, Heterodera glycines
gaaacgtcgccgaattgacggtgccgaaacgatctggaggacaggacattccgccaccacttcattttaaaaaaaacatccattcttcccatcccgaaaataagaatattttcaaatatccattagttccttcagaattaaaaattcttcttcagtatatcctaagaaaaaaaaagaaattttatttttgaaagaaaaaataataattaaaaaagctttttatatgattcattttatgaattattttgattttgtaaaacttagttaattctcattacatatgaaaacgaatgtcatattcgtgatcaatgaccctgaaaagctccggaagcatgctttcataacttcaaaaaaacattttggtcaaaaacttttcgttgaaaaatgaagcacctttgaaattagaacccgaaacggaccgaggcactaccgaacttttgtttattttggataaaacacctttacctggagtttcggaaaatgggtctaaaaagtgtgaaactcggatgtctgagcctaaaatctacctgaacacaccaatgcataaaaaagtcagattggtataagaaggtaaaagttaaactcagggctcccaattaaaaactttcaaactcagaattttgggtgaaaaattattttgaaaattttccaaatgatactataagaatgctttttgagacgcactaatttgttaaacattttcaccaaaaaggacaaagttttgcgatttgagccaattttttatcatcagcaaaatgatgtaatgtagaatatgaatgataaaattgactatggctcggccgcttcgcggcctcgcacccttctattggcatttctttatggcagaatattcttggcattttcatgaggcttctgtcatttcctttttataatgcgtatataatttaggctatttgattttatcagcaaattccgaattagcttgggaatgggcccttttgaagccaacctttttttatgaatgttgtcccattttacgttgtggtctgcggcctatggacgcttcagagccatttacgccttcttttcaataatcgtatgtaaaaacgactatctctttttttcggaacacttttttgaaaattttttccggaagagattttgtgacacgcaatataactaacattcgaggcttctgtcatttcctttttataatgcgtatataatttaggctatttgattttatcagcaaattccgaaattagcttgggaatgggcccttttgaagccaacctttttttatgaatgttgtcccattttacgttgtggtctgcggtctatggacgcttcagagccatttacgccttcttttcaataatcgtatgtaaaaacgactatctcttttttttcggaacacttttttgaaaattttttccggaagagattttgtgacacgcaatataactaacattcgaggcttctgtcatttcctttttataatgcgtatataatttaggctatttgattttatcagcaaattccgaaattagcttgggaatgggcccttttgaggccaacctttttttatgaatgttgtcccattttacgttgtggtctgcggcctatggatgcttcagagccatttacgccttcttttcaatattcgtatgtaaaaacgactatctctttttttcggaacacttttttgaaaattttttccggaagagattttgtgacacgcaatataa

SEQ ID NO: 13660 - DNA, 3253 bp, Heterodera glycines
tgtcctaaaaatttcaaaatggttggcttaaaagaattctccccctgagcgatttcacatcgaatacggcatatttcagaactaatctttattaaacctgaagattttgaaaaaggagaaattgaagtccttaaacaaggacaaattgattggaaaaattacccaggaaaagaccaattaaaaacatttgttgatgaatacggactgataagattagactcaagaattaaaaatagtgtgatgaattattcattaaatttcccatcatatttccaaaaggagcttcaattcttgaattgttagcatggaaagcacatttaaaagttagacatggtaaagttgatgccagtttaaatgaatttttaacggaattttgggctccaaatatcagagcaattataaaaaagattattaaaaactgcactacatgtaaaagctaaatggtccgtcatttgcactacctattatgccatcacatccgaaggaaagagtaaaagcatcatccccatttaattcggtggcaattgattatttaggaccttcattggtgaaaaatgaaggtaaaacgatcaaattttggatagtgctaattacgtgtttgataacaagagcagtttatcttgaaccagttttggatttatccgcttgcttttttacaagttttgaggcgttttgcgagccgaagagggacaccaaaacgaataatatccgataatgcacagacctttcgattagctgccaaagtggcaggtgcttacgaagcaaggggaggaaaaggaagaaatgaattggaaaaatacttggtaaaaaataaaataatttggagatttattccggcattagcaccatgggcaaattcattagcagaaagactcgtgaaaatatgtaaagatgctttcaaagccctcactcgggaaaatgattttgcaattagacgaattgcgtacttttataacagaagtagaatggacaatgaataatcgtccaattacacatgtctcaattgagccagaaggagagagagcccttcggccaatcgattttattaatccaggtttggaattagggataaatttgccagatgccactaatgagtcaaatagcgatgatgaattttgtttagaccctgataaattagaaaatcagttaaatcgcagtggaggaaacaaataaagttttggaaatgttttggaacagatggcacaatgaatatttagcagtcttttgggaccgaacacaatggcaacataaaggaccaaaatcacaagaaaaacgagtacctaaagaaggagaagtggttttaattaaagatgattttcaccctcgaaacacatggaaaattggaaaaataattagtttaaatggccaaaaaggagcaatcagaagtgcacaaattaaattagcaccaaaaggtaaagaacaaaatggaagaattatagaaagaccaataaataaactttattcgttagaggtgaataaaactttaaaagagagtgaggaagaagagaaaataagacaaatttagaaattaaggataaaatcagtgaaatgaataaagaaaaagaaaattatgaaataaagaataatatgcatccaatgatgacgagagctaaaacgagagactttttgacaaaaggaaacattggattaatcatggtattattattaatcagtaatgcgaaccgatagaagaatgcaaattaattaattgttggttttgcttagagaaatttgcaaatcccgactgcatgatcgtggaaacacgaattttaatgggcattggcctagcatgtattttgtcacttataatatgcataattggaaatatagcaaaattaataataagttaatggttgattttaaaaatagccctttatgggccttattctgcaattaaatttttatggaaattaaaagacaataaaaataacgctaatgagttggaaaagggcttattaaatgaaataagtaaaaaggaaaaattgcaaaaaagaagaaatcggagattatttaaattagccaatatcacattggttttaatttatctgaatacaatcacaaaaatagtaaatggagcagcagaagttgtgtccatacaatcaaattcagaagattgtgaaagaaaatctaacggttcagtatgtcgaattcgtgggacaacagaactaacaattttgccagctggccaaaaagtgaccctcgctttaaaagatgataaaggcaaattagccgggtcattggatttgttcgacattgggtaaattcgacactgagtattttcgacactaagtaatttcgacactacgttttcgacatagagaaatttcgatactgaactatttcaaaaactttcactgttttccagcattttcgacactggaccatttcgacattgagtaaattcgacactatagagaattttttagaaagtaatatggaaaatttgaaaatgttagtacatatttatgataaatagggcgaggatttctagttttttaacaattttttctgcggctttattttgatgagaaatgcacgaaaaacacattctttttcaaaaaattttcgtttttagtgccactattcatcactagattctcaggtttagttggagatgctgcgagttatggatgatcaaaacaaccaatgcaaaaagggcagtgatcactgatcagtattttttttttgaattagggcctaaattatgctatttggcattatgaatcattttttctaacactggatttgatttgtctaacattgatttaaccaatagttataccatctacctttttaagattacgaattagaaaataacaggaaaatttatcataaatatgtactaacattttcaaattttccatattactttctaaaaaattctctatagtgtcgaatttactcaatgtcgaaatggtccagtgccgaaaatgcaggaaaacagtgaaagtttttgaaatagttcagtgtcgaaatttctctatgtcgaaaacgtagtgtcgaaattacttagtgtcgaaaatactcagtgtcgaatttacccaatgtcgaaattaccagccacgaaaatatcgttttgcggacaaaaacaaatgatacacacgcacatcagctcagcgtaaattgtattaaaatataattaaaaattaaatgaacttaaattcaactgatcaataattgaattttgtttgatccaataatccttacaccgatatattacataaaaaccaaaaagtacaaaaattttggcata

SEQ ID NO: 13661 - DNA, 4600 bp, Heterodera glycines
ttgtacgctttgctatttttaatgctaaataacttttcttattataacttaattataaaaatttcttaattaaaggattaatatctaaccaaaaatctggaaattcaaaaaaaagagaaaataaatatttttctaattaataaaaattcttaacaatatatatatattaaagaaatatagaattttgttttattttttaatactttttagaatggcattcgaaagaggaaaattgctcacatgccaattgaggtggaaaataaaactttttcatatgtgcatttaactccaaatttaggttcaattattaatttatggggcgagaaattataaaaaataaaaaacattaaaattttattcatattacacattttgtgcttttagtgcaaaaaatccactttttcttccgaatttattggcattatttattgcgaagcataagaccaacaatttatttttggcacaacaataaattcatttgaatgttttggcattgtctcaacattcacttaattgaatattctcgtcgcatgcaaaaacggcacaattggccaaacattggccataattattattatcattcaaatgcaaatgggaaaaaaagctgcagcagacaataaattgatgccatttttgacacatttggtcaaaaatcattgtcattatattattgttttttggttctggcaaattatggcaccgaaaatgccaaacccgtggctttattctcacatggcaaaaattggtggctataaatacataaatggacagagacagtaaagcaaattcttccatcagtcagtcacacaattttaaaaaattccaccgattttctctccaaaaaattaatccaaaaatgttttccacaaaattttcatcctttttgcttctttccctgcttgtttgcattgtttacccaacaaaatcttttgcttatcgtggcgatggttcttttgtgggagaagcaaaacacgaaaaaatggcacgtaaattggtcaaaagtgggctgacacaggacgaattcgagcaggtcaattggggaacgaaataaaataatttaaacgaataaattaaagctttttttggacaatggggtatcaaaaaagaaaacggtgcccaaaacctttatgataaagccgttttttgttttttttttatttttaaatcttttttggtattagatcttcaattttgctttcactaagtttgtccgtgtaccttttaagaaacgaaggaatgaatgctcgttccaaatgtttaattaatccgatcctttatcagttggcaaatttaattgcccattcatttgccattcgatttttttacaattttaattgtcctttcttcagacttttttgccattattgccaattgaacttgagcagaagaaatttgagcgacgcattgatcaaatggaaaagcaactgatcaaagtgatctcctccgttcacgatggcaattgtatgacgaagaaaagtgcaaaagaagaagaagaacagtgaatgaatggaaaaagaagacaaacaaaaaacgaaaaaatttgatcgaaaaaatctaaaaattttctcagtattttatggcaaaatttttgtagcaaaacatttatctcccaatgcttaacgccaattatttgtatcgtgcgaaagatagacgcaaaataaatgtttagtcagcaaatgacaagatatattttctaaataaaaatttagattcgaaaatttttcttattcgaaaaaattataaaatatttatttaataatcatttaaatgaccaaaactaagtttttagattaagttttacgtgttttgatccctaaaacgccttaataaatagggatgggatttttatgtgctaaaaatgctgaaatatgtaataaaatatgtgctaaaaaatgctgaaatatgtaataaaatatgtgctaaaaaatgctgaaatatgtaataaaatatgtgctaaaaaatgctgaaatatgtaataaaatatgtgctaaaaaatgctgaaatatgtaataaaatatgtgctaaaaaatgctgaaatatgtaataaaatatgtgctaaaaaatgctgaaatatgtaataaaatatgtgctaaaaaatgctgaaatatgtaataaaatatgtgctaaaaaatgctgaaatatgtaataaaatatgtgctaaaaaatgctgaaatatgtaataaaaactagagtgccacgggaccgggaatttttgccaaaaccgggaccgggacttgccgggacctgagaagccgggaccgggacctcgattttttttcgatcccggtccctttcccgtggcactctactaaaaaccccaaaaatgccaaaatatgtgctaaaatatgtgttaaaaattggaaaaattaagtgtctttttgcataaaaattcccaaaaatctcatttttttttatcatttttcgcccatacaattgcccgcctttgatgcagacaatggcctgaatgaattgcaatttaaatttgattattatagcaaaagttgatgccactcacccaatgcaattcgtgccactataaaatttaaagttgacattgctcaaaatgctcggattttcttcctcccactgaaccgtcgccgtgcccccaatttggcatcgcttcaacagccaatcgccataagtatatttatctttctccgtgttttcatcatagtcctcttctttctccaatgtcagtatttcgttggtccgtttgttcaaccacaccttctttgaaatcattgacaaatttagtggttcttgacgtagcagcacaacaactcaattgctttggctgtccatcttttgccggaatttgcaaccattttgacagcgcttggccagcagttgaatttggctcatcatcagcaatcaaatcgggcaacaaatcagcggaatggattgaaataatgttgagatcggagagaattgtcggcgaagtgcggagaatcaaatttccagatcaccaccatgattaaaattcaaatagcgaatgtttgtcgcaaaaattggccaaatttcaagtgcaaaatcatcccaaattggctggatatttttggctttataggggtatggcatatacaactccaaattggtgtctttgccaaaaatttgttgattggcacggagaaatttgatgacggaatggtcaatgtacctggtaagggtatgcttttattagttaattattcgttgatttgtttgatttactcaatatgaaggtcctcaaagcggattttgttgggcagctgatagtctggcaaaggaaattgcacagatttgaaaggaaattgcatagatttgcgatcaatccatacagataattttggttctggtccagcaccttttgaattctgatttgtctccaaagcgtcaattggcttttgccatcgaaatgtttgttgaccaacacattgaaacgtggcgaaattagtgccaattttaagccgagttgagcatggtcaaaaagtgggagaatgtccatcaaaatgtcgttgcacacccaactgaaatccgatttttgaggccctgtaactctcgaaggaagcaaaatgcaccgctaaaattaaaaatcacatagaagtcgaccctgctctatccaatggtatatcgtttataggcattttctgactgacagctcgtaatgttccctgttagcgataagacaattaccaaaaaagttataacatgaaataacaaaaaacccaaaattttggaagttttttcttaataacttttttacaagctaaaacttgggcgctggcaccgaaacgtccttttccggttcacccccccccccgccattttagaaaaatcttagcgattttttggaaatttttttttataaaaatgaaaaatcagtaattcatatttagaaaatcttagcgatttaactaagattttttcttgtaaaaaattctaacaataagttggtaaatcttttggcattcctgacttatatggattgttttaaaattgattagcttatagcgtggacaaatatggtaccattcgaaagattgttgccaatttgtggtgtttatttccaaatttgtttagcaatttcgccgtgccaccaatgccgccagctacaaaattcagtttactgctcatgcgccgtcaacgtcaaccatggtgccatttgaattggtgaatgaaagaacccgggaaaagctgacattgaccaaagcagcatacgaccgatggataattaaacgatgccaaattggggacacgacgacggcacaatggacggacgaaaattcgatcaacaatttgaacaatgtcagcattaatttgagcggtgtcaattgcatatggtgagcagaatttgcgtaaaatttaaaataattataaaaattttttagaatattttgtttttgttcaaattcgggcagagacaaattcgattaaaatttaagattttcgagataaaaaacattttggcatttctttaggccattgtcgtccacaccagcgacgcgaaaaagccgcagaaaaatgacgtagaactgtgcggaagtgaaatataattgagaaatgatcggctttattggagattactattgaatggacaaattgatctgctgaaccatttttg

SEQ ID NO: 13662 - DNA, 4370 bp, Heterodera glycines
  unsure (1)..(4370): unsure at all n locations
attaaattacagtttcatttgatcggatgggcgtgccaaatattccatcttggacatgagaaatgacgttttaaaatatttttaaacagaaagtggaaaggatcccgagacgagaatccaactgcgatacattccgccccagggcgcaattgctcatcacatcatcaaagtgggtgatcgagatccagaggaacggatggatattccctcatgtttttttaaaacgcacttttcagaattggcttctacgagagttctaattgcaagcaaaaagtccatcttgctgttttgatcacttattattatgctaattgtttatttttaaaaaattgataaattttttaagcgaacatgaaatgttatattttaaaggttatcccacatttgcgtcccgacattggcgcctatgtccaaaatcgggttcaatcttcaatttttcaatcccaaatacccaaacagcattcaaattaataaaatacagtcttttggttcattatgccaatttatcaaaatttaaaagattctgaggatttttcccaaaggcctcaaaaagccacaaaaatcctcattttcaaaaaaaatcctcattgacatatcaataagccacaaaatgaggataaatcctcagatctggcaaccctgggtttgggttttataattcgtatatgagtgaataaaacatacataatacgggatcaatcacaatgaacaataaatacataatacggatcaatcataaatgatcaacaataacataatacgggatcaattataacttatcacaacaaataacataaatacaggatcattttccaagaaagtttatggttgcctcatataatctggtttgtctgtgattggcttcttggtgctgccgccttcagaagatggtccttctccttgggcaggcgcgttctgttgggttattgatgctctgccgccttttgaagttgcttcatctaccatcgcattcggcgcgttcttggtgctgctgctgccgccttttgatgttgcttctttcttgtcctttggcttgtccgttttgctgtcgcctttggaagtcgttcctcctcctttggtcaatactcggcgcgttcgttgtgacctgggaatttgttgggttattgatgctctgccggtttttcaagttgcttcatctacctgagcgtttggcgcgttcttggtgctgctgctgccgccttttgatgttgcttctttcttgtcctttggcttgtccgttttgctgtcgcctttggaagtcgttcctcctcctttggtcaatactcggcgcgttcgttgtgacctgggaatttgttggttattgatgctctgccggttcctttggtcaatactcggcgcgttcgttgtgacttgggaatttgttggttattgatgctctgccgccttttgaagttgcttcatctacctgagcctttggcgcgttcttggtgctgctgctgccgccttttgatgttgcttctttcttgtcctttggcatgtccgttttgctgtcgcctttggaagtcgttcctcctcctttggtcaatactcggcgcgttcgttgtgacctgggaatttgttgggttattgatgctctgccgccttttgaagttgcttcatctacctgagcgtttggcgcgttcttggtgttgatgctgccgccttttgaagttccttcttcctgggccttcagcttgtccatttggctgtcgcttgatgtttgttttggacatcgaggtgctgtcgggccgacctgggaatttgttgggttattgatgccctgccggtttttcaagttgcttcatctacctgagcgtttggcgcgttcttggtgttgatgctgccgccttttgaagttccttcttcctgggccttctgcttgtccatttggctgccgcctgatgtttgttttggacgtcgatgtgctgtcgggccgacctgggaatttgttgggttattgatgctctgccggtttttcaagttgcttcatctacctgagcctttggcgcgttcttggtgctgctgctgccgccttttgaagttgcttcatctaccatggcattcggctcgttcttggtactgccgccgccttttgatgtcccttcttttttgtcctttggattgtccgttttgctgcttcctgatgtttgttttggacgtcgtgatgttgtcgggcttccatagtgcctaagagtgcaaattattgaatggtaagacaagaattttttagaccaactttgttcctcctccctgagccttctgcctgttcttgttgctgacgcctgttgtttgtgctggtcggcgtttccctcggcctcgtctctggtttgctgctgcggcctgttgttgcttttcctcccttgtcagttggctgttcttctttgctgtcgccttcgggtgaagcttctgcgcctctgtccgttttgttgtcgcctttctgcaaaaagggaaaagggatttttaatttgataaaacgaaagttcttcctaaacacctttttcacacaaccgcagcactggctgagcaaaacaatggccacgagcaaaagcaaaataaggggcaaagggaataagaataacattatctgttgttgttgaatgaggaatggaatggtcgaaactgataaaatgcattccttttataatgatgacaaccaaaaaagaaacaaaaaatttagcaaaaaaaggagtatgattttcttcttctctatcctccattgtataaaagaaacacttttccggcttacttttccatttgatcatcacacatttactatttatgcaataaaaaagggaatttctacgttaaatttttttgatttggtggaggttttttatgcttataaacgcatattgtagtgattttcgagaataaatgcatatttaccatttttgcttttttagagatatgtatttcgggcattttttgtaatttttacaagaaaagcgcttcacaaaaaaaccaaaatttttgtaattctctaaaaaactctctttagccatcgtgtggtgttcaattaaaccttttttcgtctcgcggtttacaaccatccactttttgcctatataaatccgatttatttcatttcatttcctttacaatttatattgggttatgtatacagggaatgggtcttttcagtatcggagttaagcgccagctcgagttttttggaatgagacattttttcattgtcgacaaaatcctagaatattggcatcattataaaacgggtcggggtcacttcggcgcggaccatttcggcgccgcaaattttgaaatgctataacttttttatttgtcagttagctttagccaatctagcatcatttgaaagctctatgtgtgctctatatttacatgtaaaaatagaaatgaatgattcaaaaataaaaaagttatgccacgtggcgccgaaaaagccaagaaaaagtcaatttttgaggttttttggccataacttttttgtaaactgacgaaattttttgaaattttacaggctaatagagaatctgaagagctatcgaatgataacaaaaatttttaatttggttgatcaggaaaaaagttgttagcaacggcgccgaaaaggccggcgccgaattgggcggttccctataaaactctacataagctctatcagccttaaaaacaacaaagattttcggtaataggtagtttagatggtcacaccttttttgttggtttaaaatattgattaaatatattataatttaattaaccgttaacttttgagttaataaaaaaccaaacaaaaaaaattaattatttaatatttcacttgaaataaattaaaatttgaatttttttgaatttttaaagtttgccggttggtctcggtcccggcttctcaggtccggttttggcaaaattcttggagtattattcgccttaatatcataccgtatatgctctaattatagctcatgggggattatttttcaacctcctcagaaaaggggggataattagaaactgggggattatgatagagggattatttttcaaaacacctcgtagactgggggataattggagactgcgggattaatatagactgggctataattagagcatatacggtagaatatgatcttgttgactctgtttggattttttagcgtatttgaattgcttttcatttcaacaatattaaacgccattattttcaatttccgactgctgccatcanaattattttgctaatccaattttgagacattacgaataatgggcgtgttgggcgttggatggatgtgaggaacggtgcgggggacggaggatttatgtaggccttaattctgttgaccacatccacgtggccactcgttgggaatacctgagtcatt

SEQ ID NO: 13663 - DNA, 987 bp, Heterodera glycines
actcatttctcaatacaaaactcactgtttctatgtattgcccccgcccttcccccgcaaatcccaaatccctcttaatccactcctccccccctcacatctgtcccatccccccggggatgacagcattttccgatgtgaaacgattcgctttccaacaacgcatttttgggcatttgattttaattgcatttcctaatccatggggaaaggcaaatatatttttcgaccaccggtcccacagattgacaacgaattcgtccttttctccttctctcgggttgtttagttcctccccccccccctccttttcccatcaatcggattaattccaaaagtccccctttttcccccactcatttcctcccaaatgcaataatcgtcttcccatccattggccaatattgttgttgttcatccgttgtaatccaatttgtcccccccccccccctcccgtggcccttccgtgccaatccgatgcctttttccccttcccttcgcccctctctttgcccactttcccccattctcgagcaataattaaaaattggtccatctcataagcatgacggaggagggaataatgaggaaattgagaacattgggcggaggaggcggaaaagggagggaaagtgaaacgattggcccatcgactcgataaaatgtgccaaattgcgttaaccccaacaaattcattgttaatttccttctcagcaatgggcttcttccatcggcttccgtcgacgaattgcgcaacgctttgttcgcgtcgttccaacgccaattgttcggccattcttttctttgtgcgccgccgccggcgcaatgccaaccgacggaaacggcggcggaagagccgccaatgaaacggacgaagagggaaaatggggtggagaaggaggaaaaggaagtcggagaaagggcggcaaaatgggacggagagagacgacgagatggagcagtagcagcagtaaatggaagcgaatg

SEQ ID NO: 13664 - DNA, 2577 bp, Heterodera glycines
  unsure (1)..(2577): unsure at all n locations
cgacgaggggccctccgtagcggacgaagcgacggccaaatgcaaagcggcgggagcagcagcgaattgtgctgcctcttcgacggcacaacaaatggccgcgttcaattgccacccaatggcactgtttgcccagttgcaggcccaactgattcaccagcagcagcagcaaagacgagaggaggaggaagccgagggacggacggtgatcagaagggtcggaaagggcggcggatgatcagcgatcagccaaaagcaccgtatgacagaggacagacagacacagagtgatcggacgaattgaaagaaaggtcgccgggggagggggggtaaagtgcgatgagtcactccactcgaaagggattttgttctttgattttgctgttgccgctgattaacactctctctcgcccttttctctttctctggttcagctttaaatgtttgcacatattttagtttttttatttctctttctctctctctcacgtgaatatattcagacagaatttccttcccgcaattcattctttttcgtgcaattccattcgttttttcattttaagatttaaatttaatgccactaactctgtttgacatttgtattgaaaatgaaatgcgttgaaagttcttaaaaacccaaactggtatgagcaaattttgccgttttgacgcattccctcaaacgccgaaattgaaccatttttgccaatttgaactattttaatttttatgataaaactgattaaacacaggatatgtatgtcaagatagattatactaaaactgaattatttaacaacagtactacatatactaattatttttattttacatgtattcgattcacaataattgctgatcaaatgattaaggaatgtattgagaaaaaaaagcaaaaaaatggaaatgggaaataaattatggaagtcggcacaggaatgaacagatgactttttaggaatgttaaggaaataaaaagcggaaactaaataaaagtctaatcaatcacacccgaacaagaacatcgcgactgatcagtgatcacttgagcgttgaagaggcagacggtctgaagtactgctcacgaatcaccgagggcagctcggggcccccgtcaatgccaatcggcggcgccatcggcgggtccgccaggcgtctgctccgtttcaggtaccagaagaaggcactgagaacgcccagcgtcacggcaccagccaaagccaaggcgctggcggcgaaaatgcgccagaaacggtggttggcctcctcctcgttgcgctgttggaccaccaaatcggcgtcgaccttgttgatgtcgtagggggagaaggtggacatgggcgggtgctcgaacgtgggcaacttcttcatgatttcgtcaatgctcagatcgggctgaacaaaaggaaaaaatgtctcctaattatttgcgacgaatgactgattgtgagactgacattgttctccaacgaagcaacaagccggtcaaagttatctttgatccactgctgcaaatccaacggcaacttggtcaagtcgggcatttcaccgcgcatcacttgctgagtgagctccggcggaagtttgctcagattgtaattgggaggcaaaagcttcatcatttggaagactttcggtggcaaaaggcctgtcagattgagcggctcagaggcgttgccattgacggcgatgccgaaagttttgccgatgtcgccacccgaagaggatggcatttgctgcatgtaatattgctaaaagagaagcattgcaaaattgaaattaatgaaccatttatgccaattttccccttactttgatcacttccgtttgttcctgcgtaaggtgcggcaacggtttgttctggacaactttctccaccatttcgttgggcaattcggaaattggccgaagcaatttggtggggtcagtgcccggcggaaggggtggcaattccgttgttggacggccttgcaagttggaggcagcgacatacaaacgctgcatgtactgcttgacaatgtggtccaacgtctccttgggaatgccggggatttgaccccctttcagcacgtgttcaaccagagaaggatggagctgaaagaagtgaaaatcaaatgcattgaattataagcaaagccgtggatcactcactttgcttgcgtccattgtgccaaagccggggatattgaccaccaaatcggggattgaagaaagcattttgccgacgtcggagctggacggagtggcgccagtggcaaatttgaccaaaggctcggaaaactaaaggaatgactgttgacagaacaaataatattaattatttaaatcgatttcgcccattaaatgattcagagactatttcgccattctccgaatttcaattacagtatctccccggtatacggtaatccctctgtcattccccacctgatctattgccgcgtccaatgtttttacgtccgatttgcgttgtgtggggattgtctttagggggantcnccttccnnnaatntnncnnntctcccccttaggaaggcggcgcagcgaaccgagcacttgagagcacaatttgcg

SEQ ID NO: 13665 - DNA, 1530 bp, Heterodera glycines
ttaaccattttatacataattggtgaaagacatgtcatcttatgctaacacggaggtagagcaagattttatctacgaaacttgaatttattaagaaattatggtataattatttagatgcctaataaaccaaaatatttgaaaaacaagtaaataagtaaacaaataaaaatgttaaaaatactaactaaagtaatataatgtttaggagaaaagaattttgaacaatttatgcaaatatatatttaaaatttaatatagaattatttttaatttttaatttgtatatcgaaaacatacattaccaaattgccctttgaatgtgagtcaacaacttatacccgcttatgggcacttcaattttgatttgataattgctactataaaatgcacaatttccttaagaggaaagttgctgtaagacttttttgttcagcataaaaaatattgttgtgcaaaaaattgttcgtttaaattcaatcaagcaaaagagcaataattttgcacgatttagcatttgtccataaacttttgacaatgactgtatgcccaattaactattatctatattatataaatagaattaaaactaaaataatatcagcaaagatttaaatgtatatgaattgccgaaaaataaacatttcaatcaaaaaattgtttttacatttaacaaaataaaatttaatttgtcattatataatgcaggcaagaatcaaaatataatccttatataaatttgacaatttctgtgagtccccggtgttgaatttggcagtgtataaacgttatgccaattttctttgcatgtctgccttgcactatttttacttatttattatgacttgcattttggggggagttagggaagacagcagacaaaaagaaaaacaaaaacaactttaatgcattagtttatgatgaaataattgttttttcattctttttctgtcaataatttttgttaacatttcctattgcttatgttcgttatatttcccaattagtttttccgaaaaccttattttatttgtcacaaaatatttggaattattttaaattactactattttcaattttttttatattttttaaattttatggaaaaatcatgattaaattatggtagatgtcaaatatgatgtttgttatcagcgaccccaaaaccctcctgaaacttatttttttgttggcaattaatttcgcgtaattccgtttaattttaagtggcgagaagctcccggacaatctgtcagtggacaatccgtcaatgaaagacaattctgcagtaggggacaatcggttagtggacattctgtcagtgcacaattcgtcggtgaaatattttttaaaaatatatttttaatatactaataattccaccccaaaagcctaattatcttcttttatcaattgtagaccaaaaacaaaaacgaaaaattcgatattttttcaaagggagaaaaaaatcagaaaatttgtccggagaaaataaaaatttttgattttaactttgagaaatcttccatc

SEQ ID NO: 13666 - DNA, 2395 bp, Heterodera glycines
  unsure (1)..(2395): unsure at all n locations
cataaagtatatgaatttcaccaagaaaaactttttcgagtttcgggnccgctgatcacgaatatgccatcaaattcgacatctgccataatctaatctatgattttccataaaaaataaaagaaattagtaaaaaatatagaccagatgtagaagtcaaatttgatgccatattagtgatcagtgaacccaaaaccccgaaaacttatttttaagctatataaaaaaaatttcaaaatacttttttttaattgcaccctcaagtgtgtaattttgagacccatttttaggggcctatttttttgtatttttctaaggaattccgaagtcccgaaaagtggaccaaaaaaggcgaaatgcacaaacataagcatttagccattaagcctaaaaaattcaaaataggcaaaaataacattagaaggcagttataaattatatttcacattaaatagtgacctctctgacatatttctaaaattttgatcaaattgatctgatcgattttgcaaatttttgcccttaatccacttttatgttaattttgacggattgccttcactgacggattgaccgctgacggattttctactgacagattgtccactgacgaattttccggacctcaatctttaacgtttttattgttttttagtctgaattatatgtgtatttaatccatattagtttttcataatttatgataatttgtgtttttagatcaatatattatggttcgcaaaaagcaaagtttctcttcggaaacaaaagataccaatgtatcttcattgaataaaggggttcaaagctcccctgaaaaaaagcggtctgaaggggttcaaagctcccccgaaaaaaagcggatagattatgaagaaggggttccaagctcccagcaaaagcggatagtttttgacaatgttcgaacatatgaaaagcaaagcaaagacaatgttattttgatcaatttggatgatgaagattttgaaccgtgtacaagtaaacgaactatatgcaatgtagtgtccgaacaaaaaattgatcaattacggagagatagagaaaaacgtgtgagatatagagaaaatgaagcagaagcagaaagggataaaagaaccaaacaacatcgcttgcatatgcaaaatgttagggaaaatgaaatggaagttgaaaaaaatgaaagacaagaagctgataaattacgtaagagaaacattaaagaaaacgattctcatttgcaccaatataaggctaaaaatactaaacaaataagcaaggtttcttttggttttatgaatattgcatgtacgttttgtggtgctttacattgggcttaccaaaaagtacaaggaaaaaacagttttgatgattgttgtaatcatggaaacatttttttgagtgaaattccagaaccacctcaaatacttcgtaattttttgataggaaaggacaaaaaaagtcgaaatttttttgatgggattagatatttaaattcgagcttggcatttgctactatgaatccaatgcgtgtaaaacttccgaattatggtccgtattgtttccgtattcacggacaaatttatcacagaattaacattgctttacatccagacgatgatgaatcgccatctcatggtcatttatttatacttgatccagaagatgcaattaattccatgaaacaaaacaatcttaatgtggatacggatgttttggatcttttatataaaactataaaagaaagtagtccatttgttgacggtttagaaatgatgattgaagaagaaaatgttcaaaaagaaattgctctcaaagaaaatcgaaaaccttatgaggtccaattattattatcggataacaaaaatcttgacaaaagaagatacaatcttcctagagcaaacgaagttgctgcagtttttgtctgtgattctgaaggtataattcctgaacctcgcatagttattaaagaaaggggaaaatctttaaaaatattaaattgtaattgtgctgaagcagatccacttctttatccgattttcttaccttatggtaacaaacaatggagtcctgatattcaaaataaaaaggaaaaaaggatttcaagaagtcaatttattagatggcaattagctattaaagaaaatagatttaactcatttcttcatggtcgaaaattgtttcaacaatattgtgtagatcagtatgttcgaatagaaaatgatagaatgaaatatataagagagcaccaaaaagaattatgcgcggaaagttattttgaattagcagaatggttggaagatgaggatcaaagagaaaacaaaaaattgacaaaagtaattttaccatcaagagtaactggatcacccaagatatattgaacaaaanttaccaagac

SEQ ID NO: 13667 - DNA, 1213 bp, Heterodera glycines
gcggttttagaaacgccctggcggttttaagaaacgcccaaagtggcggttgtaagaaacgcccacctggcggttttaagaaacgcccaaagtggcggttgtaagaaacgcccacctggcggttttaagaaacgcccaatgtggcggtttttaagaaacgacatagcaccataaattggtgcatgatggtgcatagaaaaagaagtatcgcgatgccgacgcacggattcttcgtctcgtccaacgctataacgatatcaataacaatattgtccctcaaaatgatcacaattatgccaatgccaatgtcaatcccgaaaaccttaacaattttctcgctggtattttccgaaattatgagatgcgacctagtttgtcccggattttgttattattataaagttatgaattttctacaaaattttatgaatgggaaacaaaaaatgataaatttggttttattagttcttaagtttttctatttgaatctgacgcttgtacaagaactcgtacgaaaatgtcccccgtacgaaaacagcggtacgataacgaccctgaccgcatatttaatgtttactaaattgttttcacttttttagtttttaaattaaatataactttttgcttaatttttaacattaatcaatgaaataaaacgaatatgcttttatggaatatgtaaggaaaaagagcgagagcgatacagagagagaaaaaaagagagagaaaagtggggagagagaaaagaagatagagagagaaaaatggagagagagaaggggagagagagagaaaagagaagagagagactggtagagagcgaaagactgggagagagagaaagagaaaagaagagagagagaaaagaggatagagagaaggagagagcgagagaaaagagaaaaagagagagagactgggagagagcgagagagagagagagaaagaagagagagagaaaagataggtagatagagaaatggagagagagaagagagagtgagagagaggaaagagtagagagaaaagagggagagagaagaggtagagagaaagagtgagtgagaaaagaggatagtgagaaggagagaaagacagaaaaaaagagagagagaaaagaggagagagagactgggagagagagagatagagaagagagagagtgagagatagcgagagagagaaaagaggatagagagcaggagagagcgag

SEQ ID NO: 13668 - DNA, 1993 bp, Heterodera glycines
cgcaaacaaagttaataaatgattaaaattcatagttattcattttgcattgttttccctacctgccaaatcgttttcctttgtctttgtctttccatttgtcctcctttgttgttgttgttgatgtcgttctttttgttcagcgtcctcttctattttctctttcttgccgtaggcaaattttgaaagccctcgcggcggtgaaatgtctccgatttcttcgaccaacgaatcgccgtgggtgtcctttgtcattatttgatcctcactctcccctaccacaattctctccgtttctatttctcccctcctcctcctcgggctgttcccattttcatcaattaattggcctttttcctcttcctccaaatcaattacaccttctgcttctgttgaagcaaaaataaaggttagaatatacacaaatcatctgcatttgcattttgtacttttgctttcgtcatctctcatccattttcaatttcactttggcattgcattcattttcttattttctatttttattaatggaaactaaacttcttatatataaaataggttatttcgatgttgattgcataagttgatcacattactctttaagaatggtgttcaagtcggaaaatgacaaataaaactaatttggtcactcagtttttgaaaaaaaattaggcactatatggaaagtaacagtttttgaaacaaaagggggatccttttgttttgcaaaatttttttaagataaaaaaccatgataattttttatccggggttttaaaggtcgctaatcacgaatctgacatgtattttgactaattcctaatccctaacccgaactcgaataaaaatcgaaattttgaatttttaaaattatgattttttgttcaaatttagattaggaaatcggaatggatcaaaataattgaaggattcgtgatcggggaccccaaaaaccccagagaataaatttttatgactatcacaaaaaaaattttgcaaaacaaaagggtccccccttttgaaaaaattttcaaaaactgtcactttccatatagtgccaaaaattattattttttgttttttgacagtttagcccagaaatagtgatacgcaaatgtcggtccgaaaatgtcgcactacgtttcctttaccttctctcagtcgtccattgctcctccaatttctgttgcttttcgttggttgctctttttgctgttggtcgtcgttctctctgttggtaatgggtgccgtccgccactcatttccatgcctttccgttggcatttgccatagttccgctgactctccgccagcgcccgttttccggtggaaactcgtgaaaaaattgggaaaatctacggatgagtgcgcgacagaagggcagcaatttgaaatggcgacaccaattttttcgcctccgttttcgtgagaatgggacgactgtcgaaggaggtgagggagcggctgaagagggccatcggcacgggcactgccaccatttctcaccatttgtcggtcggttccccgtcctgctgaaatttggcgatatacaataattgctaattcatttttcacttttattaactcgcagagaacactttgaaaaatggaaagccaaaattaagtaggacaacaatcaactgtagttaattgcactgctctttgtcatcagacatttgttaaatgatcctatgaaaagaactctgtcctttatttgtgctatcgatttgtgaccttttggccaatcgccgcggggggggggcaagggaatgggacagcgaaactgcgaaagaaaacagaacagccaaaagttaatgagggacaatgaaagaggggcagttaaataaacgggacaggggggatacatgagaaaaatggacgaatggaagcaatgtttaaaccgtgctgggtcgtttcttaaaaactggcaagtgggcatttcttaaaaactgccaccatggggctttcttatatactgcccaagttgtaggaa

SEQ ID NO: 13669 - DNA, 2070 bp, Heterodera glycines
gtcaatttacgtttgcaaaaccagtcggttaattactggaaatgaaacgctattgttaaacagaaaaataacaattaattatagtagtaattttctttcccaaggtaagattcaaaatggcatcaattttaaaacggaacaggacgaaacacagccgccgaaacacagtcgagacatacacagccgggaataaatttttaaaaaattttttcaaacagaaatttttcaagaaaagtcttagaaaattcgatgaaaaattcaaaaattttccagcgattttttcaaaatttactgatgaattactgagtttttcaaaaaaaattcaaaaaaatcgctggaaaataaaaaaaagaataattcacatttatttttcaattttagagcagaaaatgtttttgatggcaccttttttctcatccatcgaccaacgccaaatgcatatgtaattgtccaccccagcggtgaaaatcattcgctcgccctcacaaatttccaatgcaaatggcctggccccatgtccaaatttgctgaaaagctaaagagaaggaaaagtaaaaaaagaaattggcacactcattctgacttgggcacccttttgaatgttccaaatgcgaagtgagcgatcgtcgccgacggaaaaaagccaacggaaattggaatcgcaacgaatggcaaaaggcattccctaaaaagaaagttaaaggcggaaaaagcgattaattgaacttcgtttcccgcaaaagtacgcaaaatttgaggcccaattgcgggttgaaagaaatgaatggcaccgaacgaagtgccggaaaaaacgcacagcgatggccaataatttccatgaagaaaggaggaggtccttagtttctttaaaattatgggaggaatttaagacaatgccaaattcttctgataggtccccttctgaaattggtattaaaagataatgtaaaaagcacctgaaattgcactaataaattacatgtatttttcaaagaatatggtaacttaatcgtaaaattatttttatacacaaatttaaaaacctaaggccaagaaggaaaggcaagtagcgatgtatgttttcaaacaagtttttggcactttttcgagattaagtcgtttagagactcagtgaaaatgcggcgcttcgaatagcttatttaaaataaaataaaagaaataaataaaatgtttgcttacacaagtgcttgacatcccaaacgaacagagaaaacttccgcaggcgatgaaacatttacaccaatttctccctcaggcaattccatcgttttgatccaattattggcaaaatgaaaggttaaaaagagctgtaaaaaatattactgacaatgagattattttcgtcctttcttccacctttttgcttttgcaagtggactcgtccttcttttcctcgttaagtattttagcacttaaaatccaatcataaaatgttccaaatgccattcgcttccaatcccagcatttccctttccgtgcattgtccaattgtgcatttttgaattttgtcgcagtgaaaaatgcgaattcacattcaccaacacatagaagagctaaaatagaatagaataaaatgatttgaaaagaaactatcgtagtactagtaataatgtgagaaataatacttgtctaaaattaaggcaatggtctagaattggtgtcccgacgaaaaaaagttaaaaattttccaggtatttttctaggcttaaaaaatatgctgatcacgaatctgagctcatattttgaaaatcattgatttttatccaagcttttttgtcaactaattgattttttaaattttttgaattattttaaaaaagtttagcaatgaatttggggttaaaaaatacgctggtcacgaatatgaactccgattttgaaaatcattgacttttatctatgatttttcatcaaacatcataaaaaataatccgcagccaagcggattcgaaccccagacccagtttatgtgcacgatcaaataaatgcgtaaatatttttgatgacacaaatcaacaatagtcgtaacaattgatgatgaaatcctaa

SEQ ID NO: 13670 - DNA, 734 bp, Heterodera glycines
ttacaaagttcttcatttcgagtaaattattgcagttcaaacaaaataaactcacaaaatttcctctcgcaagagccaaatggaaataattggtgtatagtatttttggtatttggaaaagcatcgaaagcatcgatcaatttataagatccactacagtcggagaatatttcgacgtaagaaccatgacctgaaaagaaattgccaagaattcttttcaatcctcaattctgaaaaacgaacttgaaaaacgcaatgtgaactcagttccacaggaaattgtgaatgacagagaagcaaaactgagacggggcaaagaaatcggaatggaatggaagcgaacatggaaattggacacagaaataccaaccatttgaaaccaaacctgggattggacaccaaaaagttattaagatggtaataaattaaaacaaaactaattaaaaagatcagtaaaagtttggcaaacaatttcgtcaatagaaaaagggctaaaagcattaaaattgtttatttttttcatcaacacaaacataacatttgggaaaagtccgagtcagcgcatccaattgatcatgtaaaaataccaatgcttttgcatcaagcaaaattgtctgctttcctccatctgttgtatttatttccatgagaatttcgtatttgttattcaaatgcgactcgtcacgagttgagacgtgcaaaaaaaaaaggttaaatgagaaagctgcacaatt

SEQ ID NO: 13671 - DNA, 1773 bp, Heterodera glycines
gggaactaatccaacgaacgaagagcaacacgccttttcttcttgctctattcaaagaggataaagaagggagagaacgtgcttttgcttcacttgtgaatcgttttggcctaaatgttgtatcccgttggacttatggacgttggtggaagaacttcgaatctggtcaattcatgctgagtcaacgtggacgtaagaataggcggataacattaaaactgcaatataaaaataggaaaattttcaactccaatggcctcgccagcgtcgtcggagagagatgacgatgacaatcttttttaaaaacgctttcaatcttctaatcaaggaggcccaaattcaaggacgtcccttgaatacaaggaggaatttaatttttatgaaattttaaaaatttttaattttgccaaaaattttttggactggcagttttccctgccatcattcccatcaattggctagtattaatttgacttttgattgtacgttgggtttgattagttttattgttaatttgccaaaaaaattcttaagtaccgtaaccttaaacggtgctaggtcgtttcttaaaaactgccactatgggcgtttcttaaatactgccaagtgggcgtttcttaaatactgccaagtgggcgtttcttaaatactgccaagtgggcgtttcttaaatactgccaagtgggcgtttcttaaatactgccaagttgtagtaaaataaaaaatgtaagacatataaattcgtatcttggcccaatttcatccaaattaataattattggtattattcaatagcattaagtgttgtctatcagaatagaaattttgaaaatttttttacaaaattaaaaaaaagttatggtcataaattttcaatgaattttcagtcaaattattttaccagaacttttttaaaactcgatggaattttttgaaattttattcataaatagagaattcttaggactatcgaatatataaatttattttctcttaattgcattttaatgccttgaaaattttaattttttctggacaaaaaattccgacttaaggttttgtggagttgaataaccatatctttttatatacttaagtaaaaaatttaataaaattatattctgatagagaacacctatagctattgaatgataccaagaattattaatttggttgtatttgagctaagttatgaatttatatgtcttacattttttattttcctacaacttggcagtatttaagaaacgcccacttggcagtttttaagaaacgccctggcagttttaagaaacgcccatcgtggcagtttttaagaaacgacccagcacgatttcgaataacgaagaagatggtggggagagaagaggagggaggaaaaggaagaggagggcaaacagtagcaggtgcgtgggggggggcgcccatttttgtgccggccattttggcgacaaacgctataattagggttcgaagttgtatgtaataacaaatgccaaatatgcgcatgcgtttttggataattgcaaaaattttgacttataagatttataaatgcaatttcgaatatttacattttgatacatttcaatggcgtgagaatgtgaaactgaagttgtatatggctaaaacaaaattatatttaaaaattttaacgtataaatattatttttgagcctttttcatagcggtgtccagacatttgcggctcggacatttgcggccccagccaaattggacatttgcggcgcgacttttgtggcccgacatttg

SEQ ID NO: 13672 - DNA, 1213 bp, Heterodera glycines
atttggcaccgatttgattttgttcgcgctttttgtcggcttatttggcgtatttggtgctgaactggccttctttttccgcaaaaatgatggtgtgtatcgtgaactgtttgatgctgatgatggtgattttggtttctttggcgttttgtccacaatttttgtcgattttggatttgtttggatcccatttggctgagcgcgttgatcaaatttcattttctcactgtgtttaccgatcagaaacacttggccataactgactatttcgtcaggtttttttgcattgtataaaactgtaaattaaaaaatgggtttttaattcatttaaatactgattttttgggtattgtgtctcataccgtatctctcctctctctctcccttccttcactcttttattccattctctctcccccctcacctttatctttcgcttacctctccctcactacctctctttttgtctttcactctctccctctctctctctctctctctctcgtatcacttctctctctctcattcttctcttactctctcccttcctcatgtgaaatttttcttgaaattaatatgcgttttttaataaaaaaaaaatattcttttataaattaaaataaactaacccaaaaatgaagagatagcgaaaaatgccaaaaagaatgtgctcatttaaaaaagaattatataatattcttatgaaatattaatataatacatataaatatatttaagctaggatgttgcttcatcttttttttatatgacttaaatatagatcaataaaactcatttttatagaaattattgcagattcgcgtgccaccatcatgaggtgacatcacaggttttttcttaaatattgaatatgacatcataaaatattatttttatgtgtaatatccttaacgaaaaaagtttttgaaatatgtaaaattattttaaatttataaaatttttggttatttttatgaatattttttttcgaaaaattaaatctaaatatataagcaggaatagaagaatgcttagaaaacagtttttatttgttttaaaaaaaagagttcatttggtaaactttttattcgaaaatctaaattttcgtattatttaaaaatatttcatggtatataattcaaatataaaataaaaacatataggcgaaaattatctccgcaaagaaatatacgaaaaaataataaaaacaaat

SEQ ID NO: 13673 - DNA, 2136 bp, Heterodera glycines
  unsure (1)..(2136): unsure at all n locations
tccgctggccgtctggtcgttcgactgttgtcgttctgctccgcnccgtttgcccgaagaggcagccgacgtgcccgtgccaccgccgctngtcctccgcccatggtgttcgatttgtggcccttgaattgaagggaaaacgttttcataattgatagtaatgaattattgcaaggaaaattagaataatttatttcgggggacctcaaattccattcttattagttaaggcatagagcaaagaatcgcaaaacaaaaccaaacagacaaagcccgatgaatgaagacatgagtcgattcgaatcaaatcggttttggtgcatttttttcaactcacgcaccccatcacgaaaacacacatccaaaagtgtattcgggttgctgatcataatccggcatccatttcaattaattctgagcccctgaccgaattcgaatatagtcaaaaagttttgagttttttgcttgaatatgggtcaggggttcggaattggtcaaatggatgccaaaaaatgaaggctttgtaccgagactcccgccctgctttggtttccaagccctgccgttcctagtcgatttcaaatttccatccccaattaaaaccttgttctgcgatgttgtcgacatctttctgacctttgcttcctttgcagccgactcagaagaggacaaaacaacggcgttattcgaccctaaacaaacaaaatgtttggccggcagtcaatcggtaacttaacgagtcaatggacttgggtatttcaaaacgcacccgggtcaattatcaaaaggatctccgatatggtttttcgaaaaaacaaataattttactcccggccatgttaaactcaaaccaatgacgaacagtgtggcgatttttgtggacatgaacacctcccagcagaaaccaaagcccgggaataaaccttgtcccccagcggcgccgttcgccgagtccgtttggtttgcgctgtgtcgcttccgctgtccgcttgtcgtctcagtgcgtccgtctccttcgccgccactctctgccggtggtggcgtaacagcactttgttgatgatttgacatcaaaaagttaattagcaattgtatgtctgtgcaataagtggtggaataattttgcgctattaaaaacattttttgaaagtgttagaaccaggggaggagtatattttttgaattagcgggaacaaaaacaaaatttggcgttatgtgtaactggcctagatctttaggcaaattatttcaccacttatcgcgcacagacaactacagatcggtattttggaaaaagcctgtacctgtaactgtacctgtatttcccgatcggcctgtttccagggtattctggtccgctgaacatgaatataatatttatttcgattaattccgaaccccgggcccggattcgaataaaaagtcgaaaaataaattttatatttcgggtttgattgggatgaattttaagttattttatatgttaggtgtgaactttatagaatttatgcactgttgcatatcaattttgggcaataaatgcgaattttgaaaaaattttgtttttcaactttttgttcgagtctgggtccgaggttcggaattggtcaaaatggatgtcatatttgtgatcagccgttccgaatacgtttttctgtttgtgttcgcagagatttgttaaaaatggtattagattcgtgttagcaaccccgaaaaaaacccctaagaacgagttttgcgcttttttatgacttatcctcatttatgttttcacgtatatttaacgtcctacgtcgccactccaatcgccgatgcccgcgagcgcagaaggaggcggcggttggccgcctcgcgtcactcccaagcctccctggtgagcgaggacgaaatgattttcgtcattgccgccgggggtggcgagggaggtggggtgccgccaccctcctcctcctcctcctcctccagcagcagcaacttgccaccattgaacagttcaagggcggatcaccaacgctgcggcccgcgagggtgttgggcgccaccacgcgcgggcccgccgcttcgctgctacccgccactcccaggcctccctggtgagtgaggacgaaaatattttcgtccctgccgccggggggg

SEQ ID NO: 13674 - DNA, 2472 bp, Heterodera glycines
accaaggacaagaagaccaaggacaagaagaacaaagcagctccaccaatgccagcagcaccaccagcagcagtagcaacaacagtgtcaactagagtagagcgggaccgggaattttgggcaaacccgggaccgggaccttttcgggttgaaaaaccgggaatttttggcttggaaaaccggggaaaaacccgggactggtcccggtcaaaaccgggacctcggtactcagttgtccgtgttttggtcccggtcccgctctactctagtgtcaacgacactgatgatgacgacactgatgctgctgctgatgaggagggctccgatggagaggaggaaacgacggatgaaatcgaggacaacggcgagcagcaaccgaacgcggcgccgacgccatccgccgcttcgtctggtgagcaaagctttggaaatgtgaacaccagttctcggacctaattccgtaaaaacgaagcatccctacccttcccctttcttccaacaccaacaattaaattccatccaattttcttcctcattatcctaatattgttcatgttttcagcctctacgcatcgtcgacgctccaaatcaactcacaaaaaacagaaaaaggcatcaaccgctgggcgtggttaatgtggccactacagcaggcacatcttcttcatcgtcgacggcggcgtcttcgtcaaaaataggtccaatgaatgataattaaaaaataaactctttaatcatttcccaatttggtctttttcatgcgctttcattttcagtcgacacaaagtctgggcccattccatcgccgctggaagcgtttttgaaaccgcagctgaacaacgcgatgtccgacccgtctcagaactgtctgattctgctgcaagtgctctacgggctgaacacattttggtggcgaatttttgatgcaaatgatgccgacactgatgaggacggcaatgatgctgctgctgatgaggaggagggctccgatggagaggaggaaacgacggatgaagtcgaggacaacgagcagaaacaaccgcaaacaaatttaccaccaatcacacacagaccgatcatcgccccgaggtttgatttttttaatgccatttttatttttcattggttttctgcgaattattttaaaattatggctgacaaaacagcaataaaagtctcataattttcagtttcttctactcaccaaagctgaattccaaagtgacgcgtcaactgtctgactttttgacggttgcaacccaacaaataccgaaatgttagtttgtcttttttttaatttagtgtcattttttatttttttttagggacattggacttggttcgagcggtgtaagtttcctaattcttttttaaactgttaatcccatggaattttcctggtgttttttttccaaacttttttcaaatttcgtccaatgtatccttttcagtccgttcatcttcaacttctcctcccgccattccttcctgttttgcactgcgtttggccgtgatcgggcactgatgcatttggtgaacgagacgagcaacgacgagcaggacggcgccgggcatgacaccgcctcgcggctgatcactcggctggagcgccgcaaagtgcattttgtgccaagtttggttcaaatgcttatctaatatttataattgatcaattcgatgaaattgttgtcttgatcaacattgagggatttgcgctaagactttccctctaatgccatttgctggcgcattttcaaatcaacatcgaaatgttaccatcactgaaattctttaaacatcccttttaacaaatttattgatgaatgcatttgctccctgctggtctgtgttgaagttgaatccaattggtcattacagtgacgcaatgatcagtgacgaactgaacagtgaatcggaatcaaaaaaatcagtttttacggtttttttcagcaaatttttcaaaaactttagggaaacacgggggaggccggcggtgccgataggggccgccggaaaaattttgcaaatttgaatgtaatttattaacagaatttatcttaaactgtccatagtttgtgattttgaactaatttataagaaaatagtgggtttttaggtctggcagtgccggtcagggcttggcgaagctcagcttggcactcgaagccgaagctcgaaatgaagcccaattttttcgaagcacgaagcccaaaaaacgcgaagtttttaaagctcgaagtttcgcccagccctggtgccgataggcaccgatggaaaaatatgtagacaacaatttttattctgattatcggacaaaattcttagaaatcgttgtgccatgaaactacctaataagatttagaataatgttttaggaatttaaaaaaataatttattgataattcttttttgaaagtcacaaatggccaaattttgagtcaaattttgaaaactttagtggaattttggaga

SEQ ID NO: 13675 - DNA, 3747 bp, Heterodera glycines
ttaccttgattagttaccatcccaatgaaatccgcacattccggccacttttttcgcgcgtcaaatttggacggaagttctgtagccgacttctgtgataactcaatttcagcaagaaattatggcattatcgcatttttacaaattaaaataaaaaattgattaattcaatctatagaaaatttgaataattttcggtaattcatttaatttgttagccttttgctgctgcgttttgttgtcgtgtagttggcttgccaaggaaccattagcgttgtatcgaggtgtttcaagtgacccaaccatatttctaagcatttcctcgtccataagtgcgaaattttcgtggacgacggccttaaaaaatattattaaaaaatattttatgccccaacgaactgtccaataattttgcgcttcattcagtatatccacatattcctgttctttctctaacttttccatacgttgcgtatccttaattattgtaataactgctttttaattgaaattgtttcaataacactaataatctaccgcctcattggtcaaattgttggcaacgcatgtcatcccatcggtgattgcacttggcattactgctgcgacctgtgttccaaaggttattttgatatgtagaaagatagaatatttaaatacaataacaaaaagaaatatgaaaaacaaagaatgattttttgactttttcctatttaattattttaaagtcaattcatcatatcgttttgtagtttttatgaaaatatacacatgaattaaaaatggcaattactgcggcattgtccgcgtcggtgacattctccgcatcggtggtattgttttccgccaaagtgatggcgattacaatgacgagagcggtgaacaaaaaaagaacaaaagaatgcttaaaagggttggattgagccattgctaaaagaaaaaaagtttcgcttttggataatttttgtccaaattttattttttatttaaaattaatttatgacatttgtgactataaatatgaccacaactgttcctttatatagagaggagaaatgggaagctaaagaaaataaaatcaaaaaataagatggaaaattaattcggtaaggaatggcaatgaaagtcagcaaattgtaatgtgaaattattcaacaaatggcacaacatttttagtgtaaacagacttaataaattcacaacattttaaatttctttcacttttcatttgctgaatcaatttttactatcagaacgaatgccaatgcctttcatttacattctttttcttttgacatttactgaattaatttttcctttcaaaatgaattccttttccattttttctttgtttttcaacgtccattgctttttctcctccatataaaagcgatacataagctgtgattcctttgatcattttatctcaatacattatcgtttctttaaatgtcataacttttcccagtcaaagaaaaactaaaggatagtgaccagggctgcacgcaagtggatttacaattacggaaatccgcaatccgcaattgcggcgattttctcagttgcggaaatccgcaatccgcaattacgggtgtccaaaaaccccgcaatttccgtaatttccgtaatccgcaatccgcaattaaaaaaaaaatttttttaaataattttaaattttattttaaaaaatcctataaatcttttaaagcaatttaaaagcatattaaaaagcaaaatcattcaattgagaaaccggttaaaagcaaattgtgatgaagaaacaaaagttttgcaagattttctggtaatactctttcgcaagtcatctgaaattagaccggccgttgagaaaagcctctcactttctgaacttgttgcaggcggagaaagaaatttccgtacaacggcaccaatcattggccatttttgtgaattaacttcccagtataatgatggatcggccctggatttgattttttggtcccgtaaatattcagctttacatttagcagttgctttgccttgacgctcaaaataataccaccaattaccaggatttaagtttgacatttttaaattgctaaagaaataagaatttaaacaaatgtatatattttctttaaataaaaatagaaaaaaattcattttataaaaaataatcttacaagaaatcgtctcgaaaaataatccaatagtcaaattacggatcaaaattgcggataaatcccaaaaatccgcaacccgcaatccgcaattacgggggtccaaaaaccccgcaatttccgtaatccgcaatccgcaatccgcaattgcgtgcagccctgatactgtagcaccttaggctcaagtgatggcgatgttttttaaaattttaaatgtggagggattattttaattccctttttctcaattttagatttaaaatatttttgtctcaacttttttcttcaatatagtagtatcatatagaacatttacaaaatttttatccatcattttgatctaactattttcacacttttacgaatttacatagatattttatgtgggcaaatttttttcggtattacttagggtgtaacataagtttccgcacaactttttttaaagaatttttttatgaatataaatttaaaaaaccacaatcatgatccgaaatatctgacattattattgagaatgagtttgctatttatcgggcaagggataaatcccattagaaaagtatttaaggagttagagttgataatgtaaaaatggtcattttcgaggtatgtatttttgatggctgatttaaagaaaatgaaaagagatacagaggcagagaaaacgtgagtaaaaagagcaaagttaggactataaaaaattataagaaaaaaattttattacttcaaaaatgaattattggagggccgagtctaaaaatggtctccaaaaacggcatttttcaagaccatcaaataacaaaatgttttaaaagtggttttggaaattccgaatttaattaaactaagtaaattgaccacgctgagtccgaatatggctttagatttggtctctgggttctcaacaaacctgtacagctccaacttcatgcatggagttggagcagtacaagctcagggttaaaagataggtcagatttaaggccatattcggattctactggtctaatttgtacagaaaaccttcttttttgttatatcaggttacttttttgaccataaaaaaatcgagaaaaattagtgggccaattttcaatttttgcatggtcgggaaaaaatactaaaaaattgaataagcaaataaaaaatgaaacaatggcatgaaatgaaagaagactttctgatgaacaaaataaaaaaagaattattaaaataactgcagaaattacggagttatgaatttttgaatttgtcaaaaaaaaattgtgcggaaacttatgttacaccctaagtatttttatagacgcctataggaagccaaaagctacggtaaacaaatagcaaacacccttacaaaggagaggtacccaagtgaccatgggacttccgaatgaaactttcagggtaggtagattaccccccctttgtattataaatttttttttatttttgctaaatgaagcttctggccgagatatgaagcttttcctttttgccttttcaatatcattttcaaagaatgtaaagccaatgtgagagtgggtggcctggtggttgtgccttcccatacttttttcttctt

SEQ ID NO: 13676 - DNA, 1895 bp, Heterodera glycines
  unsure (1)..(1895): unsure at all n locations
attgtatgccaccctttttacatgtttaaatgccacttcttagtcgtcattttctgccgttgtacccacacttttggaattctccaacattccggcatattcgaacagtggtgtcccggcatcaatgtcctccaatgtttgaagagcccagccaatttccggatccttgaagtacacctgggaaaataatagtaaaaaattggaattaattaaagtattaattgcattggttgcttataattacttgataacgcccactgggacgcataattgggccatttgtgttgggaatgtcctggaaaacattaaatgattctagtttaggaaaaatattaaattatttttagattttagacagtaaataaaaatataaattaatttttaagcgaattttctcaccacaacattttctcccttttctgtgctggtgatgtattcaaatgagtccatttcctcgtcattgtacgtgttgagcacgcgcagtttgttcagttctttgccgttgctcaggtcctcgttcacaactaaagaaaacaaaataatgaatttttcatttaaattttttgcgtttattaattttattttaaatttgggaacatttgaatatgccgacagatgtcgctggattttaaaaatttaatccattttattaatagatttaaaaaaaataaataaaatccaaggatataatttgaaactaattaacggatgggagcccaattttactttatctatttgcgttaccctttttcattttccactgtgtgatgaaaaatgaacgcttcgccggacgccctccggcacatttgtaagccgtctgttttcgtggcatacggccacctgtgcttttgcaagctaattgctttaaacgcattttcaggtattattttgcgaataaaaaaagtgtctctaaaagttttttcttttgagtcgtcatataattttttcggtaaatttgaaaataatttaaaactgtgtatgtataaagaaataaagaatatttaatggtaatttatgcacaaaatggaacattaaaatgtttttttaggttgaagaggttgatgcctgatgagggtaattataattaatctgggaatgtccgttaatgagtagggctgggaattaagtgaaatgtctttttttttttgccgattcgtaatgaccttaattttccatgacataaattcccaatcaatgagtgagtcatcatcacagacgcacatgagaaaaattaaattttctcgaaatttttaaaaataaatacaaaaaatttgggttaaattttgaagatttctagggggacaggtactataaaggccacgagagaaacaaatgatttcaatttttataaattttcaccgaatatgctcactttttgaggctttaaaaaggaaaaattcaagagatgataaaaattttgaaatttaatgaagttttaaatatttttattgtgagtcaaattggaatttagcgcgggcaatgggcaggccagtgagagagtgaatgagtgagtttctcttaaccgacgcgccgtttttcgtctttgtcatcgccgccgtcgcccgccctcaccgccgccgccgccgccgtcgatggagaaaattgattttggggtaaagtaaaaatgtacatgtggacgagatatacggcatcaaaacggtcaaattgattgaatttgtctgaccgtcccgccatttggccttttgtttgtccgtccgtcgtccaattacgaggtggacgggcagaatatataaaacaaatttgttgagcggagggggggggggagatggctaagcaaataatttttcttataaattctcaatttcccttccgaaaaagtgaaatacaaagaagaatatttactcaanagtctttccaagatctnatgttttcga

SEQ ID NO: 13677 - DNA, 1278 bp, Heterodera glycines
  unsure (1)..(1278): unsure at all n locations
ttgttgtaaagtatgttaatataatgtaggctaaaaaatatcaggaatatatatgattataaaagtttattccataaaattctctccctctttttataactttcttttattttctttctctctctctctctctatatgtataggcgcgctgtcaaaatgtccctgcgtcaaaatgtcccagcgtcataatgtccccgcgtcataatgtcccagcgtcataatgtcccagcgtcataatgtccctgcgtcataatgtcccagcgtcataatgtccttgcgtcataatgtcccccaagccaaaatgagtcaaaatgtccccctctaaaaattagtgaaaaaactgaagattatataatttttgatttcgcaaatactaagttcattaaaaattgatcaaaatcaattaaacaacaaaaaaatcaatcaacaatgggattttctaattaattgaaggaataataacaacaaaatgaacaattttaagggacatgcatggtcgaatcatcaaaattttcatagtccttcaattttcctgcatatccttcgacctgcagaccaagagccgtcataacatcgtgaatttcggcatcattgtcgtatgtggcgtccgctaaaattcgcatgatgactgcgtcttgcagcacgtagcgtttgtgtcgtttgtgtatgaagttccgagctgatctcgctgcgtccacttttttgtcgatacttctgctgacttcataaataaagtcggaaagggccgggtggtgacaaagacccttctaaaattgaagtttttgggggaggtttcataagtgaaaaaatacagcgaaatggaggtgcgttgcttcgaggccattgttggttctcgcgagggcagaagctgcatgtgagtgcacgttccaatatggaattgggaacagtgcgcgacggacgacgggttcttcccagggacggactaaaattataaaaatgaaaagtttaataaatttgggtatgcctgtcagcagtgtcgttgttgtccaaaaacttacgcttacgacttttttggagaatttcaattttgttacggtccatattgatgctaaagcataaatttaaaaagcagatcgtatgaaggcatataattatataattttcagttttttcactaatttttagagggggacattttgactcatttntggcttgngggacattatgacgcagggacattatgacgctgggacatttcgacgctgggacattatgacgctgngacattatgacgcagggacattttgatgggcagcg

SEQ ID NO: 13678 - DNA, 1728 bp, Heterodera glycines
  unsure (1)..(1728): unsure at all n locations
cgaatatggcattaattgtggcctattaagcaaatttggcgctagttataaagtgatagattttgaattttatcaaaaaccataggggggacccttttgttttgtaaatttttttttggataaaaatcgtgaatatacattttattcaccataattgtgctgttaatacttaatattcatcattatgtgtaaaaaaaacaaaaaaaaaatttgaccaaaaaaaagttgaaaaaaatttcaaaaggttactctttgcaactagcgccaagaatgtttaaaggacccttttgctgatgatagcgcagaccaacagcaaaagtgtgctgatgccgtagccactcattccgctgattgtgaggactcggaagtcgcatcgccatgcggccaaaatgtcgaagaaatatgggaaaagcattgcgaaatggacgacctaataattgacgaaatgtggaaatatgcaatgacatattcaattcgaatgctcaatttggtcccaaattttattccctttaataggccataaaataaattcaaaagtaaatttaattaattgtcaggaaatggacgaacaccaaattcctgtttggtatgtcatggacgaattcggtgttcgaattggccattctcttcagccaaacgtaaaaagcaattaaaactgtctttggtttgcatttatattcctgttttaaaggtcaaaatggttccgtttctcgacttttctgaaaatatggcctacagtttgcttttccccgtccaaaatatttcagaggggggttagtttttcttcaaattattgttttaaactattttatgtgcaattcttaagacactgtgactcgcaattatgtcgatacgcaacttctcaaaactcatcccgattggttggatgtactgctccatccctggcaacccttccccaatttcgctgctttctcaatttgtcacgttcccaagcgggacgaatatttcatggtaaaaaaaagatttttacccattttctaagcaattgtccgtcttatctctcctcatttgtccctccaattcagtccggtcgtctgctcgacttaatcccttccggagaccaaagcccaacggtcaatttccaaaagtctgtggatgacccggacattttggtgtgtgcctcggatttgcaactcatcggacatttgcgccgattccgtgtgcaagaaacaaacgatccgatgaaagcgcatatcatttggcgtcgtgaccatttcaacgattttaggcactcattttcactgatttacattttcattttcccttttgatcagatcgttggcgtaccaaaatccaagcgctttgatcaaccaatttccgtttgaatccgttctgaccgtcaaagatcttttcgcagctgccgtccaatcattcgtcgaaaattgccaagatgtccaccccgaccagcaattggtggacgaattatccctccgttggtcccccgaatggtttccgctcaccttcaaccttcacattgaactgccccaatttgtcgcatattttcagagacgggcagcgaagtcagtgtttttaactttcatttcgcataaatatgcttttattttttgagaaatttggacaactgttggattgtgaagccgtggaatttggcacgggcaatggacactcacgtgacacgcaatttgaacacgatcattcgtttggccgaaagntggtcccaaagtctagtcccattgactngtttaa

SEQ ID NO: 13679 - DNA, 632 bp, Heterodera glycines
tgattataaaatttaaaaatatacccataaatttttaaaattttcgtttggggggggaggaattcaaaacaagtttccattattggcaaattaagtgaatacaatttgcaaaatttggacgaccattttgcgcatttaacagtacatcagtacggagacaaaaaggacagtgtttaccaggcaacggaagaatttggacaagaaaatgtcgtcatctaaacgtattttcagctccgttgcgatgaatttgtggtccaactttgcaagcagtatccgaagctgaactggaaaatagtgcagggaaagattaacgcagtgatagcggaagtgttcaaagttgtgataaagtgggtggacagattaacaaattgtgcccttaagatacatggaaagggggggggggggggtcgaccgaaatttgcgaagggttcagccatgtaattcgacgaccttttttttgcttttcaaagcctctttttgcggcgcactttttccaaaaaatatttcttgaacagggggccggcggtgtcgataggcgcggccgtggtaaaattttaagaatttttaatgaaattggttaagaaaatagccaaatttttcagaaattttcctcttttcccctcgttacgacc

SEQ ID NO: 13680 - DNA, 1710 bp, Heterodera glycines
  unsure (1)..(1710): unsure at all n locations
cctttgcaaaatgctttttttctttttgtccttttccgtcaacaaaagcagtttgattgtcggcgaccgacgaaatcggtccgccgactgcgcgggggaccgacggacggagggacaaacagcccaaactcagtccaaaacgaaggaggaaccgaaggcggacagaccgacggcggacgacgacgacagacgaactctccttctcccccccccccctccgagtgttttactgctccatttcctcgtcgtcgacaaattgcagcagccgatgggagagggttttgctgtgattagtgaattttgaagatgaaacggagggcgtttatttgaaaaacgcactttgaaaaagatacttttttatgggaaaaacagcacaaaggccatttgtttttgtttgttcctgactcaatttgcccaaatccatcattcatttctctgctttcgcttaggggggggggggggggtaatacaattgtgtaaattattgcaaaatatcaattaaaagcaaagttttacccaaacaaaatattaaatttcgaatattcatttatattttttttaaataggattctttctttgtggagcaatttgtcattcagtaaaatttatttccacacaatgcatccaatgaatcattcattaatttataaattgaaaagggaactaaaataaaactttggtttctttgccatttctttattgttttatcagtgtcattaaaaattccattgccaattaattaatttatttatttgtttatttatttattcgatgccttttgacccttcgctttgcttcagaattctcgagggtattcagcgggaaatgttatcaaataatttggccaattgcatttggtcatcatcatatttggggacgaatgtcaatgtgcaaagtattcaaaagcaaatgaaagccgtgcaattcaaagtcaaatgattcaaatggcatggcattttaacgaaagaatgcaaaaaaagtatttttcatttctttttcttttttttctcaccaattaataaaaatctgtacttacaattagataaacaaaaacattcaagtagaagtgtttttattgctttgtttttgcctttttctgccgtttataaacattttcacaaattcacgtgaattcggcactgaatttggaagattcacgtgaagaaagcatgtctcaccgcttttgcattcatttgtgacctgtgacgggagtgcttttaagcacccgacacaaacgcccccattcattcccacacaaaaatcagcagcgagcgaatcgcccctccccccgccgcccccacggcattattcaacaaatttccaaattcttgacgcaattctcagagcaaaaatggaagcaatggaatgaattattgctccaatgaaaagcagcaaaatgagtaatcattgctaaaaattaatttgcgagagggaattactcactgcacgagaaacattaattaataattattatttgggatggaatttcttgaaaattgtccaaaatttgtacatacactcacataattaaattttaatagatacaacaaaaaatcaaaatgaaaagaaacgcaactccaaaactcccttttgcaaattaaaaaatgataatttttgaaaatgatttatgaaaattttcaaaatttatttttttaaataaaataaatatcaaattgattttgtctgtcgccanaaaatttcaaattaatt

SEQ ID NO: 13681 - DNA, 1073 bp, Heterodera glycines
gcattccattcagaaataggttgagattttttttaaaaatttaccaaaaagcgctatgtcattttttggacaaaatctgtcataaaatgcgctcaattttttaaaattttccccggcgccgcctatctgaatcgccggcctcttcacttttttccatttatgccgaagctctcaaaaatttcttcttcttaaattcagttttaaaatttcacggttttttcgatcaaggtcacggtcaccatttacggggtcaattcacggtcactattcacggtttacgggtttttcagtcacgatgcaccgctaactattattccgcaatagtttttgtaattctattttttaaactttattcggaaatcaatttacaatattacattcgtgtacataaaaagaaatttgttttattttatttttcaaacgtatattttcttcaaaaaaattattacttattaataagattttacaaagttttaaatattagagaaaactttatatattaaacatagttctttttattttataaaattttcagattttagtaaaaaaaatttaaaaaaatcagagccaatttttttactaagtccaatgacacttcactatttctgtcaattaaatttaataatctttttaataattttatccatactgttttgtgacttataaagtttcatttttattaaataaatttttatttattctgttattatttagtttattcgtcaaaaagtataatattgcaaattcatttgtctcattataataaaaatattatttattacgattggtttaaattcaccctttaagcaaccaaataatgagaattttttatgcaccaaaattttgcctcattaaaccaaaaaaccaaatgcaaggatttacaataatttttctgttgaaaagcagaaatagttaaaaatagcatttaattcacaagtcaaattagttgctaaaaaatttcataaacgaaaatagttgctaaaaattcgctctaaatcgaaaagtgattgaagaaaatgtgtttttgcgcttatctcagcatatgaaatccgcaaaaaataggtgaagaccta

SEQ ID NO: 13682 - DNA, 1850 bp, Heterodera glycines
  unsure (1)..(1850): unsure at all n locations
ttctttattcttcttcatcaaaaatgttttgtctgacccttcttgagagttcagcactctctcattttgccttatctctcttcaaatgttatttctcgctaaaagtcatttttaaaaaattgctttaaattttcaaaaaatgatacaaattttaaaaatagcgttgatattacgttgatggcataatgttatgttgatttaattaaatatcaacattgatgttgatatttattattttcctcatgctataaaaattttttcattgtatagcattgattttagaaaattattcctctgctaattaaaacatttttatgtaaaaaaatatttttgacagcaacaacaaaaaaaatttccgcaatttgccacactttgtgctttggcaaaattgataatttccgacagatatatttttacttcctgaccaacgcaaataaagcgtattaatgtttaaaaaaatttgaattaaaaaaaaagaaaaaaatagaatataaattaaaaaataaattgtttcaacaaaaatatttttgcaatttttactaatattatataaaaacaaattaatttttaattaattaaaaaataaaataagttttgatttttttttgttaaatgaaattataaattttaattgaaggaaaattttttttattattataattatatagtaataattttatcatcttgattataatatcttatataaaattatttataacatatattttttaattataaatttacatgattctgtccgtagccacttgcctcacagcaatttgagccttaatttgtttctcaattactttaattatgctttattaaagaacatgtttctgcgcattgccgtgtgattgaagtgaacgatttcagcatggtcagaattgtagtcaaaaagcaattttttttttaattttgccattcttaattaacatactgaacaatatttttcccagggcggcacactttaaaatcgttttattaaaaaatttttggaatttaatttttaaattaaaaaagccaactttaattatcgttccggtaagttttgaatttaattttgtaaagaaagtacaaaatgagtttatgttccaatttttcttgcatttaatgccagcctcactttttattaatttaattcagttctttttagtccattagttttaattatggctcttaaaaatagaatcccaattttgggttatatttcatggatataatgggattactggtttgatagcgttgtccggttccatttccaccagtgtgtcattggcacaccattcttcctcatcggcacccggtgaggccaacgaatttgtgtacgtaaaatggcacgcttaaattttaaatggaattcattaagccttaattgttttttttttaaaataaccaaagcaactgagtgaatcggtcaagctgaaattgacggaataaaggaagaataaaatttaaaaaatggagagttttttatttcaaatttttcatttttggtaaaaagaaatttacgtatttaaatgggtaaagaaagaccaaaaaaatatgtgaaaatttggcctttccttttctttcaaaatgtttgttgagagaaatttaatagtaaaatggagtgaaagatacaaatcttttgaatattatcaaatttattagccgataagtaatttaaaatattcgaatgtccgaaaaatatgcaaaattttcaaaattcgtttcaaaattaaattcttgaaattagttaagtgaccatagaacgttaaaaaaattcaatattaactattttatttatttatttgatattttaaatcttaccgagtcttatgtctaggtgtaatanaaaaatttatgctttt

SEQ ID NO: 13683 - DNA, 1250 bp, Heterodera glycines
agtacagcaagttcatcgagaagtgagcagacttcaaaaattcgaggaaagactgagccctgatcaaaaacatgacaaattgaataaaaatgatcgaaaaacaagcgcgacttccaaaaaggatgagacaaagctaaagattaagccaacatttgagcaaaatcaagatcaaaacgcaacaagaagctcttccaaaactaagcagaaaaaaggaaatgaaaagccgatcaatgatcaaaggcctagcagaaatttagagcaaacaacaagcattgcttcaaatagtgatcaagcgaagtctaagaaagaaattaatctggcaaatcgccaaggctctggtcaaattagtcagaatgcaactgcggcttcaaagagtgatcaaatcaaagataaggggaaaaagccgatttctgaacaaataaaaagctctaatgaaaaaaagagtgaaaaacatgataccactgaacaagaaatgaatgtaaatcgaaaacaaaaacagaaaaaattcattagaaccacatcatttgcatccccgtcaactcgacagatcagcaaaaagacgaaaaattttcagaaaaatgaaaataattatgtgcaaaaacaaataactagcgcaaaaaagcgacgatatgagaatttgaaaatggaaatggaaaatggtagaaatggaagaagcccaaaacggttaaagatggaaaatttaaatgagaaaacggatggacaacaggtaaatgaattttgtgaaaatttatttattttgatggcataacgaattttgcttttgaatattcaaaaagcaaacattaaatgcaattatgtaataagtaaaattaattaggaaatctcatctagacacagattgttgcctaaatactggtctaattataagcgaattcataccagggttaggcgtggacagaaaaacccgcggtcgcggaccgcaggtcgtgtaaaaaaaagtaccacgttcgcgtatcgcacatgcggattcaaattgccgcagtcgcgaatcgaagaaaagaagcgccatgaatcgcggtcgcgtcccacccctgattcatacctttctttacctaatacgaattttaacagagccaaaagataaaacagaaggtaaataggacaagaaaagtgagtatggagcaaatgatagaaaggaaaaaacggatgaggaagaggaagaaagagatggaagagaagaagaaaaaggagcagcaaaaacaatcacaatcatcggaagagcaaattaa

SEQ ID NO: 13684 - DNA, 199 bp, Heterodera glycines
  unsure (1)..(199): unsure at all n locations
agacaagaaggggcgggggggaagnatcggggagacagaaggagggggggggcagaatgagagggggggggagatgggagaggagacccgggggagacaagaggggggcggggggaagatcggggagacaagaaggaggagggggggcagaatgagaggggggggggagatgggagaggagacccgggggagacaagag

SEQ ID NO: 13685 - DNA, 4892 bp, Heterodera glycines
tggagaaattcgaataattttttgactgcaaatttctttccttttttgaattgggttcaaaaaaattttaagagaatttttgattattaatttgaagtcttgaatttatttgacaaatccaagacttaaaactgggagaagcaaggggctgtggctgggggcctaaaatttgggccacattggagaattaattctgatttctgaaaaagtcccagaaataactattttttctttccatacgttcttgtagagctcgagctgctctttccaatggtcttatcccggtctcgatccgtgccgaactcacaaagttatggagtgaaatgtgaaatattgttttcaccacaaggcattttttctgaaaaccggattcaaaaatctggggtttggtataaccgttttagaaatagcgtagaaaacagcttcgatatcaagaaaccaagtcaagtccagaaaggaatattttaaaacgatttcgttttgttttggcattatgataccgaataactttcggaaattatggaaacaaaattggagaaattcgaataattttttgactgcaaatttttttccttttttgaattgggttctgttggataaggaaccacaccgattattgattatattttccctttcactccctctcttattgtctctctcccgccccttgaccagccccataaatatgtctccctttccctcactcggggcattctcccattcattccaccatttcattattttatttatttattccctgctgtcctccatatttatttgtttaataaattatttatttatttatttgacaacatttgttttggtcgaagaccaaacatttttattgttgtagtaaatacacaacaatttggcgcagtcacaaacaaaggacctgctctacatcttcgggtgagaaaaggcatcaaattttgttttaaggaccaaaagccgagacggcaaaacaacccatcaaaaagccgggattggctctgagttttgttaaagccgagtcggccatttttcaaaaagcagtcaaagaaactgctagacaccaaaagccgggtcggcgctccgaattcgtctaaagccgggtcggctcatcaaaattcgtcaaaagccgggtcggctcagcaaaaattcgtcaaaagccgggtggctcgtcaatttcgtcataacgcagtgaaaagaaactgcttattcttctaaagccgggacggctcgacaaaatacaacaaaagccgagtcggctcgacaaattcgacaaaagccggttggctaatcaccaaatttgatggaccccaatcagcttaaactgattttggaggctgttttgaaagcatcagcggaacaaaacaacagttctgctgcattagcgacatcaatcgatgctcgcctttcgacatttgagtatgaccctgagttagggcatacatacgacgtttggctcaagcgctatgggcagaccatcgcccaggatggacaagcactcagcgaccagtcaaaagtccaactattgattggcaaactgggcgaagtcgagtacaagcggtacatcgacagcatcgcaccaaagtcgcagaacgacttcaactgggatgagacgaccgcaaaattgaaacatttgttcggtgaaacccgatcattgtttctccgccgttttgattgcttccaaattcgtcaagacgcgcatcaggacgtgcaaagtttgatcgcattgatcaactcgtcctgcgaaaatgccgatctgtcgctgagcaaagaggagctcaaatgcatgatactgatcattgcattgcgggacgaattcaccgatctgaggcaaaaatgccttcagcgcttggaagacagtcgaacgagcggacggtcaacctcactgcaagagctaggagaagagtgccgaaaataccaaattctaaaggaaagcgcgctctccctcggctcaaatccctgcagcaccagtgccatccgagccaaaccgcagcaaatccgggacaaacagaagtccaaaacgaagccacagcaaagccacaaaggacatttccagccgaataattcaacggcaattaaaaaggaagtgggcctgcctgatcagccctgccattcatgcggaggcaaaaatcattggcaaaaagactgttggttcaaaaattcgacgtgcgaaaagtgcggacgaatcggccatatcgcaaaaagatgcaaaaacggcacagaaacccgacgtgttcgtgccgtggccacaaattctgggaatgacatgcacattcacaccgtttcacttcagccaacatgtatggctattgaaggaagtagtaacaaatggtggagaattgtcaccgaaatcaatgggatggaaaacccaatgaatgtcgacaccgctgcacaaatcacggtgatcacagctgattcgtggcaaaagcttggcaagccaaagctgggcaagaccaccatcgcagtcaaaaactgcaacgaaaaggcattcgcaattaaaggaaaattcaattgccaagtttcgtacaacggacgaacagcgaaactgattgcgtacgtcagcgacgaaatccatcaggatttgctcggcatgccttggatcgaagagttggaaatcattccgaaggaacttatgtttccaaattcttcgcaaatcaccaattcggtgccaatgaagcatcagaaaatgccggcagtcaatttcaaaaattttggtaaatttcaacagaaacaccaaaatatggaacggcaattcaacgacaaatacggcgccaagcccatcactttccaaaatggagagccagttttcatttggaatttgaaaggcaataaggcaaattggttgccggcgacgattatcgagagagttggcaactctccgacttatcgagtcgacgttccgacgctccgttgcgcagtccaccgccttgccaaccaaattcgccgccgtttcccagtggaattggagataccgcaaattggccaagcgaatggaaatgttttgatcgggaaccaaccaaatcgaacaccgattaaggagattaaaaaagccaaatctcccattggccaaagtcaaaatgcgccgcgaagatcaacacgcgccaagacggcacctcagcgattggacatggatccgtcgaagtcgaagtacgatgtcatccggccatgatctcgcgcaggagggactttactcaagaagggaggtgttggataaggaaccacaccgattattgattatattttccctttcactccctctcttattgtctctctcccgccccttgaccagccccataaatatgtctccctttccctcactcggggcattctcccattcattccaccatttcattattttattttattattatttatttcctgctgtcctcctcctcatttatttgtttaataaattatttatttatttattggacaacatttgttttggttaaaaaccaaacatttttattgttgtagcaaatacacaacaatttggcgcagtcagcaaaggacctgctctacatcttcgggtgagaaaaggcatcaaattttgttttcaggacacaaagccgagacggcaaaacaaattcaccgaaaagccgggactggctgtgaattgttttgaagccgagtcggcacattctaaaagcagtcacagaactgctagacatcaaaagccgggttggctctccgaattcgtctaaagccgggacggctcatcaaaattcgtcaaaagccggatcggctcagcaaaaattcgacaaaagccgggttggctcgtcaattccgtcaaaaagcagacaaaagactgcttattcttctaaagccgggtcggctcgccaaaattcaacaaaagccgggtcggctcgacaaattcttcaaaagccggattgtctaaacaatagacgatggacccgacgcagcttaaactaattttggaggctgtcttgaaggcatcagcggaacaaagcaacagttctgctgcattggcaacatcaatcgatgctcgcctttcaacatttgattatgaccctgagttggggcatacattcgacgtttggcttaagcgctatggggaaatcatcgcccaggacggacacgcactcagcgaccagtccaaagtgcagctattgattggcaaattgggcgaagcggagtacaagcggtacaccgacagcatcgcaccaaagtcgcaaaacgacttcaactgggatgagacgaccgcaaaattgaaacaattattcggagaaatccgatcattgtttctccgccgtttcgactgtttccaaattcgtcaagaagcgcaacaggacgttccaagtttgattgcacaaatcaactcgtcctgcgaaaacgcagatctttcgctgagcaaagaggagctcaaatgcatgattctcatcattgcattgcgcgacgaatttaccgatctgaggcaaaaatgccttcagcgcctggaagacagtcgaacgagcggacggtcaacctcactgcaagagctaggagaagagtgccgcaaataccaaattctaaaggaaagcgcgctctccctcggctcaaatccctgcagcaccagtgccatccgagccaaaccgcagcaaatccgggacaaacagaagtccaaaacgaagccacagcaaagccacaaaggacatttccagccgaataattcaacggcaattaaaaaggaagtggacctgcctgatcagccctgccattcatgcggaggcaaaaatcattggcaaaaagactgttggttcaaaaattcgacgtgcgaaaagtgcggacgaatcggccatatcgcaaaaagatgcaaaaacggcacagaaacccgacgtgttcgtgccgtggccacaaattctagaaatgacatgcacattcacaccgtttcacttcagccaaca

SEQ ID NO: 13686 - DNA, 2070 bp, Heterodera glycines
tcagaggaacggaaatgcgcagaacgacgaccagctggatagaggtggactgatggaaaatgatgatacgaaagaatggcatggcaacgaacaaatggcatttggacaacaaatgggtggaggtttgcgacagttcgaaatgtttgaaaatttggagcatgcaagaggaggtcaagagcgggttgcgaataaccgcgcttttggagagcagcggccgttgttgagtcgtccacagctaccgccacaacagagcttcatccatcgccaatacattcaaagtgttcagccgcttccaccgtctttaccgtatgcgaacgaacgcatcacatctgccccgacttatccacagccaaattttgagcagcagcgttatcagccgcaacaaaattcagccaacccaaccaaaattttgatgttttgcatggcctcgaattcctctcgtactggaaaaaatttctgatttgaatggttctgaaggaatcgatgccgttaagcgcttctttaaaaagtttgacgcttatacatctgaatggagtgacaaaaagcgcatcagtgcgctggagacgaaagtgtacggctgtgctgaacgtgcgttcgaggccgcaaaagccactcagccgtttcagtacgcactgattcgccgcgacatgattaaacaacttttaaagcgaaaaaaaatgtaaaatttttgcattaataagcatatttatatatgatatttgcatttaatgcaatatattaaccgtataaactaaaattctatttcatttaaattttttaatatttttgttctgttcttaccaatgaacaaacaaagaataaaaaatatttattgatcgttcggtagacaaatgaaaatataataaaaacgaaatgaataatggaagagacaaaaaggaggggaatggtctccttataaacacaatgaggagggttgggttgctggtggaatcggttgatgatcggcaccaggattatgtttcgaattctctttgaaaacataatttcgacgaagttggttcgaatatgtcttttggttcctgtaattcaaaaggaggactggttcggcgggggaaaacactttttctttggccccatgccgtccatcgaattgttttgccattcttggccgtaattgaagacatttgatagacttctggccatttggagaaggcgtccaccataataaaataaacaaatccatcttggcagggtccagccaaatcgatgtgcacgcgttggaaggccttgtcgatgactgtccatgggccaatggtgccttaatcggacttttctgtgcaccttggtactcatcacattgccgtacaactctctcaaactccgaatccattcctggccaatatacatactggcatgccaaggccttcattcgcacaattcccgggtgcgcaaaatgcaatgcctttaaaattcggccgcgcaattggtttggaatgatcacacgacttttgtacagaaggcacctccattttccaaaaatttcatttcttttcgggtgaaattgtgaaattttgggctcattgcacttcgttggccaaccataaataacaaaattaacaattttctggagtgtcatctttggttgtcgattccgcgatttatcgtgccgtgactggaagatgatcggtttgcgtctgtaatatagtgttaatataagagtccgtttcgacgcaaatgttggcaattaatgcatcttcctcaggctttgggtaattggctattagccttgaaaggacatctgcctgtccaaatgatgatgtattcgtatatttgatatcgaaatcataatttgccatgatcaacgctcaccgttgtaatcggctggcggaataattcggtattccctttttggaaccgaaaatggcaaacaaaggcttgtgatcagtaaataaagtgaattttctcccgatagcatttggttttggatgacgttcaaattttccggggagttgcattcttaggtctcgctgcagggcgcttaagttttgtttcgtaagcggtgttgaaaaagctcgcaatccatatgcgtccaacgcatcgtttccaaaa

SEQ ID NO: 13687 - DNA, 2346 bp, Heterodera glycines
tcgctgatttccgttgttcttacgggcgagatcgtttttccctcaaaactccaaattttcagccctaaatgcgtttccatcgcggtcaacaatgattccctggttgagtgccctcgtccgggttagtggtggcgttcggagaacaggcattttgtttgagctaacgcagaggtactactcaacaaaacaaaaacaaagttaaacggcgatcctcgaaaaacggcccgatttgtcggtgatttgtcgatgtccacacttatcgcaacaatgcgttatttgtgggacgaaaatcgttgaaattcgcagcaatgcgttaaacagcagaaccgcagcaatgcgtttgttctgtatagcaacaaatataaaagaaagaaccacagcaatgcgtttgttctgggcgcttctcaaatcggcttcttctcaatagtccaaaatccacaatgccggcacagcttactcttcgccaggagcgccacgtgctaaataatgctgtttggtcggggctaaatcactgctttccctcaacaatatttccaagacggggacaattcacttttatttaaaatcagcaacaataaaaatggaagaagagtcggaggaaaataaaacaaaataatataaaaagtgcactgccaacagaatgaattgaaggaaagatgggggaacatattctgcttggaagggaatggcaaatatcgataggcaagagagtacaatcacagacaaagagacaaaattatgaagtgacaatataattaaaataaatttaaacgcaaaaaatcaaatactaacacagatatcttatctaaatataagtaatttaaaaaacaaataaaagttaacactgataagaaaagacagaatttttgtattctaccaaggaatgaatacaattggtcaaaatatgcattaaacaatgagaattttattataaaccttaaagaatatatgaataaatttataaacaacatttaaaattaaaaaactcatattaaaggttattaatgattggtatgaataataattaggaaaatttatcaaatatgtcaatttataaaataatcttaattaaattatgaaatggcataaccttgaaacttaattataaataattttcttataaatcaaaaaatagcgaaaattaactaaatttaaaacgtaaaaaaaagacaagaaatggtagaacatcatataaaattagaaccaacaatatatattcctatgagttctagagatgtacacactaataatgatgcattattataaatttctaattcaattgtaatgagtaattcaaaaatagaaataaatatattaataaaagatataagatctgaagtttttcatactttttctaaaagaaaacagacaatatctgtcataaaaagacattatataagaaaaactatatccaaaatactgaaaaataacttttttagtattgaaaaattaaaaaaagaaaacaataattttactttttgtaccaaacatattgaaaatagaagaaaagttatgacaattattaaataaatttggttgctttttcacaataaataactgagaagcgttaataaaaataatacaatagaagtaattgaatctgaagaaaaaacaaaaactaataataatgataaaaaaaagatacaaattatcttaaaaaaacaatataacaaataatattaaagatatatctatctgttgataaaatattcatcggtgttttttcatatttaaataatgacaaagaggaacatattaaaaatttaaataattatcgttataatttgtcataaaaatgattgaatatataaaaaataaaaataataaaacaaaaagattatctaatgcttgtatcactactatcttttgtgacagttttaataacttttttgggatatgaaatgatattagaatgttaaaaaaaaagatatttttggaaatagattttgagcattaaaagttgtagtatttttaatggtcgttgtacctagcaacatgctaaatcgcattttaaataaaataaaaattattttaaagcgaatttatttggaagtctcaccgctctctatgttttttaatatttttagcccaatcggttatctttagtttcttaaatttattgtcttataaaatttggtttgtgttggacttagtttttgaatttagtttatttggtggcgttggtccagcaaattcagtgcttgtttttgagtgatttggattcgttctatttttactctatcgaatatcaagaattccaaatttgattgttttaaatatttttttttgtcaaaaatctttatttgaagtttttgagttacgcacttacgacctcttaacaaatag

SEQ ID NO: 13688 - DNA, 4683 bp, Heterodera glycines
cataatgccacaatgaacataggattgaactcgcgactatagtcttatttggaaaatcccttttttccagaatttacgaaatattggttcattttggggttgtctgaacacatggtctggtaaatttatgtatctgatcatttttactgaaattttccagaaatttttgacatttgttagtcatttttaatgggatgttcttgtgggccaagaaagcttcttgcctcttcataatttaaatttaaaaaaatattttaccattttattttgaataattttcatcaaaattcacaaaatgaaagacgaacaaacattacgaagcattttcggaaactgcaaatttcttcacttttcaccgcacaatcgctccccttcatttatttattcacttccaccaacgcatgctgaaaaattgaataaatcataaagaaaattatttttaattattttaaataaatttctaccattaatgtggttggttggaaaagcatctcaatctgcgggaaaaatttaaattaaaaaattattattgtaaatcaattaaaatttaaaaaaatttaactttttcttaaaggaaacactgtgttttatcttagaataaacaaacaatcatttttttaatatcttttaatattttgagaatttcaaaaaatttatttccaaaatttcgaaatttaagccggcgcacagaaaaacccaaaaattttttcaacctggtctacttctatacaacgtccaccatatcgatttttcagaatcttaaattaaaaataaatttaagcaaataaataaatttccaatttttaattacataaagaaattttctgaatcgtcttcgatcatcaaagtcacggcgtcgctggatgaccaacacattgtcggcctaaaaataatagaaaaattatagcatggatttaaaaattaattaaaaattgtcaaaataattaaataatatttatgaaaaatgcaaaaaaaaaaattaagaaattatatatgataaaaaaaatatattatttattattttaataatcaaaagcatgcttcttgtgctatttttgctgaagctccgccaatgtgttggagctcatagtagccttgctaaaatttatttttatttccaaaaaaataattttcggaattcaacctcattaggttccctcacagggtgaactaccttaaaaggaaacattttttgataatatttaaatatgttttttgaccaatgttatgtgaagttcctgattgtttgccaatcgccgtaacatgctcacaaatctgtccttaaaattaaaattcttaaaaaaaaatttacgacaatttttgtaagtttggcataggtatatatttttttattttgcaattaaatagtttgaattattgccaaaatttgtcgattttttgtgataattttacagtgccaatttttaggcgttttttcatgaatttgaatgattttaattaattagtcggcttttttaaattttatgaagaaattgccagcgaatttattccaattttggcattttttggcacacctgttgatggattcgttcactggcactcattgtgtcaatgctaactgttgccaaatcgacgagcgattgctaatcaaacagaaaacaattgatgtgattataaattttgtagtgccgccttaccaaattgtcgatcaccaaatgctttaaaaacaaaatttacaaaatacatcatccaatctttttttttattgaaaaatcatttttacttgtatgccgcttgtgatcacttggtctcgaattgcctaaaaacgggtgatatgattgaaaaattattgtgatcagcaggggttttttgggatccgtgatgatgagcattttgcgaaaattataaactttggtgtgttgaaaaaatttttgataaatttttgaaactttttaatttttgagatgaatttaaaaaaaatttggattggtccttagaggtaggtgcattttgctttttttttttatgacatttatgttttatttttcgaaaaatgccgaatattttgcaacaaaaaaaaaactgcgggtaactaactatgttatgaaaaataattttaaatgaaaaccataacataaagccaagttcaaaacagctattagtatatgcacaaaattcgtaatatttttacagcattttttatttttcatagaaaaattaagaattggcacattttttaccccaaaatgtcccaataaatcaaattataaatcagctaataatgttctttaaaaatctcacatcagagatctccttcaacgttttgtcccggaattcgtccgacttcatgatcaacaggtcaccctgagtccgttcaaacttgtccaaccacatttcaaccgatgaatggtcttggcgttgaagaggcgccctaaaacaaaaaacattcggtttaaagacatgctttatccattcaaatccctccaattttctttaaaaaaaatcattttttgaaaataaatttttggtggaccagaatgccaaaaatccgtaggatttaaacattaatcattttacgcatactttgatcgggcggaaaagaatgcatgtgagcgtgcccgagcctggcttcgcacatgtgatggcctattttgggacgggatttgaatggatttttgcataagcataaaacaaataaacaaacaaacaaaaaaaaatttaaatatcaaaaagggaactagcaatacggtagatcaattgtaccgtatgaacgtcaaaaaaaatttgacgtaattagtgtaaataattttttatagactcaggatttacttttttacataaaaaaaactatcattaaagacataatttacccggcaaattggatgatcatccacttgagaatctggggacaaatagtgagtggtactgtaatgaatgcatgttacagtaataatagtatactttatcttccggcatttcgaagttgcaaaacagcgtgcgtatctgtgatgtggcatttaaattttatggtctcatacgtaatgaatgactttcatttaactgtgccactggttgacttttgaatacagtagacgagatttacgatacgatactgactgcctacacaggttctcctactctcatacaataatacttattattctaccgtatcctgctttcagaaagtaaaggtatttcttgtggtaacgtcaccatggcttactgtttctcttattgtctcataagctattaattcttatcataataccgtaccccctgactgtacaaatccatagagtactcgcacagaaaggttgtcttcccgtaatgaccaccactgatcacggtgatttcaccaggccgaaagccgcgcaaataattgttcagcagtgtgtagcgtcgccattgcgcaatgccgccaagtcggcttttgctctacaagcagtaaacaaaagaaaattgaaaaattttgcattttaaacaatttcgaaaaattttatcatttctccaccgaatttcttttttaattagtcttacaaaatcaaaaaatgcaatttttgttgaaaaaatttaaaaagtagagtactaaatccctcaggactcaattttcattatcccattctcatgccacaaaattatttgttagtttgtaagaaaacttttaaacacctgcacaatttcactgcgaaccgcgtctctgagatcgccaacggaacggaagcctttgtatcgaacgcgaaccgcgtcttattgagggaggagtaataataaactttttatatataaaaataacataaaaaattgtaaatataaaattgtcataaaaaaaaatcctcaccttgaatattgtgaagtacctcttttgcacgaccatcgcgcaaaagctcaaccggtctcagaggagcacggaaaatgaaaattaatgaattaatgatcaactttcacgctattagaaaaacatttaacaattattatcaataattaaatttcatttttattttaattgaaattttaatccaataattttgcttttgaaatgttaaaaaataaattattattttttggtatgaagaaaataaatctgataaacattgcttacgtgatgatgtagcagcgggttgcattcatgtaggaagcatagcttaacaacagaataacataaaatttaattatcaatgaaaatttaaattttactccttggcaaaacgttcatgaatgctgggaaacctagaaaaaaaaaataataattttcaattttagtttttcctaattagcctactaattaccaaagatagacgaggtcaaagtcctccaaatatgacaacaccgactgatcaaatcgttcacccttcggcagggataaagcggggattccgttgcttgcatcgtacacagcctttaaccattaatgaaggaaatcattttaatttatcaaaaatttgtaataaaaattatattaaaaaaaaaatttcaaatagattaatccaaataatttttattataaattaatataaagaatagtaaaaaaaacatttttgtctgcaatttcaaatataaaaaatgttaaattatttttttattaatatttaattacccaattaattaactttttttttaaatacgatttaagaatgaattattcaatcgaaattacatgtaccagtgcatcccgctcgtttgtatgaacaccacacgattgtcaaattgggtgagcatatgtaa

SEQ ID NO: 13689 - DNA, 4128 bp, Heterodera glycines
ttctaaaaatttgaattttcgaactttttttccaattcaggtccgggattcgaaattggtcgaaatagatgccgggttcgtgatcagcgacaccgaaaaccataggaaacatgctttcatgtcttttgtaaagtgcattagtaccggaatttcttcggtaaaatacatggtttttaaaatttttagcaacaaattacacttcctttcctttttattcttttcaaaatcaaataatggccgacgaaagtgccacgaatgcaggaggagccggcgccgctggtggtgctcagcccgccgagtacatcaaactgaaggtggttgaccaggtctgtttttgcattatgtgatggcgcgacttcaccgtcttaattgtacatttttaggactcaaacgcggagcggactggcgtacaggtattaacaaatttgggattgggtgttgggttttttgactgacaaaatcttgtattgaaggggcaatttgttgtggacgagtttatttttttggttgtaaacacaaacgccattcttttcaccccatttcaggtgacttctctgcgctttttgtttgatggccgctccgtcaaagacgaccacactcccagatcactggaaatagaggacgacaacatcatcgaagtgtgtggggtgatgggttggaaaacattcccggggggtggggtttcggggtcatatacacgactgaattttttcctattttcaacgatcagcggatagtttttttgcactttaaagtagcattattgtattttaggtgtatcaaggacagatcgtaggctccattttggatgattgaagaagattttgttcctcgtgtttctttttttgaccgatcattatatgatctgataattgcccctcacatttatttgttgcttctttcgtttgataatttaatttttgttttggaaaaaatggaaaatcttcaaaatttcattattttttcccaacgaggaataataatatgtagagatatcttatctctatatatttttttcgtcataaattaaactgaattttcgtaaatagtctaaaaattaaattttaagatttaaaaaagagaacgaaatattgagaatttttatgcgcattggcaagtttttctctatgagaaaatttaaatttctgtcagaaatgcaacatagaaaatagaaaaaaagaaaaacttaaagaaaaacttttctcattgaattaaatattttctgcggttcaacaattattttttattgtttttctatgcaagcaataagtgcaagcagttcggtaacgacacatggatatattaatacaaaaaaaccttttccgaaaaaagcgaagaagaaaataattaatattgatatatcaaaaattgggaacttttctggtaaaatatttttacttaattaataaattttataataaattacactcaaatagacataaatcggaaaaatgcaaaaagaaattaatcagcccaaacaacgataaagggaaattgtgaaaaggatttattacagacatcaaaatcgagtatgaatattcagcaattatataataaaaataattaaataatttttcataattcgcttaaaataaagtaactttaaaaaaataaatttttcaatatttttatcaaaaattgccttatttcaatcctaaatttaccaaaaataaaaagctaaatatctcattaaaataataaaaaaagagttcattaaaatgaatttaataataaaaataataaaaaatatgaatataaaaaattgttataaattgcaataaaaaattgtagcaaaactttgttcttaccatctaaattaatgtctttaataaaagtctattctttttacaagataaacatcaaataaaaatacaaatgatttatcaaatattaataaaattaagcataaaaaatcggcgaaattaacaaaaaatgacttacaaaactattaatttctaattaaacttaattataaaataaagctatttaaaaaataagaacgtcagagtgatcagtctcgtgcgcaagaaaaataaataattttccattttatttatttgatgttttttaattaatataatttactatcctaattataaacttagaaaatagatacttaaaacatatttaaatcaaatcaaggcctgaatgatatacagattgattattgcattgatcgtttaattttactaaattttagctaagttcggacttattattcagcaaaaaatttaacaattaaatttaaatattgttatcattgatatttttaaatgtctcagcacgtgaaaaaatggcggaaaaacaagcattagaaacccattaaaggtggggaattttttttctaattttcacaattaaacgcacccaaaaatttgagtatgaaacattaaatttaaaatttgattcttaagctcgtatttcctcagatttagtttcttattttaaaaaatacttaaataagtgcgagagaatgaaaacttttaactgttttctattcaacaaaataaactaaccatgaaacagcgcgtagaacgaatattaataaaatgcaaccattacggtgaacgaatgggcgttagcggaaattcacttattaatgaagaaactggaaaaccatacccgcgtagcaatgtgtccatgatcataaagtatataatagacaaacgagcaggtaatgctaccaaaattccaccaagatcaaagcagttggaggagaagcttaaattggatccaattttgtactcatggacagctccattaaagaaaccgcagccacaaacaaaaccgaagccgccgacctacaagaagccattccgtcagaaaggtggagctgatcaataaaacacttgatcagttatacaatgacccttcttcacctgcagcatttgctggtgtcagtagattactagaagaggcaaagaaaagaataagtgatatacaccggtcagatgttgtgaattatttggaagggcaccgcacatatacactgctgcgcccaagacgagttcatttcccgaggtcaaaaccgtggccgcaggttttatgactgatgttcaagttgatttggccgatttacaatcactttcacgtcacaacaaaggctatcgctatctgcttgtagctgttgatgtgctctccaagcgattatttgtggtgccgttgcgcagcaagcgtgcagatgagatgctgctagcattcaaacaactggttgaacaaatgccaatgacacctcatcgtgtgttcacagataagggtacagagtttcgtaaccgaatgctcaaggagttctttgaagaacatgatattgcaaaacacgaacccgtccattctgctgtgaaggcatcggtagctgaaagagccataagaaacgtgaaacaacgttttgaatagcaaaacaattctgctcagctacttagtgaaaagagaatggattgaagaacacggctgttcaaatataggtaaaatattttttggtgcgtttttgttaattaaaccaaatttaaatttagtcgtgtcgctatggaccaccagtgctgctcgtctttatctattgaaactgatgccggatctgatctactgtacacggacactgacagcataattcacatacatgacgaagctgcaaaccactttcacttggaccacatttgggcgatttgaccgacgaatacccggaccacgaaattttggagttcacttgtggcggagcggtaagttttttagcttagctttacaatttcttgatatataagataaatttagaaacagtacggactgaagcttcgacgcaaggccacaggaaaaattgagcatgtgttgaagctaaggggaataacgctgaattatgatgtgaccgtcaatcagaatttacagtacacagcattccgtgaacgtgtgttgcagtatgccgagaaccgtgatgtggagcctatttcagtattcaatccatgtgctataagaccgaatatcaagaagggtgaagttacgttgataccaaccactaaaatttacagaccatatgtggggaagggaattgtcgggcccgactatcgcatacttgattttggatataccccattcacatcattcccaattgaaattttaatcatttttgttcgttttatt

SEQ ID NO: 13690 - DNA, 3616 bp, Heterodera glycines
aaaatattttaaagtgcgcaaaaaaaaacattattcaaaatctgaaggaaagtaactaaagaattaaagaaaattgtattttagctttatgatttacgttattttaaattatatattaatgtttgaatatcattaaattttataaatttttacctaaacaataatggttaaaatcactttgccacgaaataaaaacaaaaattttaattaaaaaattgattgttttaatacgaaaaattttaaaaaaagataaatttatatttatttttatttacattaatatttaattgttctaagatactattatattatctgaaaataaataataattgaaattaatgaataattttagaaaaacaaattgaaaagatggctaaatttattttattcatttaaaagaaagggtcaatgcgtagtttacataattcacaaaataattaataagaaattttttaacttaataattaagaagaaaactaaaaataattaatggatagtgtttaaaatttagatgaataacgtttatgtgtctaataacttttacatttaggtttatgtgtcggttttttagtagttgggaatgaatagtgtgtctcctttaatgtttagtatcataaatgtgtctcacaaatagtccatccatttccctctacaatacactgccgaggcaggagctaacgaaaacgttttaggaagtttttcgaggacatcgtggactgtacgatttcaacattggcatgttctacgaccagcacgagcatcagcttcacccatcatttctgccgaaagtggctttggaatacgtcaacaattgccctcaagacttccttctctcgactctcctcagcgagcatttccaaaaccataaaattgttgtcattgatgtcaacagttttgggcccgacgcttcatgtcgttctgaaaccgaggcctttctggcacgtcggattgtcaacaagctatctgcagccggtgtggaaatgacagacattgctgttattacaccatacaaaagtactaatttatcattagacgaattgtatattaaaatatgtccctaatcaactgaaatacatgattatctttttttagcccagctattggaacttttcaaagtttttgtggttaaacatctgccgcatcggctgatttcttgtgcccatacacttcaaatcctgaactcattgttccctttgatcgtcgtgcatattcagaccttttggttggtactgtcgatgcggcacaggggaaggaattcgactacgtgatagtatctggtaagacaattttgtgacttattaaggcacattccatttataaacaaatttaaagagacatatattttttaaatctagtcacaagcgattattaaaaattttgatcctaaattttttacttaattatgtgtctcattaaatgctgagccacattaatgtgtccattaatgtgagccacattaatgtgtccattaaagtgagccactttaatgtgtccactaacatgatcaaaatcatttgaataccaattaaagttggccgcaataacacctctacgcttggttttctggccgattcatatcatccgacacttcgaatgtggaagaatggtcgcgttaatgtgatgttttcgcgtcaccgaaaagcactgattgttttgtgtgacgcatcgtcattcctcgcggttagtctgcatgcttttaaaaggaaattattaatcacgagcccgagtcacaagccctagcattcaattggaaccgcttgttagacacatatatgttaaatatacattaaaggacacattattcattctcagcatttcggggcagcattaggaaaaaggatagtgtgtctccttatatgattattatcataaatgtgtctcacaaatcctgagtaacaaatgtcgttgcggtttagaattacaatgaaaatgtgtctcataatttgttccatgaattcttgaaagattgttggaatcattatgtttagaatcctctgctgacgataaatactgctcctgaaggaactgaggccgttgcattcgagtccggcatcgaagctggtcgctttatgccctacaccaaacaaagcttcatggttttcttgaaagaagcaagacgtgaagggctcattttcgatgccaaggaccttgagctctaagactgagctgaatatcactaatgtatatatacgttcccaaaaaattaaatcccacccccactcatatttttctcttttttatgtataagacacaatagtgtcttttttaaactcacccactcatatatgtttctcttttttatgcacaagacacatttatgtcctttttattttaacggcttaaatgacatttattcaagaaacacatcagtttatttcatcacaaaaacaaaaaacacttgatcagaaggaatattttagaatggccgatccaattacctattggggacccatccccgacccgccgtagagcttatgcatggttgcatcaaaatcaatgtcatcttccaattgcctaagaaaaagataacttgaatacaaacgcagcattttgctaatggagtcttgataacgattagcgcaaactttccttaatgaaatacgcgttatttgtataaatttgcttatataaaccgcaccaggaatgattagataattcggaggaaggagcaaaagatttctctaacatcttcaggtctatatcttgtaccttaaacatttaatagagtgtttttttgaatttgccatctcattatctcgcataattaactgattgggatgccactattgctcggattttatgcagtgtgaatgggatagggtttacatctcggaaacgaccaaagaaagttcgcaatgcctcgttcaaatgctttcgagaaattccccttaacgggttctgaggcatacgaaagaggtagtcatgttctgtaatttgaggagccgagacggcagacaacttctgttggtgttgctcaacataaatgcgcaggcgtttagttagcttgtaaagacgattgctccatccaatccatgcgtcagtcgaatcagtctttgagtccaacaagggacacatcctgacagtgttctcgccagttccaacaactttagccaccttgaactcattatagcgcaacttgtacgctatctcacttctttggccgttatccacgattagatggtagataacatagctaaaaatgtgttatgtgtgtggtggtacccatgcagacacactactgtgtcctatctgactacttggaacacttattgaatgagacacatttatgtgtgtggtggtacccatgcagacacactactgtgtcctatctgactacttggaacacttattgaatgggacacatttatgtgtgtggtggtacccgtgcagacacactactgtgtcctatctgactacttggaacacttattgaatgggacacatttatgtgtgtggtggtacccgtgcatgtgaatgcaaatggccctattgcctgatcacacaaaattcacaaatgaaatggtgaaaaatgggccaaattgggagaacatgaagttggagtagtacaacggggaaattgagcgagggcaattgagacaggacaattgagcgcatg

SEQ ID NO: 13691 - DNA, 1813 bp, Heterodera glycines
  unsure (1)..(1813): unsure at all n locations
agaattaagtacgcaaaaacatcaatttcatttttaaaatttaattccaaatgatttttnaaaaaataatttcgaaaaataatgcgctaatggaagcgtatttccattccttttataaaatgtaattttattgggcgcggaaaaaatgatgattgattgggatgcaaagaattgtatgtatcgcgcgcgcgcaacgattgacggattgggatgttccgtgatgggctgctggcgggcgaagaagcactgcaaattagccataaattatcgccaaaaattagctggattaaagaattgggcaaaagcatttgacgctaattgagtatgaaattgatcccactccgctaaattcctttgtgtggtgagcacaattttgtggaatggggaaaaagcattccaaaggaaagctcaatcggggaaaaatgaaaggaatttaaatattaagaattactttgaataaattacttttttagaaatttaaaaaaatttttttacatttttaataaaacattataaataaaatgctaaattccattgaatattttaactgattgtgtgaactcaaggtcagaaaacgttgaaaagaaaattttttagctgattgtgaatgcaatgtacagaaagaaagtgatgtgatttaaaatatttgacattttcgtgatcaaatactaattggtattatttgttgtttaaaaaaaattcacaaatttaagaactaaggtaaccaagcgtgataatctcgaaaatctaaaaaaatgtgtaccggaccaaatgaggataaaatggaagggtttttttcctttttttaattacaacatttactacaataaaaataattgcaaaatggcattaaaagtggcaaaatttttcatcctaagcccaaccaactgataactgtgaatgatctcaccaacaacaacagatgatcaaattgagatttatgctcatgcatttttattccattcagacattcgcgcaccattctcctcaaaacaattctatccctcgtgtttattttggaactaataaacgaacgccgccaaaattgattgccatcataatccttgtcaatttttttttgttggcactttttttgggacaaccccaaaaaatgctgttaatacatgcataatgcgatgatggtgtggcggctgctgctattagcgtgctaatgacgacgggtttgttttggctggcggccgccgtgtttagccgtcgggtttagcccttcccctccattccttggctatatgttaagtaattatccgggctttggaatggacagccccaaaaaaggggggttttgagctgctggagggggcgacaaagcattggacgtgataacggactaaacaagctttatgtgtgttggctgctgggtgagggcggtcgtgtaatgaggaagagatttttgttaatttggacagcaagatgatggacattacgccagagttttttttttaaataatgtgtggcgccaacaatttgctctgctgctgaacaatgaatgagtagtgaacaatgtattagagttcggattttaaacagaatgtcggtggaattttgaacaagcagaaaattttgaaaaataaatagacttttacggaaaattttcaattttggatttttaagacaaatttttacgtatcaacagatttaaaataaaataatgagtaaaattcaattttggtatgcaatttttcggacaaattctgttatccactttcatggatatttccatttttacaaaatctattaaaaaactgcactcaaattttaagactttcaccggcggcgcttatcggcaccgccg

SEQ ID NO: 13692 - DNA, 828 bp, Heterodera glycines
aagctctattagcctttcaaaaagcaaacaaaaactttagcttctacaaaacttattaagaaaaacactcaaaaatttcgacttttttggaatttcatgttataacttttttggtaattgtctaatcgtgaagcaatagcttagaaatatcttctaaacatgttaagctttcgattgataccaagattgctggatttggttaacaacaaaaaaagttataacccaaaaacttgggctggcgccaaaacgtcggccccaaaaacgaaaaattgcgacgtatgcgggagtttattgattttttgaaaatttttcaaagacagaatgccaaatatttttgaataaattaaataataaatttaattaaagttaactaatttttcatcgcaaatttcattaaaatttctgaaattttcccggcggcgcctatcgtcaccgccggatggactccaccttgttctcttttaaaaaattcggcaaaggtgtagaagaattatggtcccaacggaaaataacttaaaaattttatttttgtttttctgggatgaaaaaatgtgctgattactagggctactaattttatgtaagaaaatttgcgaattatgtaaataaaatatgaataaaaaatgctaaaatatgtatgaaatatgtacaaaaatcctcaaatatgtaggaaaatatgtaaataaaagtcccaacttttgttcgcaaacacaaaaaagaaagtgtttttcctactatttagagcatggagaaaccaggaaaaaaatatgtatttacataaaattagcagacggacagattacgaatctgaactcagattttgtaaaa

SEQ ID NO: 13693 - DNA, 1673 bp, Heterodera glycines
tttcagggctataaaatcatttcgttattagtaaggctaatagagcatttgaggagcttttgaatgatagcaacaatgttggatatggatagcaaagaaaaaagttatagcgaaaaacataaaaatttttgaaaatctgagtacagataacatataagtaccgattccggctctttatacatactaaaaataccaaaaatttgccacattttttttccagttttgtccgctcgttgaccatggacaagtggaaggacgcggagttggcgcgcatgcgggcgggcggcaacgcgcatgcgcgcgagtttttcgagtcacagcccgacttccgcccgcactggaccatccaggagaagtacaactcgcgcgccgccgcactgttacgcgacaaagtctgtcttctgtccaattttttttaccattacatataaaatggccgagttgcatcaacaaattttttgtaaaaaatgaaatttatatcaaacagattttcacaaaaattgcgaattgtgtgtatttttttttggaaaatttagcgaaatttctcagaaaatttgtgtgatgataagctgtttgggtaggttaccaataatgaaaatggaaaattttcttcgacttatcttaaactgattgtgagctaattcaaaatggaaattaaaattgctgaattacaattacattttacgaaatttttatttttcctttttttggaaaaaattgaaatttataacatttttaaaaaaagattttcaaaaattgctaattttatgtatttttttttgaacatttagcgaaaaatttcagaaaattaagaaaatggaaattttcttcgactaaacataaactaagctaatccaaaatggaaatatgagaattaaaattgctgaattattacgaaatttttcattaaaaatattggttttgttacccgacttttttcacaggttgccaccgaagctgatggacgcgtgtggtcatatgacacatcgctggcccgcaattaccagccaaccctgttgagcaagtgagggacaatgaaattaagggggatttttaaatttaaagtatttctcgaggatgagacatatcagaatagggttaccgaatggtaccgaatttggcagaaatcgtatcgtgttattttttggtattataaagtgccacttttcccgcatttcgccaataattttgtgaaaaaaaacgagaaaaaaaaactttattttgggttgaatgctaaaaaatatttcgtttttttgtatttctatgtccataagttgacttattacagcacagcagcaaggggtggtgggatgaagaagaacgccagcgcgggaagcattggcgccggaggtcggcccagcggtgggacaatggacgaattttttgacggtttccaagcggccggggcgcagaggtagcctaattttcttaaattgtaatttcatatgattggttagcgggtggctttataaatttggcttcatccaagatcccttgaccaaaaaatgcgaaaaataaattttcaaatattttttttttcagaattttagtgctgcctggttttttgggtttcggccatataaacgctgtctgattttactccctttaaattcctttttttcagtggcactggcaacaatgcatcgtcctcctcccgctacaccggttttggc

SEQ ID NO: 13694 - DNA, 3972 bp, Heterodera glycines
aaattttcaagaaccaattaattatcaaaaattttacttctgaaccttaaacattatgataacagtgaaatgagatgccaatttttggccggtctgaacccaaaaaaaaaaatgccaaaaaggtttttcactttctgtgccttcctgttctctctgtccatggcaaacacctatctgttttctcctttactttcaggctgttacccctgaccaactttttcttctgttcggtatgtgtatcacaacaatcactgtcagcaactttgaaaaccgaaataaaaaacaatcgcttcaataaataaaaaaaattatttcgaaaataaatttttttttacggtatttcttcgccatttcaggcgtctatggtgatgtgatcagagttaaaattctgtttaacaagaagaacaatgcactgattcaatattctgatgtgcagcaagcacaattgggttattattatttttgtttaattaaataacctttattaatatcccgttattaattaattagtcaatttaattaagtcagtttatatatattttttaccaaaattaagcgattcaacatttggacaaagtcaaatggaatggcaaaaatatgcgtgtgactgcttcaaagcacattgttgtccaaatgccgaaagagggtaagatgatgggaaaaattcataaatgggaggactttttagggccctaagattttgcctgttttcccagtttccgccctggcgttttacccggaattccattttccaagagatttttgatcactaggtttctggttttcaaaaaaaaactgtgctgttttacctccatcccgttttgatcacctgcatccctggcactgttctttaacaattttgttaatttggtttgagtttttcgaatttgaccgaatttcttgatggcataaatttcaaatttgggccaaccaaacggggactgaccggtgctaaactggaagccaaacaatccgtgaatattgcttataaaaaatttgccaacaaattttaaggccagcctgacgccggactcacaaaggaattcacgaattcatcgctgcatcgtttcaaaaagcctggcagcaaaaactacatggtccttaatgccttgggcatattaaaattcggattttcaaattatagaatatttatccgccaagttcgactttgcacttgtcaaatattccaaacggagtcagtgaggaagcaatgcttgaaattttcaaggatttcaaagttgtcgaattcaaatttttccagtatgttttttgaatattattttctgtatttttattaaataattttgcttaatttagaaaagatcacaaaatggcacttcttcagcttgaagacgtggagaatgcaattgattttctggtcacaatgcatgtaataatcgaattttatttttaaactaattatctatttttgaatttaagaattacaaattagccgagagcgctcatttgcgtgtttcattctccaagaaaggcatcaacggctaagctgcaaatttaatttatcatttttatatattttattttattttttaatttcattaattcaccacaccacacgtggggatgcaagttcctaatgagctttatcatttttatgagaattattttttgtcttcattgttgggaccggacataaacaagtccaataattggtctaacaacatttggacaccgaaatttttaaaccaattagtcatttttatcttttgggatttcacatgatttaatacattccaatacatcgtctagtctcttattatatattttttctctctactgtataaggcatattatttcatattaaaactgcacaaatatttgtagtatttcaggttcgattctggacctggatccaggcctggattttttctgagtccaggtcttttctggggtccggattttccggggcttttgtccaggaaatccaggtcaagatcaatttggaaatccaggcccaggtttttgcaaaatgtcgaactctatttgcattattatgcgttagaaaaatctttttctttgtataatttcttgttattttaatcggattatttcaataatttattcaacttttcaaaatattccggttttccccggttttatttattttgtttatttgtatgattttcattccaggaagacacatatccagatattttattgtgtgtaaaattaaaagttcacaaaacagcagccatctaattcataatgctaaaattaaatttaaaaaaacaggaattttagggatttttgaggaattaaatatttttctagtttttcaaaagctaaaaatttctcaaatcaatccctaaaatttctaatatcctatagccttttgaattggatggaattaaacaacaagttaatcctctcttatgcatttaatatttgttctaaattctaatatatattcatcattttttaatttacccatttttcaaaaattttcatgttgttttttcccattttattttctcactcaaaatatgtagtgttcaaatgtgttgcaaaacgaacaaatgatgtttatgttgacaaatataatgttttaagcatggttaaatgaatgattatgattaattaatagggaaagggtatttattttgtcgattatgaatttttcaaaaaatcccatccccattaattgagtttattagctcatgccattttaattggtaacaatgtgattgatcgatcattcgagcaccattaatgatgtatggaaaccatcgtggtaataaaaaaaaaaacaatgttaaaagatgaaatcggacattgctctgttacagatcaaattctgttttgaaatgaacattttggtttgatctggtcatttttttaagcatatgagatgagaaggcaaaaaatttttacaaataatttcaaataattaaattgtccggcttcatcttttaaaatcaaaaaaaaaatgtttataaaaacataaattagacaagtaaattcggcagaagaggttgaaatgtgtttttaaaacaaaagatacttttcttatatggtaataatgcaaaaaaaaaataggaaaaatcctagtaattttgtgtagaaaattaaattaaaaaaaaaaattcaaatacgaatcgaaaatgtaaaagaggtcgtgagatttcgaattacagttaggtttgatgaccaaagatgttgttccattgttgaaatccttcctaagctttctcgcccataagcggcttttgctcggaagcaaccttatgaagaattatgggttaattaaattcttataacagtaaaaaaaacatttagcgttcaacaaaataaaatttatcgcggcaaaaacctggtaaatctaccgttaacaagtcgatttttggaaaaactaaagccagaaactacggtaatttccggtttttaccgttaccgctaccggagaaaatcgaatttgccgaatgttagaatattttccaacttactcttgtctcagtcagttcgacatggtcaatgtggctggtaacctttaaaagattttggaaataattttttttaggttttttttccaaaaaattacataccctcgttgtaaagtcatagtcttcgggtacttcgaaaaagtccgcatcacaatacaccttaaagccatttaaaatataattttgaaacttttgaaaatgtagacagaaaaaaacggtggaaaaattttttgcataattctcacctccttttctcggatatgagtaagcaatttgattttcaggatgagacctaaacaattagtaaataattttttttttttcattaaaaagcgcacatcaattaaaattatttatttattcaccggtgatggcgccaacaacggtggcgaatgccgaagtgatgcccaaccccgccggctggtacaatgcctgttcaaacttgtaacgtccggacggcacaattcgggaacgataacgtataaaaaaaaatttccaatccaatctttgg

SEQ ID NO: 13695 - DNA, 1534 bp, Heterodera glycines
ttcttgcgacatttgagccaacactgtgctaaaccctccaccctggcattttctctttgaagctatgtcgatgaccttctttaaatgacaattaatattcaaaattcactaaattgtgtgtcatttaccagaatgccatcggaggtccaagaaaaaaaggacaaaaatggcactatttaaaaccaaaacttttggattttggaaaaggggtgttcgaacagaggccgcgagtgtttttttattttaaaaaacctgacctgaatatatcttttttttgcacgtttaatgaaaaaacattcccaaactaataaaaggactaaaatgttaatgctgcttctctttaatcatctgcacagatacactactgtatactgtggatgttcttactgtatctttttgactgtaactttcgtatggagtctctaattctccggctaattttctgatgagtcgcacaaaaaagaagagcattttgagttttttgtcgccgtttgtgtccattactccaataaatttgacattttcgtctcttccaccaacttccattattctgaataaacatttagcattcattactttaaacactttatgcccatttggccactcacttaaatatttcagaaccgagaaatgtttgtgactcggaattaattgcggtgatcgttttggcaccaaagttccatgtcgtttgcagctgctctttgtccaaaaccagcagcgcttgagcagtaccgatttggcgaagtgccaattcaaattggggccatttgcccccattcatttgctgctcaatcggctccactgcgatgcccaacatggcgaaactgaccgtaacaatttgccagatttcgttcacttgaaaaacaaataaaacttttaaatcagttttttccatttttacgaaaagcttttttgatgccaagcagacgacgggtgctctctctgttctgtctctgcttttcctccccctccgcttcttccgccgttctcttcccatctctctttgtctgtttctccgtctcctccaataattcgctgcttttcattggccgtttcatttgccaattttggactgtttgttccgattcatcatcaaagaacataattggattatctgaggatgagccgaactcaacattttgcatagtaatggcaaaatcttggcttaatgtcgacaaattttcggattcgttttgctgccccgccgaatttattggccgcttttctttttgcgtttgttccaaatttattaaagtgttttgttgctttttcattaaattttgcttttgattttcttcatttaaaatgtttagcagattttttgataaattttgagaatgacttttcttaaattgcttttgtgatgaattttcggcctcattttgtgccaatttccctttttctttgttcttcaattgatctggccgttttttgtccactttcttttgactacgatttttgttatccttggcttgtacactgtttaaatgatttacaattagattaatgattaaaatgctaatgtttgtttatt

SEQ ID NO: 13696 - DNA, 1278 bp, Heterodera glycines
tgatgcttccagcgttgatgcaagtcgttacacgcacgtcttctcatcaatggaacaacaattaggctcggttttggcattaggtcaaaagactccttaataaattagggttggttccagacccgactcaggggaattgcgaagttgtcaattgcacttcaaataggaagaatgtgttgaaatgagtttttaagatttttttttgcttcagaaaaaattcttttattttcgactttttatgaaaatttcctccacgacttgttcggccataatttcctcaacgattcccgacttttctctccgaaggtcgattttcgaaccattccgcccatcccaccccactcatcccaccccaacaccaccgtttatcctccctcatcatctcattattgttttggcatttttgttccatctttatgcgctgacctgcacaattggctcggcattggcacactcttcgcaccaatttttgccgtccggcagttttgaatcggtgagatgcacgaaaatcacttgcgcccgttgctggtgctgctgttgcacctccgtctcctcaagtcgtttcagcaacatcagcagatcatcatagccgtcgattgtgtgagggaaaagcattgaagcgaaacgaatagaaaaacagctgctgaggaaaaagggtgaggaaattaaacaatggtgaattcatttgtataattgagacattatcagcagagcaatgtgaattaatttaaatccaaataccaattaatgtaatgaaaactattttatttaagtgttattttgggttgctaaaaagagaattcaattgggtaaaaaaaagtttgatcgcatttcttttttgtgatggaaaaataaattttcaaacaagaaatttttgttctaataaattataaatctcaaaatataatattcacataagtattaagttaaagcaaaaaagtttaaggtttaatttattgggaacaataaacattattaaattattaaaaatgttcctttatatttccgatttttggcccatattttaaaacaaaattttgtaattttgtgcggtcgctatgagagacaaaatgacataatgagaaagtttgcttggaaataaattattgatggagaaaataaaataattatttaaatttaatgtcaaatacataaatttattggggttattgttgtgttgtcggctgctgcctgctaaaatcgagtgtttcccccccccccggcgcaatttccccaatgttctcaccgattgatggccctaatgtttactcatcaaaa

SEQ ID NO: 13697 - DNA, 2345 bp, Heterodera glycines
tttcttcatttaccggtcccgtcgtggtcctccggcacccaaatgttcatggccaaacagtcctcgtccaactcgttgggcggattccacatttcggcacccggaaaatcggggaacattgtgtctaaatcgagcggaaaacgatcatcaaaaatccgaggggccaggaatgacgcctggggattggtttttgcatcccatcggaggctatggttactgtaatcggcacccaactgtaggacccatgagtcaaaggtggtgtcgaaaatccgtggacattgcccaaaaatggcggggaaactcagtgttcgacgtcggggatggaccgcaatttctgcgttctaattaaacgccgttccccgttaattgattcaacaattaaatcaaactgcctcaattttgtacagattttaccgatcggataaaagcatgtccgtgccgaactcgtcgcttccaattcgccttcccatcgatcaatctgaaaaatgttaaataaaatttcagaatttttaccaaaaatttgacaccatttttgggattgcaaaacgtagtccaccgataggtcgctgagcgtacggaacgccaaggaaagtgcgcacagttttaccattaaatttctgaaaaattaaaaaattccgcctttttttcaaatttttcattaattataaatccaaaaacggcactaaattcgttaaatttaaattcctcccttaaatggcattttttaaaattaaaaaagaagaataattttcacaaagcctttccctgccaaaaatggcaccgaatcccaagaaattttataaatagattttaaattattttttttaatttaaattatttggcattttttaattttcaaaaaaaaattaatttttaaaaagccctcggcactcacctgattgaacccgcgaattttgcccaatttggtgaccaccagcggtggctcgtccccgttaagcatcggtgccgtcagtctctgctggtggtgccgttgctgggtagaagaagcggacggaatggcacggacggaaggagaacaaaaacaaagcaaaatgaacagcacaacaagcagcaatagatgatgatgatgattagcaacaaattgtcggcgaccatcaaacagaaaaatgctttgatgttgccgctctgaaatttttcgacataattaaacaataattaatgttatcattgtaggaacatgcgagatactcgactttcggcaaaatttttcgataaaatttgaaatttttaaccaagctggcttatgtttgaaaaatttccctgtttgtgccattaaaaattatttcctgagttctatatctcaactttttaacccaaattcccagcttgagcagctcaagctgatctgctgatctattgatatcaatggtggaaaagtgatcagagcgctttttccgttggtcatcaaattttatccagatgttcaaccactaactccttggcatgccgcactgatcagttggcacttctgcagcagctgccggcactggtttatctcttggcatttgcctcctccgttgcttttgctttatttgccggcttttccttcgctttttgcgcattctttgcaacgcaaatctttggtagatagggaagcaatttaaaatccttaacatatattttttaattggtttaaagcccgaattggaaaagctaataaaaaccaaaagtattcttttatttcccacctaaaggatcgccttccatcagaaaacccgactttttttcgtctcgcaacttttttttcccgtccggtctcgaatcccgaaattctttcatttttcgtcccgagtctcgatccgatttggtttttgtagttccgattcgaatcccaaaaccgttacatttctattcacgagtcccgagccgaacttttttttttttgcagtccctacccgaattctcaggacacggtaaagtatgatttctccaaaacatgttctccaattttggtgccattaaggcttcaattgcaaaaattccacatatggttccctgggttgtgacagaaccgtaatacgaatattgcaaaactacccctatttttcattattcaaagggagcattgccctctggcaactcagcgccaatgagttttctccactgacattactttgtctttgtttgatcgctgagtgatgaacggagaaaagagagtggatgcaggcgatatggaaagcgatggaatgagcgacttttgctgatcgaccgcaaccggtgaagtcatactggcacagacagccccgtctctctgctgctggtcggtcattgtcagtgccgatcttgacagagattcgtacatcaaaatgctcgctataaagtcg

SEQ ID NO: 13698 - DNA, 1491 bp, Heterodera glycines
cgtattctcctccgcttaccgtattttctgttacaacacgtctactgtagtgttagtcactgcttgcccaagactttggtgatatggtggtgcatcactgctcctcacggtgctaagaatgtatgttgttgtgttcggcacttttgtgccctcgggcgatgtgttcgttcgttcgtttatcccgtgaatgaagtccgttttgccgggggcacaaaaattgtgaccaatggcattggcaatttgaaatattacaccaaaaataaaaaaaatagtggggacggtagaacacaaaattagctgcgatttttctcaatggagcgcaaatgaataaatatgaaaattgtatggacacacaagtctcggcggcgaatgattgaagaaaataacggctaatttggttgccgggaaggggcaaaaacaaagacaaaaaaatatatgcccaaagggtgtgtaaatgccataaaaattaaaatatgaaaacatgaaacgggacaaagtcgggagtgtgccaaggttttccgggaactcgtgggtctcggcaattttgggaagccatgtgagcatcagtctgaattttgctaattaatgctaattgtcattgcttgggaacttgggaagtttattgtatgggctgctacggtacaatttgcccgccacagtaaatctcatcttcagggaaaaagggtgctaattaagggaatcacaaaaactaatcaaggtaattagctcatttttagggaaaaaataagataagaatgaattgttagttggtgagatgatgcttcatgtttatcgcctttttaaaaatccttaaaaagctaatgagctgacggcggcacaaaatgccaaaaatgggccaaaattgcacgacaaatgagggaaaaaacgaatccacaaaattttctcacgtagcataacaaaaaaaatatgcgtaatgtgatgatggctgagtgggtgttttgcaaaaaaaaataaataaaatgcaaatataataagacaaatgttattaatttaaattagtatcgaaaataataaatcataaaaataaaaatgtaaagtcttataaatccatttttcaaaaaaaattaaaattaaattttttcattgaaaattaattttgtgccaattttaaatttgccatattttctctgtcaagaaatcaaatttaatttggatatgaatattaactccaattctgaagcttttcatgctttagtgagaatattattttcacagacaaaataatttagctataaaaattattttaaaatgcaaatgcggaagtgaatttttcacacagaagcaacgaagatttgaaaattggggaagaaaaatttcgctcaaaatttttgcatttttgcgattttttaaatttcaattcaaataaaaaattttttttgaagatggcattgaaaattttgtctttaaaactttctgaaaaatacttaaaataaaaccgataaaattaaaaagattattgaaaaaaaaccc

SEQ ID NO: 13699 - DNA, 1407 bp, Heterodera glycines
tgaattagaggagaagggaaggtatttgcatgtgaaattcgtcattttcgaaccaaaatatggaaatgacgctctattcaaaaatagcgttaaaaacttatggcgttttattttatttttttttcttcagcacaattcctttccccatctgatttccattttcattttaatttcgtcctcagtttttgtcttgcatttgatttatggggaatttcctcttcccccgtttatttttctctttttatccgagttctacttaactttctttgttggtacactttcattacaaaacagtacattcaattcgaatacgaatttgaacaaaaagtcgaaggttcaaattctggaacttaacatttttcttataaaagtacttaaatgacttttttttgcagggagtgatggctttcagtttgcttccgtgtattagccgttcttagactaaaaatacaaaattctaattttgaactttcggttttttgttcgacttcatgttcgggattcaaaattactaaaatgggtgtcatatttgttttcaccatgcctggaaagccccactgaaattgttttaattccaagtcaccaaccaatcaaatattttccccattttttcaggtgcatttaatttgtaaaaaaatgtttgtgccgtttttgcaccaaacttttttccattgtgcaacggtatgcattttctttattctcctcggagtttttttccgatgccaacaggtcacccgtggcactcttgcgctctgtgcgaaactgtcgttgtcttccacccgctcaattcgttcaatgaagaatgatgcccgctcagtggctgactttgaccgctcgggcaacaacaaaatcggcgagtcgccaatttccatgccgttgccagtgggggcggcccgctcgccttttgaggcgtttgtccaagtgaacgcgggcgtagtggacgccggaaaaacgcggttcgggtaattttcaacaaacatttttaaaattgctttttcattccaccattcgaactgatttaatttgccattgatttttttgtccttttcttaatttatgtctttttttcagtgtcgaatgttcggtgagttcgtgcacccgcaattcgcgccttgtcgtcagtgcacttcgcccactattcagcaactctgtcagttttggcatagccaatctcttgacactgctccaagttgaatgatcttccatccaacccacgcaggtcactctgtccacggacctcaacactgccgagcccggcaagtcggtgcggttccgcctcagtgcagtgccctattcatttgtcggactgctcgcggtggaccaaatgccgttgtcagtggggatggcccgcgagaatgcggacaacccgggcgtggtggacgccggaaagacgctgttctccacgta

SEQ ID NO: 13700 - DNA, 4124 bp, Heterodera glycines
gtcggtgcggttccgtctcagtgcagcgcccaattcgttcgttggactgctcgcgggtgatcatggaatgcggcgaggaatgatcggcggagggcgcgaatcggtaaacggcattttgtcccccctatcagttcctcataccgcatagtttcccgccccctgaaaatttataagaaattgaataaaaaaattgtcaaatctttcagcgttattttggtaacatttttgaaaagtcggtggacttttccaataatccaattttggagtcccaaccttccttaaagctcccaactttttagttcggcccgatggcttatttgcaaacgcgctcagtgagcacggatgggcgcgatcagattcgtgcggaagtttccactaaatacacggagctccttgacaaatggaccaattttgcgtacttcgccgtttccgtctttgtttccatactcatttgtatggtcgtcgggtttgttgggcttttctggtccatgaagctggagttcgggcgactccgagaccagattgtcacggagatcaggaatagaagaagggacagcacatcggatggcgcgggcaatttgacttgacacatcattttttctcattgattcacattgttttaaataaatatattggttctaagcataaagacataaattctctattactcattatgctcgttattcattatgcgtccatccacttaaaaattttttggggtttgaactagagtgccacgggaccaggacctggaagcggacaactgagtaccaaggtcccggttttgactgggaccagtcccgggtttttcccagccaaaaattcccgggttttcaaaccgaaaaggtcccgggtttgcccaaaattcccggtcccgtggcactttagtttgaaccatagtaagggatgaaagtaaattaaaaatttgaaattttccatttctaattactaagacacctttttcaccatattttgcaccgttttggtccgaatttttaatgtttgtttttccatgttgtcaatatgatgttgatgttatgttagaagatctaaatggcaaagtgttgtacaaggaggctaggaaacagttggacacccacacgtacaaagtgagtgatgaaggcaccggtgaaatcgaatgccaagggtttatttttcataaaaaaaccattaaaatctagtttttgcctccattttcctgcattattgccttaatttttttgtgacagagtaaatttttgagtttttcaaattgcagccaggcacagtaaaattcacaaaattgttgagatttgaaaatttttaagcccgtccttgggaagaacccgtcattcgtcgggcactgtttccaattccatattggaacgtgcactcgcatgcggcttcagcacttgcgaggaccaacaatggactagaagcaactcatcttcatttctctgtgttttttatttaaaaaaaccaaaaaaaaacttcaattttagaagggtctttgtcatcatccggccctttccgacttcatttctgaagtgtgtagaagcatcgacagacaagtggacgcggcaagatcagctcggaattcatacacaaacgacacaaacgttatgttctccaggacgcagtaatcatgcgaattttggcggacgcaacatacaacagcgatgccgaaattcaagagcttatgacggctcttggtctccaggttgcaggatacgcaggaaaactaatggattatgaaaatgtggaagattcagtgcaagccccttagaattacctaaatttattatgttcatttttgttatcttattatcttctttttatttcccgctgattttattcatttattttgtgccaaattgaataaaaaaggtttttttttaatgtaatgtttctgccttttttgttttattcattagcgaaattagtttttttttcgtggggacattttgactgattttagcttgggggacattatgacgctggacattctgacctctggacattatgacgctggacattatgacgcgggacattatgacgcgggacattatgactgcgggacattatgacgcgggacattttgacagcgcgccaaatgaagtcgacccgatgccatctgagcactgggacaactgagtcccagtgaaaatggacacttcagtaccgaaaaataataaacgtgaaatagcaatttaaaagcaaaatttcgcaaaagggagcatgcgaagacggagcaagtagtggggcgagaccgagggaggaggaagacgcctgattagtgcctctggattatgactgccacaaaaagtttaaacgcgtaactgctcagctggcgcacccgaccaacatccatttgaaaagttcgccaagtcaatttgcacaccgaattaagctcatccgtctttaggtattaattttaatttaaatgcaaaaaagtcatttttataattgagcaaaattattttcttctattttatttttttttcctaaaatagctaatttaagttgtgagcgttcaaatgatgccaaaggccacaggatatgtttagcggaattcaaaccctgatttttaggaataaatcccaaatgggttaaatcactattttgccctagaatctttattaggtgttgacgacaggccacaaatttttcataaatttctatgcttattttaatgatttaataaaattttgaggaattttcataggagctggaatccgtcgaagctattatccacgaaaatcggattaggtaatataaccgtaccatggatttgttctgtgtgatatttcccaaatcgtacgcaattattttttctttacagccaaatctctgttttatggttgcaattaatacgcgaaggggtttgaaataagcatcgttggcggaagtaacgaacacaaatttgggatggccggggtatttgacctgtgaaaaaatagaatacctattagaaaaatgaatatgaaaatacgaaaaaacccagaaaaaggaaaataattaattaaatactatcaaaaaacataaagaaaataagaaaatacgacaaaaagtcatgaagtatttaaaaaacaaatacacgtaaaacaaattcacgaaaaaaaacacaaaaacaaaaatgagtaattggaaaataaggaaacaatttaaaacacacgcaaaaaaagaaataaacacaaaaaaatacaaaaaaacaaaaggaaaaagaattagggaacaaaaaatacaaaaacacaagaaatgtgaaatacaaaaagacaaaaagaaaacggaaatacacgtaaatacaaaaacacgaaaaaaacacaaaattcaaatgagtaattggaaaaatgaaaaacaaaaatttaaaaaacaccaaaaaaaaaaaaaatatgaatagaaaaaacgaaaggaaagaaaagaaatagggaacacacaaatacaaaaacacacaaaaaaacaaatacacgtaaaacaaaatcacgaaaaaaaacaaaaacaaaaatgagtaattggaaaataaggaaacaatttaaaacacacgcaaaaaaaaaatacataacatgaaatacaaaaaaacgaaaggaaaaaaaatacaaaaacccaagaattgtgaaatacaaaaacacaaaaagaaatatacgtaaatacaaaatcacgaaaagaaaaattaatacacgtaaatacaaaacagaaatatacgtaaacacaaaaacacgaaaagaaaaagtaatacacgtaaattacaaaaggaaatgaaagaatagggaagacaaaaatacaaaaacaccagaaaaataacacggaaaaaaatgcaacaggaaattacgaatacaaaatacaaaaaaaataattaaataaaatacccaaacaaaaacacacaaaaatgactaattaaaaatatggaaaactaaattacaaaaacatgaaataaaggaatataaaaacgaaaatgcgtaacaggaaattacgaataaaaaagaagaaatagaattcaaatataaaaatatgaaacttcactaattagataattggaaaaataaaagacaaaaattaaattcatttaaaaaaataagtacctcaatcttttccttaattgcaaataagtgcgaaagtttgtatttttccaacagccacgcaaatga

SEQ ID NO: 13701 - DNA, 1327 bp, Heterodera glycines
ttaaataatatcacacctctccctctctctctctctctcttcttttcgtccgtacttcattttcctctttcatcctctcctttgcgcgcattcggtcatcttccacctgtttttacttcagtatataagtgccttttttgtctgtccgctctctttgttttccactgtctttcaccccaaaagtgccacttttgttttcgccataaaaaacaaaagtcactaatttgcgagtaaaaggagtcaaaagtaaaaaaggagaaagctttttttctcgactttcttttccttttggactcaattcatttttcagcggcaaactttgcctttgtttttcattatcaaatttacttgacaaatggtaaaatggcatttgcttgggaggtgccaatgccaaggcactcttagggccacacggagtggcgccaaagtgcttcttcttaagcagaggcccagccaatgttcggcatggaaatattaagcggaaatgggaaagttttttatttgttccctctcttcgacttttgaccctaaaaacaaactttggcatggcattcgccgcttttcttcttcccttcgcttcattacgtcaattcctccgttaaattcctttacttttcctttaaatttcgttcactgtcaaaatgattagaggccacacatacaaggaaaatgtgccgaaaatggaaaggacaaaatcgaaaaggaacggggaaagccgagccaaggggacggggggaagcgacagatgacgggaggaggggggctaaagcgagtggcattggcattgagaaagcaaatgccggaagacggagtgagggactgagctgaaattcccaccccctttgcttttccccttttctcttctctgtcccattaaatgcttctcatcccttttatccattagcattctctgctgccgaaggacaaacgtccaatgctttttgcatttgtgcgcagtttctcattaatctcttcactaatgaatttcgggttgacaataaatagggaaaaatagaaaacattgcaacaattggggaacattttattgccctttggggaaggggggaggaaattgacaaggaaaaggggcaccatcagaaagagccatcagcagaaagagccatcagaaatgcatggcatcggaatggcattggcatggacttatagcaattagagctttaaaaggggaacggacttatgcatcaacaacccaatgcttcattcttcagcccatcattctcctttccctttatcttttttgcattttattttaaggagcggatttatattaattaaggcggggagggagggggcaaatgaaacaatt

SEQ ID NO: 13702 - DNA, 2348 bp, Heterodera glycines
cccaatgtataaaggcaaaacggatgggtcgactcaaacttctacggttttttagtgaggcgataatggacaaacgaaacgtatggatttgtgatcagtgatcggcacagaaggagaaggccgtggcaaatatgtgatcagatttaatgggtacgaacggaagaggcaggcatttctaagattaataggattcattcacaccctcaatttttggttattttgtgaaaaaataaaaattacaaattcctggttaaggtaggggtaggggagaggaaaagaaacaaaggaatgagaaaaacaaaatagagagagcgagaaagagagagagagagagagagagatggggagaaggtgaggaacactgtgtgagagagggtagaaagagaggagagaaaaagagagccttcgttccaatcgaaccgatattcgcatttgaatttgaatttaccatggcttttgccatttgcatcattagtcatcgcctttgcgcttgagggcgaatgaattgcgaattgactgacgatttgtcggctgctgaagatgtgagtggctctgttgctgattgctgattaagcttcgcttgctcattcccgcccccttttccattttttccaaatattcctcaaaatgcttctccattttcttttcttttgcctcttttcccctttggcaacattccctttctctgatcagttctttgatcaccttgatcagtccaatcgatcggctgattcgtcaaatttttcgtcgccttcagcagctgtcaattataaattcgtgggttctaattgcataatttgctttttccttttcccctttttcagtttatctctgccggccttttcttcgttttgttcgctttggcacttttcgtttggccttgtgttaccgtcgcgctttgttgctttttggaaaaaaggacaaaataaacaccaattaaagaaataatttgacattttataatgttaaatcttttgaattccgtctaattctccttatatttatgtcggatcagacttttgacaacaataaacattctccattgtgtttttttggtctttttcagatcgtcgattccttttccccctttggcactctttccgtcgtccctttctttcgctcacttttctccttttccttcacatggccattttttgcttttgtgtgttgtgccagggaactcaaagtttgtgcatggtttccttctgatcagatattaaattgataattcgtcctaagtttgtgaagaatcgaaccttttgggatgaaatttggctgatgagaatttgaatttgaatttggcattgccattggcattgtgccgtttggcggaagggacaaagagggcgactcgctcagtttggaatggagaaaatgctgctgatgttttgtaaacggagacactgaattatgattgtccttttggttcggacaaagtgaccaaccgctggaactgctttgcctttccatctgttggcactttcccttcgtatcggcctctgtttcggaatagtgccgtcgcaaacagtcgggaaacaatttggggtcccaagaataggtccaaaggtcaatggcctagaaaaacaaaaaatggccatctgctccgacaacaggacttttctaaatcactttcattaagtgccgtcgagttttctgctccagtgccaactgattggaacagagccaaaagcggcacgcgagaaccatccgatcgcactccgaagggttcagctgttgcagcttatggccaaactcggcgaacaaagtgccgaaacactcaaattggagggggagggggaagcgtcatgccgtcatcgtttgtaccgtaccaacatgtcactgtcatccggctcattctccgacagcatttgcaagcagcgcaataaagggtcgaccagacaagcactcaatgacttatcgatttgtctgaccagaggaaacaattggtggtcaaaaatggcatttggttacccaccaaaaagtgaccacctcacctgtacaccgggtacagttcagtcaaagttcggacgtaattccgaaacattccccgactttgggcgcgaatttcgtgccgaaaattgtagtcgcgcaaaaccaaagcgagaacttgggaatacaccttcacattctgaagttggaacaaggcatagtgccaagcatttgccaatgtataataccgtgctcatgtgggcaataatttttggagtgattttggcaaaatgcgagtcggagagccatcgctaataaaaatgggggaaggtaattgggggaatgagtgcgggggggggggggggggtggatttgtatggaccattaatacaataagggcttttgcatagacagactta

SEQ ID NO: 13703 - DNA, 3650 bp, Heterodera glycines
taaaaataagtatcaatgataataatatttaaatttactttttatttaaatattttgctgaataataaatcataacttagctcaaactaggtaaattaagagatagctttacatgccatccactaacattttaaaaaaatttagcaaaattttataaaaagttctgacaaaaaatttcgtaaaattagacccataattagtgaacaaccctagttttttcttctatcatttgaaatcctacgaattttaacattttcttagccttttatcagcaaatcaattaatgaaaagaattcccaaaaaacgctttatcaaaaaatagtgataatccaaatacaatgacatcttcaaagttggtattatacgaataaagaacaatttaaaaaactaaagaaaattaaaaagaataaaaagaccaaaaagaaagaaagatgaaaaaagcacaaaaagcgacttatttcaacccaaattcaggaatttgatcatcaaaagcccaataacgagagccaaaactttagcacttttctagttacagtggcccgatgctgctagttaaatagatttcaaattttagtgtcaacaaatttgtttataaggtattcgtggccagtgatgtttctattctaacattaaatttcattctgaaaactttagactgatttactaaatcaactcgaacaaaaaccgtgtaaaaaaaggcctgaaaatagggtcccaagaaaaagaaaacgaaaaagagttcaaaatccaaagacgctccccaaaagcagcaaatgcatttttaatggggcaaaaaagaagctttgcaccggcacgcgaatatggccatgccgaaactcaccaaaatggtaagaagtgagtaaatccatgcgaccaattcaagtacttgaaaaaatgtttcaactcccgttcgatgctcatcagtacgcgatgaatttccgatcgaaaaagtgtgttgttgagttaagcgaaccgtcatgtcagtgaagaggatgctcgacgttaaagccaggacgacgtacagtgaacagcgttctctatcatgaactcttttcttaaaaagattccaacggtcgttgtcctttttttcccgtcgttttgagatgcctttcggctgatcagcaggagaagccgaagtctgatcagacggagaatcagcaatcgttttgagttctggaaagaaatgtgattatttttagcctctaaattcgaaaacagtcatcacctttaagaattttagttactttcggcagcaaatcaataccaactttggccaattttccaaattcttctttgtttttggggttcaaaatttttatttcagacaatgttcgaagaaaactttcgtgtatttgtgggttcactttcaaattgctcattgctggtgctacgcttccattctctgcctctttctgttctttccgaatgcttttgcgatttttccaattttggcagacatttttaacagctaacaaattggcatcttcttttggttttatcttctctgccacaggctttcgaacttcaatttccgagttacataaattctcaacggctattaaaaatttgtcgcctttctcttccaatgcttttgctttttgtgagtcgagttcgtcatcagcttcatgctccactcgttcgttgtctgtctgctttttgacttcgtcgagaagcattgtccccgtctcgagcaattcgtaagtggttgaaaaggaaactaaaaataaataattttttctattatttatttattttatttcaagaaaggttgtttctctcttcgttggccagtaaaaccttttaaatattttttcgagggccgtgcactggatttgctttatgagctattggcgtaccgccggacgttgtgggggcgaggcccactttggattattccttttttacaaatccattacattgttaataatcatttgctacctttacaacaaacctttacactcagtcggcaaatttaatgccccaaacagcgccagaagaaggcaaaatgcaagcattgctgctgaaggcattttcttactatttctaaacaggaattatttcaataaaaaaaattttttaataattataaaattgtgatttaaaaatatatattaatagcatataataaagaatggtaatgaaatgccaaataaaatgtcacgcccatcactgaatggaaatacgtaaatgggagatggatgcattaacaaaggaaagcgtggcattataatgtcgacaatgaatcgttaataatgtaaaaatatatttctgcaattatatcaaataactatataattttttatgaatatttggaggtcggattttttaaataccaattaaaaatgggccctaaaacaagcacttatgaggttaaaaccaacttctaccagtggcgtgttgaaaattcataaaactttctttacggtgcaatttttatgaaaaacttcccggcgacgcctttggtcactgctccggctggcgcccggaaaatgcgtcagtggaaaatgcgtcagtggaaaatgcgtcagtagaaaatgcgtcagtgaaaattttattgtcataaaaacaagttctttgcgttttcgggggcacttaccacgaatctggtatccatttcggccaattctgaaccccggacgcgaattcgaacaaaaagttgcaagtctaaattttcgaattaagcattttttgttcaaaaacggcatacatgatctcctattgcaggattgatgtatttcagtttgtttctgtgtatttaaaccgatttgaagaaaaacactaatttcgaaaattttgactttcgattttttgttcgagtttgggtccggggtaaaaaattgagaatgattttcttatagaagtttacttctatattacaatactaatgccatagaattttattttaaaatatttgcatcactgacgcattttctactgacgcattttccactgacgcattttccactgaccgattttccggtcacgagggaagaatgcacccctcgggcaaattcatttgtcaaaaaaatggcgtggatgtattatctctgcagctcttgcccaagtgatttgttgtgcgtgagaccacggggctatacaaagcccgtgatttgcttgcaccgttcgatcgacaatttcacgcagctgctgcgtgaaggtgttcagccgactacaacaacgcccgcagcaacagtgccaaatgtgacaacaatttgtccagcgacttcttcaaattgcccgatgctgtcaactctggtcattgccagcactgtgttgattttgtgctctttcttcttcaggtattttttttcattcaaattaaagtttaccccctccccccccccacagcttccctttttgggttgaaggttcgccatgcggtggcaaaccgcttgttgcggcgacagctcgttcgtcagcaacaaaagagtaagtatttatttatttttgttttcataaaaaacctatatttttcttagagctgaaaacgctcagatcgctgcgtcgccagggcgcgcaggagacgccgctggtcgtgttgggcggccgccgcccatttgtggcaccgcaccacgccggcgccccccgggtcgaggtgaagcgatttttgtttgttttttttttcaaatttaaaatttgttcaggcgaat

SEQ ID NO: 13704 - DNA, 2873 bp, Heterodera glycines
  unsure (1)..(2873): unsure at all n locations
atggctgttacgaaggtggagatcgattgccggggggaaaataccgagacgactctcncatcccacgaaaaagcatatttattagaaccagtggtaggatatttgatgtccagacattgncggctcggacatttgcagcccaattttttgttgaattgggcgaagccgcaaatgtccgaatttgtattgggccgcaaaattcaatcggatatttgaaccctgaactacgggtcgaatcccggaaaaaacttgttcccaatcctctcaaatctctgccctttggcattctttcccattaaatcccgggggtttgtgctgctagttttgccatggtccattacaaattgatcaagtcagtctcggcgacacaattggggtcggaacggcgggcacagttgcgcatttgctggacgaagtgctgcgggctgtgccttgcaaaagtgtggcggtccattttcacgacacttatggacaagcattgagcaatgtgcttactgcaatcgatgtacatacaccgcctaattgaacttttattgcccaaattatgcgcattaatttgattagcgtggcattcgcgtggcggacagcagcatcggcggcctcggcgggtgtccctttgccaaaggcgccaccggcaatttggccaccgaagacttggcttatttgctgcacggcatgggcttccacaccgtttgtgaacacgagcgattttaggaaaacatatttaaagccgaaaatcgaaattcaaagggaatggcactgccgcggggcgtgaccggaaaatgcgtcagtgatacaaaattcgtgtccggggttcgaaattgccccttaatggataccggaatcatggtcagtgcccttgaaaacccaaggaacttattttatgacaataaaaatttcattgacgcatgttctactaacgctttttccactgacgctttttccgggcgccccgcgggggcgcaaaaggaaaactttgtgatttttcttcgccattgtcataggataaatggcattctttgctgttgattctctttttaaaaaatgaaattcggcagggcattgacttggacaaactcatcggcacttccgtttggatatgcgcacaaatgggcagaaaaaacgagtcgaaagtgaccaacgcaatgcaaaacagcagaaaatgcggagaggaaaatgacaattaaaaggaagaaggataaatgtatttggaaatgtttattcaaaaatttatttaaaaagaaattctatttaattctttaaaattatgaaccgcaaaaaaataaataaattttcaacacttaaaattaattatcctgtctatttgaaaaaccatgggcggcaactaaacccaaaaatgccaaattgggataattagtgcacggacgggaccgtgattatttctcgcaactggaaagacccgacccaattttagagggcgaggggggggggagttttcctttttccttcgagggacaataggaaacatcaacaaattttggttaaatcaacaaaatttggaccaaattgttgcttaatttttagtcatttctctaagaattgataatatgttgattgattctgaatttgtttgattttttcacatttttgtctcaaaatctcgacaaaattccattagcgtttgaagaaagcttttgcttcttcttcatcctttgcctcccttttgctggtcggcttccgctcggcctcggaattggccgtcccatcatttggccaaatgagatttgactccccagcagacggccaattcaaagcatatttttatatcattttaaagggtgaaaaatgtatatattgctgaaactgaaattaaaaaatttttttatttaaaatatattttatttattttacataaagatttattttatgtcattcattttgttaattatttggccttgcataattatgattaatttctctgcgggtaaaacaacaaaaacaaaatccaaaaaacaataaaaatttgcgaaattttagtgtttggtgccaatgacaaattttgttcgtcccaaaatggcgggtcaaaattgaacgagctgacaagccccggcttcccatcaaaatatccgccaaattccgattgtgttcggataatagatggtcattaccattactttcttaaaatgggtaaaatgccatttttatttttattttagcccccgatggatacgaaatttcaattaaattcagagagatttttgaggtaaaatgcaataaaaattaattgatttgattggcgacagattcagatcgaatcggcttatgaactttatggaagaaggcaaaaacagcaccaacaaaaggagcatttagcagcagattttcacgataacaattgccctaatgattttttggtggaaataattataaaataattaaaactttcattggacaaattattttttatcgaatttctattaattttagttttttagtaaattttaaataattctaaaaaaataaaatttaaattaaatattaagttcattataatttaaaaggtgaaaataaagtcacaaaacgaaactcggcttaaggagctcagagatggtcgcttccccttttctccgcttttggcccatctctgcggcacggcaattccatcaacggaaattcgcgcttcttctggacatttatgggcttggtttcacagcgatgcgctttttgaatatcgcggttttgcgagcgattttacatttattaagcggatgaaagcgcaaaaagaggcgaacgacgaaaggaaaaagggtaaaatgagaaaaaaaataaggggaaaatgggaaaaaataagcaataaaataattaaaaagaaatagttcagagtgccattttcggttcacaaatatcttcga

SEQ ID NO: 13705 - DNA, 2677 bp, Heterodera glycines
  unsure (1)..(2677): unsure at all n locations
tgcggactgatgagcacacacattacacggggggaggtgagcagagcgaaatgggcaaaaagtgccgacattggcacggcaatgccatcaaatttggcaatttttgtntaagtcgctcatttacattcgcctttttgtgatggatgaagcgcatttattggcatcgaatttccgaattctcttctcctcctattcaagacgaggtaataaataaatggtcaagcagaaaaaggattgggaaatgagttactttttaagcggctaattgcagtgatcagaatttgtatgattgtggtgatgaaatttgcataccgcgaagtatttaatttgattttatataatgaattatttaaacacatttccaataaaatttagcattaatttgcaacggtcgttcaaattgtctttatcgaagagatgaaatcaactgcgattccaataaatgtaagcaaaattaaactaattaatttataataattaattaatgataatataactcgcacaatttcctctatttttgacagtcgccgacattttgaacaatttgtaccgttctgaccaaattccgttgttaattattttaactgttctttttactgtggtcgttgcgctttgtttctattatcggccgtgtcgaaaaaaggcgacgaatcattgcccaaataaggcggaaaggttgccaaaatatgaggaaaaattaaatttaaattttaaactttgctttatttatattcgctaattacttagaaaattaaattttgaaaacagattaaaacgaaaggagcaatttggacaatgcaaagtcaaaacgaacgccacaaactacacattgaacattggcaaagcagaaaactggaattttaatagcaaaacaatgccaaatttggcaaaaaataaatcggtaattcgtcagttaattaactcattaattacaaaaaaacgcatgatttcggcagagaaattcgttgagcaattggtcattgtccgatttggcacctgttgaaaggcatcacgaaaattgtcagcaaaagttttgcaaaacggtggccaaatcacattaatttgttaatgaacattcaaatttcaataattatgaaatagaaatttggaggcgattttcattttaataaatttttgcaataaaatttatattaaaaaggccgaattaaatttaaaaccaaaaatttaatcattgtttttttccactataaagtataaattttaattattctaaagtgatcactgatcagttcattttctgcctattagaggccatatccgtcccatatttcctccaattgtcgcatcatttggtagtatttttcgatatcttttatccttattgtatttctggtgggatattggatatattccgaaaagtccgtccagccaatggcaccttccaaaagcacctaaaacattgaccaaaaatcatttgaataaatcgctaaaatgtatagtgatgaattgttgaattgtctgccttttatttactctctctgtctgattttttggcattttaataattttcgaatttaatttttccattttaaaatttgctttcaataaaattttattttaactgaattttgggcacaattttgcttactctgatgaatacgatcagtaccggcgcctcgcttccgaaagcgatgaatgccctgtcgatgatgccgtaaaaagggatgtttcggcgtctccttttccctttttgccagtcccaatacattctgagcagttcgaacttctcgtgcagttcgttgtacttctccaactcgacgcctttaaatgcggtgtcttttaatattttgtcctccaatcgttcaaacagttcgaattccttctcaattttctcttgcatttcttccgccacttttttctcttctttttgctccttcggttggctttttcgcgccaattcgttgtccaattcggcacagaatgccatcgccacgtttgggtcggtggcgtcaatgctcggctcgacctttgcgatgaacacaaattcgtccgccgtcgggtcaatgatgggacagtcgcggaacaccaaatgccaaaggaccaatccaacaaagcgcaactgctccttctcgtcagcgccggcaaaagccgaagagccgactctccgcacagactcctaaaaaacaattagtggaaatgatgtccaatcaacatccgccacaattcctcctttaaattgccgattatcattaagggtcggatttgaccaaagattgtgggattttaaagttatttctaatttattagtgaaaaccatgtaaaaccaattttttaataaattaaatgcaaaatatgaaattttgtatttgcttactaatccgatccccaattagtattaaatgttttttcttatttttattttaatcacttttcaaattgcttctcagatccgctcatcacttacatcgcctttatcgagaagtattgcattgttaaattggtcaatttctctgctcattgcatttgcaattattcttatcagctgacttccgctgagaatttgtgtataattacttttaagactttcattgtcaattttgtttagatttcttgagttttccacttctaatttcgccgatttgagtgcgcaaatctcgtaaggaatgattaactaaacacactttttttaaatcaanagtattgaattccttcggca

SEQ ID NO: 13706 - DNA, 2671 bp, Heterodera glycines
  unsure (1)..(2671): unsure at all n locations
ttttattttttattttcttattgctataatggggaattcgcctgcaccattttattagcatttaatttctccgacttcccttcaccggtaacacatcgttttgaatcgttacggcgaaagcataaccctctgacgtaaagcaaaccgagaagacttgcggcaacgttcaagccataaaaagcctctgaacgcactgttgtaaggaaagccacatttgggaaagtacaagtcactgcgaccgctgtactcagctcatttgtgcaacttcccatatcaaaggtcgtttattgattttattcactgtgcgtggcgaactctcccaatatttgctggcgataaacattctctctcatttactcattttcattcacacaaacattggtctgactgaaaagcacttaactgatcaaaatggccgctgacattggtcaaattcttcaacaattagttaaaaatcagacggaggcttttcaagcccttctccaaaatgcccaaacaaatcaaaattccaacaaccattccacaatttatgcgactatcaatagccaacttagccaatttacatataatccagaattggatttaacttttcaagcatggctcgaccgttttggcccgtccattcaggtggatggcaaggaccttccagacgcaatgcaagtgcgactgctgcttgggaagctcggtcaggaggagtacgctcgtcatgccgaacgtgtacttccaaaactgccgaccgacttcactctggcacagacaattgataagctcaaaattttgtttggggaaaccaaaagcattttcacacgtcgatatgagtgttttcagttaacaaaatcattttcccaatcaccattagattttgctagccaagtgaatgccatgtgtgaacgctcgaaaatggacttgaccaaagatgaaatcaaggccctcattttcctcactggactctcagatgaagacagagaactgagggaacgatgcttgcggattttggaggaagccaaaaagaaaacaccgccggaagtgatcacttttgagaagcttactgaagagtgccgtgcgtttttgtcattgcgcaacacatctcaatctttggcaactgtttctggaacaaacgccatcactctcaagccgcagaaattgaaggaacagcagctcaaaaagcgcagcacatcacagcgcccgtcgacgaaggcacaaagcaacaacaatcgcagcccttccccttttcagcgccaaccaaaaccgccatcaccgtgcaggttttgtggtcaaatgcattgggtgcgtgattgttcacgggcgccaacttgctcaaagtgcaaccgccgtggtcactacagttccgaatgccgctcatcatcttcatcccggcccaattcacaacgttacaacgcaacaatgtcggtcttcaacattacggacgacgacttatcggaatggataatgatcaactgcagcattaacaacattgatgtggtgttgatggctgactctgggtcccgtctgtcggtcattcagattggtttatgggaaaaattgggtaaacccaaactcataagtggcatcaaaaaggccaaatcttattctggtcactttttcgaaattttggggttttttgtctgttcagttacgtaccagggctgcacgcttcaactcaaatgccatgtcgccccggacggaccaatgaatttgttcggattgccatggatcaaagcgttcgaaatggcattgcagcgaccaatcgctacgacactcaatctcgcacaggcacacgccgtcacagtttgcgacgacccaaacactttggccaaaaatttaaaacaaaaattttcaaaagttttttcctcaagtttgggtctttgtacaaagatgcgggcgcacctccagctcaaaccggacgcacagcccattttctgccggcctcgtccagttccacatgcagccaaagcagctgtcgacgacgaactcgaccgtttgctcgcttgtggtgccataaaatctgtggacttcagcaaatgggcggcgccgattgtggtcgttaagaagaaatgtggcaatgtgcgggtttgtattgattttgcaaccgggcttaataacagtctggaactaaaccgccacccgctcccacgcattgatgatatttttgcctcgctggagggttgcacagtttttagtcaaattgatttccgcgacgcgtacctccaagtcgaattggacgaagagtcaaaggagctggtggacataaacacgcaccgtggtttatttcagtatcaacgtttaccattcggagtcaaaagtgcgccaagcatttttcaaaagttgatggacgagctcaccgctggccttcacggagtgttcgggtatttggacgattttatcgtggccacgcccacgttagaggagcacgatgctcttctaaaacttttctttggtcgcctccaagactgggggctccgtgttcatttaaataagtgcaaatttctttgtccccaaattaagtttcttgggcacattgtttctgccgaaggaattcgtcccgatccggaccgatcagcagcaattgagtcaatgccaccaccacatgactttgcaactctccgatcgttctttaggtgcactanatttattacgacgcttcattaagcaaatgcgtgaactccgtgct

SEQ ID NO: 13707 - DNA, 1316 bp, Heterodera glycines
  unsure (1)..(1316): unsure at all n locations
aaagagcccctttcactaatttttgctgttcaaaaatttcacagaatgatttatggccgacgcttcactctgttgactgatcataagccactcatcgccattttcggttcgaagaatgggatcncaatctacgcggcgtctcgacttcaaagatgggctctcattttggctaattacgattttgaaataaaatatatctcaacgaattgttttgggcaggtagacgttctctcgcggcttgtggcacaacaacgcgagacggtggaggcggaagaacgagtgatcgccaacgtcgacaaaacttcacttcaaatttcagatgattcagcgctcgatgaatctgaaacggccgctgtcgactacatcttcatggccaacattgatcagctgcccgtcaccgcggatgaagtcgccgagcacactcaattggacactacgctcaggaaagttttcgatttttgccgtaatggatggcccaagaaatcgcctagtgatttgtctgcctttttcactcataggcacaaactttccgaagtgaatggttgcctccttttcggttaacgtgtcgtcattccggcagctttgcgtcagcgaattttggccgctcttcatttcactcacccgggaatcgttcgcatgagggcattggcacaacaacatgtttactggccccgcatggaccttgacattgaacgttgggttcgccactgcgttgactgtgcgatggcggcaaaaacaccaacaaaaactacactctctccatggcctaaggtctatgagcgcattcacatggattttccaggcccatgttctgacggcaatctctacctcatcatcgtggacgcattcagtaaatggcccgagacttttcaagtgaaaagcacttctgcggacaatgtcatcgttcaactcgagtggctcttttcgcgatacggttttccacgtgaaatcgttaccgacgatgggccaccctttcattcgaaagatttttcccatttttgcaggattaaaggtatcaagcaaacatttagtccgccgaatcacccacagagcaatgggcaagccgagcgttttgttgacattttcaaaaggcaaatgaagaagtgttcacacggagacaaaaagtggatcaccaattctctgttcgcctaccgcaacacaccaaatgccgcactgaaaggacaaacaccagctgaacttttccttggccgttcacctcgaactcaactgtcactgatcaagcctgacatttcttgctcaaatcgcaatcaaaatagaacccaaacaacatgtcgaagcaattcgatcgcaaacat

SEQ ID NO: 13708 - DNA, 1584 bp, Heterodera glycines
tttcatggcggcgtcaaaagcgcgttctgcctttccactgattttgctttccagcgccgaaacgcggcgactttccggccattcttctgttgccaacagaaatttttggaaaaatttccgaatttggttcggtccttccgttccattcagttcggggagtcgttccattgctatgacgaactctaacgcgccaatttgcagaccttgttgcctctgcggttgttccacaaaattgcctttgtccgatgttttgttttggcgaagttgctgcatgtcgaattgggatttacttttcccggttttgcgagtcagtttttgtcgacggatttactttaccggactgacaaaattgcgtgatttctttcacaatttccttttgaagtagagggatttgcttttcccgttttccaaacaaaaaaattccgccttgttcgtctgctcctcgagtcgtttcccgggtttttgttcaccctttttgtcgacagtccgttgaaagttgggggatgtttcccgtttaccggaatgtcgctttggctcgtctaatcgtgggttttactttacccgtttacaatttttagctgtccacagtcggttgattaggctcttctcttgttgggaatttgttttccctttttccgatttcttcaacacttgtcgagggatttactttcccttttttcaattcgaggccacgtcaaatttcttattgtccactgctgattcaccggtgccaggagcgccaagtcgtaaaaaaacagaagaggatattgttgtcgggggctttattaatgttgttgcactgcccacggcaaaagacaacagcccaaagcaaacacaaaacaatacagcccaatgccgaagatgattatcgtttaattccaaataaaattagggcgaggacaatcaataggaaaactgcgacagcataaactaacaaccaacactccacaaaaatcacaaacaaaaatgaaacaaattaaataacaaaacgccaaatatattttaaaatcacaatattagcacaggtttcagtatatttgaatggcatgtggtattctttttttaaaaaaagatttaaaaaattgaagcgtgcttgaatccaagtatgtacttgaaaatcattcaaccgaaagattaaaaaatattactgttttatacagaataaaaaaaaaatttggcattcagcctacaaatattcacgattttttttcgtaagtttttaattttttgggtcaatctaccaaaaaaaaaaacaaacaagaaagtcacgaaaaaattaattcggaaagaaattttgtttaaaattttttaacacatctttgaaattttttaccaataaaaaacaggcatagaaaatttaaataaactcgcgaatttgctgatagaaaatccaatccattttaatcgattgatcagattaccgtagctcacctttttccattcacagtgatcactcttcgatgttttccatcgtattgaatcagtgttgaaagaagttgatccattttttcaatgttttcagtcccgccaatgaaagtgtcatttttgttgcatgtgctatgaaaatccgggtcacgcttggtc

SEQ ID NO: 13709 - DNA, 3072 bp, Heterodera glycines
agtaaaatttcgaaatttgttttcttgcaaaatttttttaattaaaactaatttttttaacaattcgccactacaatttttaacgctgttaattaaaataattaaaattgttaagatgatccaaaaatgtcaataaaaattccaaaatttgatttctcgccaaaaatttttcataagattttatcaatttttattttatttctttttaacaatgcattaaaattttaacgccggtttaattataaaataattaaacatattctgttgattcaaaaaacgtcacaaaaattggattccatgtcattttttgaatttcaccctttttaattttattagcaatttttgccacaatttaacctcattaattattgtgtaaaataattttaaacttattctaatgacttaaaaaggcagtaaaattacaaaatttgaatgtctttccagaagttttttcataaatattttgaccaatttttatttttttgcaattttgccactaaaatttaactattgattataaaataataaacttgttctggtgaatagtcaatgattggtgtaattccatcattttgagttgtgaccattgtcatcccatgttcaattgttaaatcaaactcataaattccgtccttaaattattaacagagtactaattatcactaattattttgggggaaaaaaagtaataaaatttaacacctcatttggtctggccatttcaagctgtttttcccaaaagctccatgcttttgattgtcgaaatgttaaaaaatgaataacaattattataattattattttgtaaaacattttctttaataaaaaaataaattaatatatttttttttgctttttaatttaaaagtaataattgaagtcccaatttttatcttaattattgtaaatgaataatcaaattgttatcatccattcaccaattaaaaatggcaataaaatttaaaagaaaattatctatctggtatgaaaaatgtcaaacaataattcacagcagtctcatttaaaaaatttataaggaattaaattttttttattggaattgatcgaaaaatgataaaaaataatagaaaatacttgtaaaaaaatacttgcatttaatttacaatagaaaaaaaataaaaatattttagaataatttttcaaaaaataaaccctattaaattttttaaataaaaattataaaactttgaatgttgagaaataagaataatagaaaattgcaagcaaatagagctaaacatataaaattagaatagtaaagtaaattttacgcattttttaattatgctttttaaatgattgttaaaatataaattaggtatgctaatccacaatttgatgacgctttttccaatactgacggattgtccactgacgaatgccaatactgacggattttaacagagattttcaaactaatccatttccagtcacgaaaaaaatacatcccaaaaataacggattgtctaatactaacggagtgtccactgacggattgtccactgacagattgccgacctgtgtattgtcaaatgacggattgtccatctacaatttgccactgacggactgtccaatgatggattttgttgcactgacgaattaaaccgtcacaacgaattgaagcaatgaaataattttataaaatttattttataataattcaatatatatttttttttaatttttaataaatcgatgtatattttacatatgaatatattcatattattgatgtgccacctttttcaaaacatttccggtatctatctctgcccatcatccgcatttttcttcatattgaaagaattattctatatgcctctctctttttttaattatatttttaattggtggcaaattttggcggcgtatgccacgcaaatggcaaaatggcatttatgagtgtatatgtatttgtatgtatatatatatggggaaaatatgcacctatagggcaaatataatagtaaatagcaacatttcagtaatcgagaaaatgcattaaagtgagaatttttatttattaaattaagaattcatctcgagtcccaaattggtttatgccctatcccctaattcccaaaactcatttataaaactactcaactaactttgatagctttgacccgaattcaacagaaattttggctatcccaaccagaatttcgtcatgccaatccaactcccccctgaattctcgacttcgacattaggccccgaattttatagccttgaattttatgatctaatgctaacccgaccactatggcctgacggagtcaccaactctttcaataaatccaacctcaacgtgaaatcccaaaccaattttttttaaattttttgtcctctgacaatttggccccggatgggtcgcaattagagaccggaattttcaaattttcagctccagctctgggattggaactcaaaattttttaataatatattatttataataattattattgacaaattttattaatattgagttttagaaaaaatgcgtctaaatatattccttctcctaattgttcatctcctatttgtgtgtagcgatgttttcggtgacgagcaaagtgccgaaaaacaaagacaaatacaacaaaatggcattgcgagtctgaaaagtatgaattcatacacatcacgtgagtttgaagaaatttttggcattacgccaatcaaaccgggaaagctgaataagaaccagaaaaaagagttgaaaaaactgcgcagaaccgaagaaaagaaggccaaggagttcaaaaaggaccttaaatacttgccatttaacaaaggtaaatttaaattgctcttaaaaatgtcaaaagaaattttttaataatttaattttaaataaaaatagctttttcggattaatgttccgaaaatgtagaaatttcgggattcgaaaacaaatttataaaaaggggaaacatttttttacattttttgcttcagaaagagttaattaaaaattatttaaaaattggtaaatcgctcttaaatgtcctaagaatattttgtaattgagttttaaataaa

SEQ ID NO: 13710 - DNA, 3871 bp, Heterodera glycines
atttcaaaaatacgcccctgagacaatgaaaaattttcaaaaattcatctcatagatttatttatttattttctcgacaagtatttgtgatttagatattatttatctcaatgctgatcagacttatttttttgcctttttgaatgaatttggtcattttacgcccttaaatttgaggatttttagtgcctattttccattttttagagcctattttggggttttttttagagcctaaagcctacctattttgacggtttttagtgcctaaaaattggagcctactaataattgccattaatttttttaaaaacacaaaaatgcggcattatgccaaatttaaaaaatgagccaaaagttgtgttgtaaagaaatttctaaatttaggtacttttcggctttggggcctggaattgattttttttttaaatcaacaaagggtttcaaaaactacgcgccaatttggtgaggctaaatgccacaatttgcgcaattatttcctcaaatactcatttcgttaatttctgcagtgagaacaaatatttgtgcaattttgcgcaccattgtaatcaaaaaaaataataaattaaatccagaccaaaaccgaaaagtacctaaaaactaatcattaattttaattaattgatcaattaaatgaagcattgcttatgccattattacatttggtacgcctccgcctgtctgtggcaaatttatgccgctccatggagacggctgagaaatgcgtggtcgcacaaatcggttcgcctgttgctgaaggcttagagctgctgtgttacacaagttgcaggtgaacgggcactcctgtatcatcagactacggtatatgggcacggtacagtatgccacgcggtcgggacagtccgaccgaccgttgggccccactcggtcgaaacatgctaaagaaatgtttggcagacaattttaacattttatacacaatcccttaatatatttttaattttatactattattcttttaaaaaattaaaaattattccgataatacgcgttaaacgcctgctgacaaatgggaagtaaaatcaaaaaagaggaatttcaagaaacaaataattaggaaaacgaacctaaaaaaacattttgaccgataatttaaatgtgaagtcttcgaaattaaattttattaaaatattaaattttaatttgatcagtcatggttgatgctcagggcatattacgtaatatttgaattttataaatttcataacaccaaattttctcattggttgccggaggagcccttttcccttggaaaaaaaaagttttgcaatttgttctgattttttgacattgaatttgaatttttcgtgaggaatatgtttaatctatttgaaaatcaccgccattcgccgccgccacatttgcattcgcaagaccaagtgccgctcttgcgccacaacggttgcatgtttgtgggcactgaacaaaaaaaaaagaagcaatttttgaatttgttaaacaattgaatacatttctttgcacttaatcttcgaatccgaaatctcggaattacgttatgagtcgggattttgccatgaattcaaaaacttcggtgctgtaggcgccgccgggataaatttttaagattttcatctaaaaatgaccatcattttgcgattttgagccaatttttgtgggtttttggaaaaaatagcgaaatttttttgagacatttgtgtgagagattttgaagggggaaaacaataaggaaaattgcaaaattttcgtcaatttttattttaccttttaggaaataacctccccggccttatagtttttttaattcttccggcaaaatgccatttaatgctctcgtgcctgttgtgtcatcagatctctgtatatcgcatcgttgcacagattcgctctcgacggacagtccgacgggcggcccggcgctgccaagtcgacgcacgcactaagcgcggcgcccggccccgtggtcactcgtgctggcgcaaattttcaataattttgaaatgcgtgaaaaaaaaattgaaaaaatatttgttgaccgtaagttgttgtttcaacatttaagccttatgccttcgtaccaatttttgtttttagagtatgtaaaaatttttaataaaaatagtaattaagaacatttttagtagggtaggtcgggaccggaattttgggcacaaccgggaccgggactttttgggttgaaacccgggaattttagacttggaaaaccgggaaaaaacccgggaatttcgcggtcccggtcaaaactggtgaaaaccgggaccttggtactcagttgtccgtgttttggtcacggtcccgtcctaccctaatttttagaatagaatttctgtaagagtttttaaccaatttctgcaaaaattggcttttattgaaaattttgaaaattaatctgagcttatttgttgcacaactggtaaaatagaacttaaaaagcgcaaataaaaagggtaaatttagaaggaaaaatattttttcattgaaatttttaatttttttcatccccgttcccctgtttggtatccccgtttccgggaatccccggcttcataatcccaactttctccgttcccttttggatttcatcagggattctccctccccagcttcaactcattataaattactaaatttaaataaaatgaataaaatagacctcctaaagcctagtaggatttttttttaaatctctaaaaattaaaatctttcaaattgttaaaaatattattgaaatattcaaattagtcatttgcgttcgtacgtcgagtgatcaggccctgattcccagtaagagacgggggcagctgcacattcggcgaacaacacagctgattgcggccaaccgtactgcaaaatggaacaagaaattcaagaattcattagcacaaaaaaagtgaaaatttgaattacggcacataattaattaccgcagaattaagccggcccgacaacgagccaaaccgctgggaaaacgaagagcacctgtttattaaaaaaaaacaaatttgacgtattttttcggacaaattatcgtattcaataaataaatattgttagtttaacggacgttcgcatccgtccggaattgcgtccggtgagccgggctgtgggagttggtcaaaagtttgttgtattgttccgtttggtatcggttgttggccacagcacagctgtgaataaactaattaagtcagccttttttgtttttattttattcaaattatttaatttttaatgtaaatattttttaattttgagggattaattgttagtgtttttaacttgaacacttggctggtacacaagtgggggcggacaatcatttgctccggttgttatgtcgcggacaacctctacaaaaattaatttttatttaattttaaaaattctttaaaaattgctttcatcatcaaaaattttttatttgagtttattaaaaactttaatattccgaaatgtgtcgtttaggcattataaaagcgaagctaatctcaggaaaagtaaaaaattctcaaaatttaaaaattttcaattgacgcctatcagtttcacacagagaaaattaatttataaattattcaattaataaattaccataacagaaatattgctgcccatcaacaaactgttgtttttgtgtcgtgatgaccaaaaaaatgaaaataaatttgaaaatgtgaaaaagcattttatgacaattggaggaagaaagaatatgaatgaataatggccaaggagagggaaggaagtcggaagaatgaatgccttccgtgggatgaccacggcatttatatacacataattatcattattattaataattattattatt

SEQ ID NO: 13711 - DNA, 1327 bp, Heterodera glycines
ttgaaatgctggtgggttgagtcccagagattggaatgacattgaaatgctggtgggttgagtcccagtgtctggaatgccggagatttgagtcccagagattgaaatgctggtgtgttgagtcccagagattgaaatgctggtgggttgagtctcagagattgaaatgctgctggtgggttgagtcccagagattggaatgccattgaaagttggtgggttgagtcccagtgtctggaatgccggagatttgagtcccagacattgaaatgctggtgtgttgagtcccagagattgaaatgctggtgggttgagtcccagagattggaatgccattgaaagttggtgggttaagtcccagtgtttggaatgccagagatttgagtcccagagattgaaatgctggtgggttgagtcccagcgattggaaagcctgagaattgagtctcagagattgaaatgctggtgggttgagtcccagagattggaatgtcattgaaagttggtgggttgagtcccatttgtttggaatgccggagattttagtcccagagattggaatgccggagaattgagtcccagtattggaatgctggtggcctgattttcagtgatttgaatgtcattgaaagttggtgggttgagtcccagtgtttggaatgctggagatttcattgtttggaatgtcggagaattgagtcccagagattgaaatgctgctgggttgagtcccagtattggaatgctggtggcttgattttcagtgattggaatgtcattgaaagttggtgggttgagtcccagtgtttagaatgccggagatttgagtcccattgtttggaatgccggagatttgagtcccagagattgaaatgcttgtgggttgagtcccagcgattggaaagcctgcgaattgagtctcagagattgaaatgctggtgggttgatttttagtgattggaatgtcattgaaagttggtgggttgagtcccagtgtttggaatgccggagatttgagtcccagcgattggaaagccattgaaagttggtgggttgattcccagtgtctggaatgccggagaattgagtcccagagattgaaatgctggtgtgttgcgtcccagagattgaaatgctggtgggttgagtcccagcgattggaaagctggtgggttgagtcccagagattggaatgtcattgaaagttggtgggttgagtcccatcgtttggaatgccggagattttagtcccagagattggaatgccggagaattgagtccaagtattggaatgctggtggcttgattttcagtgattggaatgtca

SEQ ID NO: 13712 - DNA, 862 bp, Heterodera glycines
acctccaagtttgccaatttcaaaaaaaattctcattaaaaaaagaaaagttcgcaaaaaaatgatgaaaatatttattaaaaaatgccaaaatgacaaccaaaactcaaaattttcgtatttttggggctgtactttttaaaaatttccaaaaagtcgatctttaaggatgtatttttcgctttttttttgcatttttcttgtgaaaatttgccaaaaatggccgaaatatggactaaaaacacaaaaatgccgaaatatggatttattccctaaatcccccaaaatatggatttatatcaggtctggactattacggaaattacggcctttttggagttacggattacggattacgggttacggatttttgtgatttatccgtaattttgacccgtaagtggctttttgattatattattagcatacataaaagggggggggggcgggaggctagcgaagggggaaagaggaaatgccgaaaaaattagctattttttaacataatttgttaaaaattctgaaaatttttcctcggcggcgcttatcggcaccgcccgccccaaaaactcctaattatttttaaatatttttagacagaattttatagaaaattgcataaaattttcaaaaaaattttccggcggcgcctttcggcggtgctaggtcgttgcgcgaaacccgcaaaaatgattacgtcacaaaaaggggggcgttgcgcgaaaaccgcaaatatctaacaaaagagaccgggcctcatcagtacgctgtctctgattgttaaatttaaaaaattaatatgtgtttcggcccttaaccgtatacacacaagccactgcaaacaaccaaagcaaatgaagaa

SEQ ID NO: 13713 - DNA, 1936 bp, Heterodera glycines
  unsure (1)..(1936): unsure at all n locations
tttttttccctttttcccccccaaacccgggaataattttttttaattttgtttaaaagggttttttaaagggtgagattattgataattatgaaaaacttttgaaaatttaggattacgtattacgaattagcttttttgcccctcggtatgggacggatacnggatggccgtaactgaaaaaaattgccgtaattacggattacggatttccgtaatgaaanatcagttacgtccagcccctgatttatatagactaaaaactttcaccaaatcaaaaaattttaacgtagaaatactatttttaagcccctttcttcattgaatatgcgcagaaaaaaatatgttaatccatataatttacaaccctaattattagttaataaattattttcttcgtttaacttttaaaaactacaaagtgtctcattttgttgaacaaattcgcaggaacaagaaaaaaaaatgtgaataataaaagtgaaaaatgttgctataatatcacaagaaataaactgagtgaaaataatagtattgtttcaaagtattattatttaatcctcttttaaaaataaaagtgatagtaattttatagttaacatgtttctaatcagaaaattaaggcgaatgctgtgatcagcagagatacaatcgtatgaatcccaacaaacgggaccgggaccgggacctggtactgaaaaacacgtagaaactgagtacgaagtcccagttttgaccgggacctgaaaagtcccggtttttcccggttttcccacccaaaaagtcccgatttttcaattcaaacgtcccggtccggttttgcccaaaatttaaaaattactttatattgaaatatttatttgaaaaagtgcgataatagaatcaaaaaaataaataaataaaaaaaaaaaataataataataataaacatattcatattcaatacttttttgatatgaaaatattaactgaagacatcgatcgacttaatcaaaaatttaataattaaatttagcaaatcattaactttttaattataataaataataaattctttattaaggtaagaaaatcgaatgttaaaatttacaaaaaaagtaaaataaatcctgaaattataataaaattaagttataataggtaagactatcgtcgatgatataaacataaatatatttaaaataatattctaattatagtttttgcttttttttagaaaagtaatgaaaaacctcaacaggggccacagctgaatctatgaattttcaatggaattttaaaagaaaaataataaaattccatttctgcaaatcaacaaaatttttttaagtctttaatattccaaattattattcgattattaattttacaagaaaaatagtaatccatttaatctttattagtattttagaaaagatatttaaaaaaacatgaaatcttaatgagataaagaagtatattaaaaattttgacaagcacaaggtgtagaagagtcgctgggggtgagaggatggatatcaataatacaattttatttaattaaaacaaatgaaacacgaccattagaacaaaataacgcaattattaaagaaaatgtcagggataaaacaattataaaaaattaaacataatattaaaaaaatatatttgtttatcagacaagaagaaataaaacattctagcaatttactttaataaattatcaaaaaagacaaaatgtaataaaaagatttacattgtatttttttagaacatcgaaaaaaaaattaaagtttttgaaaaataaacaattaactaaattttttgccataacaaaaggaagaaataaaaaataaataaatatattcaatatgtttagcataaattattagtacaaaaaattcgaaataaaaattgtaaattaattaaaaatgatttcaaattcaaaatccccaac

SEQ ID NO: 13714 - DNA, 1602 bp, Heterodera glycines
  unsure (1)..(1602): unsure at all n locations
tcaatatctaatatttttatttgtaatttntagaaagttacattatttcttataagaactgcaaaataattgacatgattaatgatattttcaaacatcttcaaanatatacctattatttaagcgaaatcaaaaaaaaatagaaagtttatcaaagatatattcagattaaacgaatacggagacatattatgaattattccttgttaaattaaaaataaattttatttgaaggtttttaaaacaaaaaaaaaatgaaaatttggaaatgtttttagaggaaatctttttcaaaaacacgaccaaataatttaaataaaatttagctctaatgaaataatttaaataccatggaagataataatttgatgaatgtatcagaaagagataaataaacacaatacatttataatgatcattttttatgaagaagaaataatgactaaattcgattatctaattaataataatttaaaaaacaaatgaatttaaagaaaattaaaaatgagaaaaaaccaaaacaaaaagctcttaatgcgatgcatactcaactctgaacttatcaaccaaagcttgacgagaagaaaataaaggattaataagaaataagagaagaccacaaatttcaaataaatataagtttatgaaaagcaataaatttataaaaactcgaaaaacaatttaaaattagatctataatttcaaaaactaataaatttaaatcttacttaaattattaaattttaaggaagtatggctatgctgaaaagctaacaatacaaaaactatggtagaaaataatattatcaatgcacatgaaaattgataattaaatataacataaatataaatttattttgtttaaattaattaaatagaaaaggataagagaaataaaagagagaaaataatttaaaaataaatttaattaaagtaagttgtataatatttttaatgaaaaattaaagcaaaaatatatgctaacaggtcaattctagcagtatctagtccctggtcagttatgaatcaaaaaataccgtttaataattatgtaaattgaatagaaataattatatataaagaaatgtaataaatttaacaaggaaatattgctaaaaataataattataaattattgataatctttataatccagtgagaaataaacagaattttagtgcctaaaaatacatttagaaaaagcctttaaaaatgctaactttttaaaacaatattccgagtatttatgatatgttaaaaaataacgacgcaaagttaagatttttactgttatcaatctaacaacatatatattgcagttatcaaatgtcaataaattaatttaagaaattatttattattttgttttgaagaaacatttttttaaattaaatatccatacaaaatttagaacaaataaattaaaaaccaaaaaaaaagttgaaaaaacaaataaataaacaaattatttcagaaataaatgattaaaattaatttcttaataatcttcgatttatagtgagtgacctaaatattttaaaaagtaaattaaagaaatatagaaggttacccaattatatttaaatgaattttccccaaaaa

SEQ ID NO: 13715 - DNA, 1238 bp, Heterodera glycines
  unsure (1)..(1238): unsure at all n locations
gcttgcacntgcgctgcaggtaaaaataaaaacaatatcccaaatggtttaactgtgaagccttaatggcgncgacggaggacaacattaggaggagaaaccatagcaaagngagggaaaagacgangaaaggggcggaaaaggcgggacatttgccaacagaagnaaagggcatgggaaaanaaaanaaaggaaatgcaggggctaaatgatgaaaaaatgataagcaatcaaatgacaaacgaaacggagaatctgacaacacgtaacgtattgattagagtgtaaggacgatcaaaaagaagcaaaatgggggggggaatgcccaatcacacaaaacaaatcaatctatccatccatccgtccccacattcattattattcgggaagaacaaaaaatgaatggacaattgggtaaaaaatggagggaccgatcaaacaccgacagcagacggaggggaggggcaaaggatggggggaaggggtcctctcaaccgggacggactggaatgactgatgacggaatgcatcccttgcctatccgtttattgaaatgggtaattgaaaaatgtaagcaaaagaatgaatcgcccccattgtcattctgtcatttgtcactcgtccgttggttccgcttccaacttttgcgctctcttcagttgttcctctgttctttcctcctttttcgccgtttcggaaatgccaattaaccgtcggacggtgcacattgtgagtcctgccgggtgatggtccaactcggggttcaatatgtgttccactgtgaagtttgatgagaaatcgggtgcccagctccaatgaaaagtgatggcgccgttgtggggatggccgtccgggtaggaagctcttaaaacatcaaaagagttaactctaagacccatccacccgatggacctaatatcttccgagaagtatcccaagaaagaatcatagaaatttgtgcatcggttttgttgtggtgtgaccccgggcctcggcttcacttcctcttggttgcgctcatttcgagtcagcataaaattcgcttaattttatttggttcatttgactgtcattccgtcgcttttttttgttgtcattttggctcagtctgtgctgtcttctgcccgtagccaacgaaagagtgccgtcactcattttgttttgggcaaggcgtcggcacacattccctgccgatttcangaccccctgcacagtcatcattgccaatcccttgatga

SEQ ID NO: 13716 - DNA, 2869 bp, Heterodera glycines
cggagatgcattatcatttgtgggtttgctgtcttctcataaaagggacacgaaaattccaagcccccgcgacgccctccttttggattcctttcgaaaattgctctccgcacatacaatcggttcactgctgctgcgaatttgtgcgcggctgcgtttctggctttcaagtcgaagttggcgacattgtcctcgttaagtacggccgcgtccaaaacccaaaggcaattgcccagcggatgcatgcttttgccggtgtcttcgaaaagagttgtgcacatggcaagcaaaacggtgcacttcggaaatgtccctttaaccgattgaaaagcttcaaaatttgtgccatttcgtcgatgcatcatcagcatggtcctgttctgaacaagtaattgaattttaaaatgaatcattgcgcaaagaacccccatgacggagaccaacaacacgggaccatcagagtcacacttcggcatcaaaagtgctctcaactcagcagtgtcagagcaccgcctcagcacatcctccgtaaaacgcgcaatttgtcgtttgataggaaaataaagcttctaaatatttgaaaatacaaaagcattagtctcattccgcttcgcatttggtgcttacatctccgctgtatcgcctgaacatttcgttggcagtttccggtcgttggttttggtaaatttgtctctcctcgtccatttgtgccgccgttctcttccgattaaaatatgtagggtcttttggcctttcaatgtccggcaattcccaatatttcaacgcctcctcccgcagtttggcctggtcttggtcgaatgtgcccgggttggccgcgaaatgtttgtatttcctcagatagaacacttgacgtcgagctgtccttgacagaatgaaaaggtcgtcaattccccaatgtttgaatgaatctctcactgttcgatgctttgccgaatgtacgccatgaaagtgtcgtcttcgctgatcacttcatcaggcaccaattccataatgtcctccttttttctgtccatcgattccattcgtttattcacttccatcaaatattttttaacctttgtggagccaaataaattcagattttcacaaaaaatatatctaaaatgagaattaaaagaaatgtggaaaggattgacggaattaccgttcagaattggcgggtcgggaagtgatcggtttatgaagagagacacggtcaaaagagagatacctgcaaaagagggggaatgacgaaggaacggtttaacgaacttcgaaaggcccgctattatttattttcttaaaatatcaattccaaagtttgctgttttttccgccctatcattttgttacagttaaagtatttataagatttaaaagttttgttcacatcaaataaataagacccatcgaaaatggggtgaacacatcgaacagtttgcacagaaagttgccgcccttttccgtcactttagcatttccctctacgttttcctctttgattttacgcctttcggcacggcataaagacagtccgacaatgaattggcacagataaaggcgtttggaaaggacctcctgaaggttttcctggccatcgacagaaaaaccgccatcacacatcaccaaatggacccctaagcgaaaaggatcggaatgcttcaatcttaaaacatgcttccaaccagtgtggatgcggtcattcacaaacttttccaacgattccaaattgttcggatttgtcacgtccccatcctcattgaccccataaaatgtctcaaagtaatcagatgaagcggctttgaatctttccaatttgaaatcgtcctttccttaaatccaatgttgtcatttgatcaaattcgggaaagagtgggacagcaaaaaacatattttttaggctttttcccgtcatttcgacctcccctcccttttcttttagaccaactccctcaatacaaagggatcatttcaaacctgttaaagtaaagccgaatcccttggcgttgtaaaaggctttccgccacaacatatattcgctaaatccgccgggccccgcgcaaacatcggcgaagtaaaaaggaggagaaaaccttaaggttgactcaacaagaaaataacttgaaaacgcacctttcgacgttgtcacgctcattttcgttgagagggtttttagccaatcgcctttcatcgtcaaattcccagctgagacgccaatcgaatattttgtcgaggtttgctgttttcatcgcagctctgcaaaactgggaaattggtgtaataataagtttgaatgcaccaaacaaagccaaaaagcatgcgcaattacctgttttggaagaatcctgccttaactgtttcgtatgggttggctcgtgacctggctgcctccacttccttacggtccattgtatcgaaaacatttttggcttcgatcagttcagcgatcagttcgctgggacaatatttgtcttgtttcatcaactgctcgtcttttgtgataggctaaataaaattttaatgacaataaaacgagaagctttttagagtatggatcgacaaaaacagagaggaaaccgaaaaaattttctttaccacgctttggttttcgaccccgtactcttaaaaattcaaatcagaaatatgacatacagcgcccagcattatccacgagtcactcagttgaccaattaagcagttccgttgctcttcttcacatttcagccattccggcgcttcttccacgggtttattttccaattcgttgttcaaaaatgattcaaattcctaaatatgatataaaaattttcactttttcgtaagactttattggttaattttagggctactcgactctctctctctctga

SEQ ID NO: 13717 - DNA, 1995 bp, Heterodera glycines
  unsure (1)..(1995): unsure at all n locations
tcaataatgagattttacgaaatattcttgctttatgccttttttttatattttgtgttttcaaattttgaactttttcacgtaaaatttcacgtaacgcacgtaaaatacgttgtagctataactaaacgccagattcatgagcatcaaaaattagcctagaaaaaattttttagaaaaaaaatttcaggggggtagcaaaacccggaagtaccgaattttaattcgtaaataattaaaagggagtagccagaaggtttggaagcgttgattatcatccacatgattttccagggatgatttggtaaatttttcagaaaatttttactattcttaacaaaattcagtaaaaaatcacattttcctctcgtggcgcattcacactagcgctcaaatgtttttcaattttgagcttaaaaaatgtcaaaatttgatttttacataaaatttgcaaccttacgccgaattttcaaaaaaaaaaacggcacccatcggttaaatgtaaattataaatggaaagtttttgaccttaatttgggtgacaaacataaaaagaaatctttatgctttataggacaaataaaaaaattttttttcaattccttttaattatttaaataattattttaaatttagcactaaattacaacacttcgccaactgcagaatgttagctgaatttaaatgaatgaatatttaataaaaatgaatgcttacatatattgacgcttgtgtattgttacataaatgttaattgaaataattagaataaatatttgccttaattaatttgctaataaataattaaattaatttattgaaaccttttaatgctaaattagttataagtagaatatataatgttaaaaaattttaccaaaaaattgtaaattttataataaattttagcgaaaaaaatttaataattttttaatttttccgtctaacaaagaaaaataaattattagttccatccaattattgcaaaattttgatgcttttggaaaaatttatgccgattgttttttatatataatcttttttttgattttaattattttataaatctatttaattattgaattaaaaaaaataaatatatattcaaatttatctaatttttttattcagattaaaattaatttctacatatgttcataaagatgaataactatgcaaaaataaataaatgttaataaaaataagcattttgatgttttccatcattttctaatttatgaaaaaattttccatttttatttctgattttctatctcttttctccaacgaatgattgggtatgatgaaaatgattgttggttgccacacaacgccacaatttttttaaatttattttttgtcaaaaaatattcattccttgccctctctcaacgtctgattggcccacctcggctttatccccgtcccccctacacctgtttttccgcttcacttgctccgacgaccacgacgaccgatgaattgatcatttaatcacttgtcgtgtatcgcctctgaacaccgcctccatccaaaaagcatgcccattttttgatcaccgcctaagggatgggatggacctgtttcggggcgggatgctttctttgtttgatcagcgacagcagatggtgtggcggtggaaaattgcgtaaaaatttttatgaatttcctttttttggatcattgttactattatttggaaaataatttgtacattttatgatcggttttactctgtctgccaagggacgacgggtcgcacaaattgttgcaaaattaaaagtgattggaagcacccggcggaggggaacggatggatgattgagcacacaaataaaatttactaattaatttgatcatggcatatgtgcaataatcaagcggaaaaccttttttgtattaatttaatcancgatgctcaaattgacccggaaatgngtaattaggtttggatgagttgatcacaattatctacaatttggcaattatttgatc

SEQ ID NO: 13718 - DNA, 1554 bp, Heterodera glycines
ttaaagagataattagggggtaattcgcgtaactaacttacgttaatatcacctaacattattttttcatttttccatcaacaaaaaattatttttcaccaagataagcatctcgagcagggattaattaacgcctctattaaatgctcgattggttgttttttgcttttgcaactaatcagcaataataaacgccccgtcgggcatgcaaattaatgtgtgtgcatgcatgcatttgcgggaaaatgttgcccttagggcagaaaaaattattactcgcccaccatttttttatgatcattgtttgtcctttccattttcgcgcaaatcaccatcaccaatcaccagtagcagcagcagcagcagcaggtggtcacagtgcgcgagacaaaattatttatacgcccaccattcgctggacactttcactttcattttcgtcaacaggcaaaagcagttccaacatggcgcctccttcgacttcttcccattgttctctgtcccgttattttccccaaattttggtcgcttgaaaaattcattgggtaaaatggtgatcaaaattggcaacattggactgatcactggtttgattaggcaaaaaaactcaatcatattgggatgataataactgatcaattcttcatcggcaaaataattattaatttcctgctagagatataactgtttccctgtaacctgaaggtgttcggtgccgatcactgtgataacagttcgacagaccagtgatcagcagacaaaatttcattctcagaataatgggaaataacctgattagcatgttcgggttaataaatgagagattaatgcctgatcacttgacaaaaaaaaagaaagaaaaatagtaaaaaaaaattcctttgacaaaaagtgatcaaagcgtaaataacggggcacaatagcgatcaggtaaacttcagtttttgattaataggaaataactcagcagtgattgggaaggtcagttttctgatcatatcattaacctttttattctcctgatcagcagttggtgtcaaatgccattaatcactaggccaaaaaattttcaatttttggaaaaagtatatgcgctgactatttaatagaggaaaatattttcccatttattattgccaattaatatattttaaataaagcattaatatagaggtagataaacgagcataattagtaccataaatgatcatcgatcgacgctcgtcaaatggcaccgatgttgacgacacttcggcacgtgtggccgcttatttggcactttgcatctccacggcgatggtctgcatcactggcatgatgttgacctttttgcacaacgacacggcactgttgttggacgaaatatcaactggcatggacgaatttaatgtaaatttggtggggagtggagaaaattgaaattattttttaaattgattgaattaaatttgaagaaaaatagtttagttaataaaaatacaaaatataaaactaaaaatttgtgaagaagtaaattagattaaaaataggataaatattaaacttgggagttta

SEQ ID NO: 13719 - DNA, 809 bp, Heterodera glycines
catcaatttaaatatttattaatgtaattaaatattatccaaatcattttttagttcttttatttttaagttttttttatttaaaaatatgctttgtataattttaatcattttaataaattaacattttttttcagaatgtgccactgaacatgcgcagaattgtgcgctcagacccacagggacctacaggaaaagagggaatgccaggctgtaagcaaaattattattattttttaaatccagaaatattcaaaaaataaataaatcaaaattatgttcaaaatgccaaaattttaaatcaaaaactcggatgcaataaataaaataatatggcactctttggaatttaatttatacgccatttgccatatatttggggtaatttcagcagaatttccttcaaaatattcgtttgaggcgtcaaaaactcaaaatttttctatagaaactatttagcatttattatttattttgccaaaaaatctttcagtgaacggcgagccgggccttcccgggccacccggcatttccggcgttcaatttggcgagcagatgttcagtcggccatgcattcaatgccggcaaggaccgcccggcaaaatgggccgccgtggcgacgtcggacagagcggaccgcttggcccacccggcgtaccaggcgcgccaggacgcatgggcaacccgggcaaggagggcaaagtgggcgagcaaggtaattttgcaattattatcatcaaataaattgatattgataggtgtgcaaaaagtcggaaattatagtcattaatgatataattaatagtcaa

SEQ ID NO: 13720 - DNA, 3993 bp, Heterodera glycines
  unsure (1)..(3993): unsure at all n locations
atggaaattggccaaattcccatagaaaatttaaaatgtacaattaaaatctttcttttgttttaacaatttacaatttttttagttaatggtccaaattgtgatgattttcaaacaaaattgaattttatcgaagatttgagattttattggagcaaaattttggcaaatttttgggatagcgaaaaaataattcgtataaaatttgaacaaatggccaaagaaatgaggggaaacaaattaaaggcacagcaaatgattttggaaagccaaagaaaagagtttgaaattgaaaggcccgaaaatgaaatggtaaaaaaatttttaaattatgtaaaattaaataaaattaaaacaaaaaggaccgtttgttgctgtgggagaacggtcccacggacacttcgcttttgcgcgtcttcgcaatttgcgccagcgaagcgcttgaaaagtatcgaaacgaaagcattaacggaatacggtatatgacgcactcaaaatttattatttgcattggccaaaatttaaaaaatacaacgggaaaagacgaaaaacttatgaatttacacttggaaaaaattgaagaaatattgaacgatgacaacacaaaattaaacgaggattttttgttgcttttgcaatgctacagtaaattaaaaagaaaaaataataataattaatttcatatttaggaaatctgtggaaggaattttttaactctgaaggaattaaaaaacttgaaaatttgatttctaaggtaaactatagaaaaaattactcaaagttcttaaaatgtcattcattggagagtcattttttgcaagaaaatgggtttcaaatagagttgagcgggagaccgggaccggggcgggaaatcccgggtttttcaggtcccggtcccgatcccggtcccggtttttggaaaaacagaaatcccggtcccggttttgccagtcccggtcccggcgggactaaataagcactggtaagaatgggggtctgggtgagaaaagagaagggaattggtgagggatcagaaatttttgataaaaaattaaattatttattttcatttatagcatagttcatatgcataagtggttaagtggctaaacatttttactttcattatttgtctcttcggttcaattccctgatggaacagaaaaaatttttatattttctttaccattattttaattgaatttaattaataaaaaatatcttaatttaaaattattatttttttcatttttagtagcctaaaaacccataaattaaccaaattgtaaatttattttaaaaaatacagaattttgggactcagaaaattccaagaacccccctgaaaacaaaatttttataattttcctcgaactcgtcccccaaaacgtacaaaattttatgggtacatttttgaatattggcaattttcataacaaagtgcagttaaattttcaatttttttcaaaaaaaattttcacttgggaaaagtcccggttggtcccgggttttttcgcggtcccggtcccggtcgaaaaacttggtcccggtcccggtttttgtcaaatttcccggtcccgctcaactctactttaatggctaaccgaattttttattattactttttataaaaacaagcttcatttttaagatactgttacttattgaataaattctacatatttataaggataattttttcatgctttaaattgaatattgaattcatttttgtgcaccgttcgatgtttgtttttggctttctttttggtttcctcttcggtgttctgcttttgctttttattgtcgtcttttttgtcttcaacctttttcaaaatagaccatcatcttctaataatcatcatggctttcaagcgatgtctcctcaaaaaactcgaattcccaatgttagcctcattgacaagcttcaaaaataattatatgatttttaaggagctcaaagcttttttgcattcttgctccgttggtgttggctccgaatgggaaagttgttcctcgttgagtctactcttgcactttcttttccaagagcacaaagatacacgccaattccgcaggtcctatcgaaacagtgcgtttcaattgcggactccaaatttttctctagatggttttacaagaaattacagctagaactgaatgatgtcactgcgcgaagttcgaccgccggtcgaattatccatggcattcagatccgcgacctcgaagcgggcatgaactcgccggtggtaaataatgtgcgagtggaaagtttccaactatctgaggacgatcccgacctcttcgaagaattggtccttcttttggacgtcgattaccgtggcggttttcaaatgtctgttgatgcgaatatggcctttggaaaatttgcacaactctctgttaaggtctttcaagtagtcttctttgtttacgacataaattttattaaagttactccaactgaatggccgcgctcgtttttcaatccgacgccaaccattcgcccattggagtttctcttttgttgaagcccctcagatggatttgaaagtcgattctcagttccaaggacggagtctccgccatttaattccgttgattaattcggcctttcggaaggctatacagctcaaacatgtgtggccaaactacaaattgcgtttcagaccattcttccaaaatcctctctacagtccctcgcccaatacaggtccattttggaccatagatcgaatatccctgtaattctaatttagctgccttcgagcatgttgatctctctggtgccggcttagaggtgactgtcctgtccgcatctcgcctaaacttgtccggctttgagcattctgcaatgcgtctgttctgcatggtttccattggtaagttttgaaagcgataacaaaatccattaccaaatataaattgaatagagaagcgacccatcaatccgtaccaaactagcgaccaaaacacttccgaaaagttgagaagagccgctcatttgctcagtgtccttctgcaatttacaagaaaaggggcgggcggtcctttgggactggcattcaacgccaacggcaaggttatttttgacgaagggaaaatgttttgggtcaaatgtttcctccggaattttttgtactggaatgaattttaaaaatggaattttcgactttttgttcaaattcgggtctggggattcggaaggggcttaaattaatggtggtatatttacgatcattaacaccaaaaagcctcaaattattgtttctttcatgccttgaaaataaaaaattttgctaaaaacgcgcaagtatctgaagtaggtatcaccaaattgaattatcccaggaaacaaaaaaagtagtaaaaatttagtctactcacttttgcttcgtgctttttgtccttttgtacacattaaaactgaaggaaccgaacagtcacgagcttcgggtggccaatgttgagccggggtcgaatgctgataagagcggctttcgggtcggcgacactttggtagcggtgaataatattccggtgagaaatgagcgacaggcgacgcgacttctgacggggacagcgggggatttgctcgttttagtggagagagagcttaacgaaagtgtaaaaggcagcgaagaatcggcgggtgaagagacggaaggtatttaagagggagcaaaacggaaaagcctcgaattgcaatgctatcatcatcatcataaccccattgtttagatctgaattctgcgacaatttcgcgcgaaattcctatgaaagacgtggacttcatttcccccaatcggcgaaacttctctcctctcggcagtcgcccaattgaatattccgccaaggacgaaatttgaggggggacgagccaaagcgaaagtgcagaaaaaaacggaacaaaaacaatgaaattnggggaatttaacctctttaccaacagtgttggcgggaggatcagatacgaaaggaaccttttgaaac

SEQ ID NO: 13721 - DNA, 2958 bp, Heterodera glycines
tgggccgagttccgaatgatgagacacaaatagcagaagaattaattgcgttggataaagcctggatttttagggtttcctattttttacggattgtactttggatgaaagaagcacgaaaatcaattttatccaaaaaatttttgaattttgttcgtcttaaattgttgccaatgggaggcgaaaacccattgacaaaaacggaaggcgcggaaacattttggcataaaatgacgacggattggaagaaaaagggaaccgcaacagaggagaatattttgcaaaatgatgactagggaacggatttttaagcgcgaaaaagtccaaactaaggccttaaataagggcgaaaaaaccaaaatttggccaagaaagaaaataaattacaaaaattttggtcaatgaaaaaataaatttatgtggaaaattttttgaaaatttgcaaaaatgtgatctcgtcaagaaaaattttcgaataaatgcgtcaaaacgaagaatttccgagcgaaaaatgtgtttttcgtgcatttctcgtcgagttaaagccgcagaaaaataagcaaaaacttaaaaatccgatccctaatgatgacatttgccgggcgttttaccttatccccaaatcaatcaattcgatggataatttttatccaactttcatttgtaaaaggttagaaattttctttgtcaaccaaatccaacatttgttggtagcaaaaatggagaaacaagggaagaggagggaaatagcattggggaaggaggagagacggaagagaaagagaggaaaaggaaaaattcgacggaaggaagaggaggatgagagaagaatgaagcagaaaagagaggaacagcagcaaattgacacttttgaaaattttgaggtaggcccaaaaccgaaaagtaccgatattgttagatttggcttacgaagaaaaaagtgaatagttcaaagctccaaaacatgccaactgctgacggattccgatgcattcataagcagcgaaaacaaaacaaaataaacatttagatttttcattttcaaaccaacaaaaaacaaatcgaatcaaaacgaaatcgtgacaaaaaaaggccatttattcaattccaagtctccatccatcgtccgggttggtcgtgttcaaagagaatccggcacttccactccgtgttgatcagtagggtcgggatttctagtgaaaaactttttttttgctcgattgatttgaagaaaggagctcaaaaaacgcatttctgcattaaaatttttccctttggacgtcatttttcgtcactagaaatcactattttggcgtttcgtcacttaaaatagtgaaaattcacttttttggcattttgtcactattttttcactttttcgacatttttaggaaaatttgttaacaaaaatgccataaaatcaaaaaatacaccccctaagaatcgaccaaaaaattttttttaaatagaccactaagaattggaaaattttttcaaaaattcttctcccaaattttttttcttgacaaaatttttgatttaaaaaatgtcaatatttgctaagagaattttataaaggaaatgtagctcatttgcaactgcaatcagtgaataaaaattattttttgctcaatttttggctgaaaattatgtcactattcgtcattattttagttaactatttcgggatttttcgtcactaaaagtcgcgtcactattcatcagatctaagcgacagtgacgactcagcgtttattggggcaagtccgacggtgccgataggcgccgccgggaaatttttttgaaattttggctatatttaacggattatcaataaaaaattattatttttatcaaaaaaaactcaattcttaccagtgtattttactcccgttttttgggtaaaatttccgggagcgggagttcaaaattttccgggatgggagtcccgaacggggaatcccgtaaaaagcccgttgggcaaaaaagttcgggagcgggactcccgtaaactcccgcgggagtcccgatcccgccggtctctaccaaaaacactccccacttttgacacagaatcgctgaacaaatttttggaccatctctttttttctcaaccaaattaaacatattttgtgaaatactctattaacctgcataatgaatgacatttcgactactaagccaaaatcggacgtattaatttgctggcttattgtgacaagtacatacggccatttttacacatccaatttatttacatatatttgagaggattttcttcataaaatgaatttgatcactatgatgaattatgatcggtcggtcattcttaatattaattcatttcttctgcggctgatcactgtttttgttgttttgtccatcactcattttgtcagcagaagacggcccttttgtgatgctttgtccggattcttctgcgaatggtggaggagacaatggcctaaattaggcggaattttaattatttaaacaaaattaaatgcctttttttaattgctcacccaatgcaattattgcaaatgtaaagccaaatgaacacattgttacaattgttgccccaattttcatctttcttttgctgctgaaccgccgcggtctccccaataattttgcatcgtttcattatccatcggttgcccaattcctttgctttggccaatgtcagcttttcctttgtccattcgttaagaaattcaaatggcaccatttgtattgacggcgcaggaacagaaaaatgaatttggtaactgacggaagaaatggcattggcacggagaaaatgctaaacaatttgattggaaaaacaaaaatcacaaaaatgttggggcacacctcccttgaattggtgatccaatcagaggtctcttggtcgttgaaatatttgcaatgcaatcgctttggttggccatcttttctccgggtgggcaaccattt

SEQ ID NO: 13722 - DNA, 1064 bp, Heterodera glycines
ccccaataattttgcatcgtttcattatccatcggttgcccaattcctttgctttggccaatgtcagcttttcctttgtccattcgttaagaaattcaaatggcaccatttgtattgacggcgcatgaataggaaaatgaatttcgtaagtgacggaagaaatggcattggcacggagaaaatgctaaacaatttgattggaaaaacaaaaatcacaaaaatgttgggccacacctccttgaaattgttgatccaatcgaagttcgtttgttctttaatgtctttgcaatgcaatcgcttgggttggccatcttttctcggtgtgtgcaaccatttggacaatgcttggccagcagaaattgtttcatttggcacattaaaacaatcaccaatcgcagcgggcaacaaagcaccggaatggattgaagtcaactgatcaagatcggtgagaattgtcggcgaagtgcgacgaagcaaattgtccaaatgatcaccaccggtaaagcgcaaacagcgaatgtttgtcgaaaaaattggccaaatttcacgaccaaaaatgtcccaaatccggtggccatccgtggtgtttgaataaggaatacacaaatgtaaatcgatgcctcttttgtcaaaaatttggtgatttgaacgaagaaaagcgatgacggagtgatcgatgtacctgaaaatgggatgaatgcttttattgtcataaagctttgatttttaattactcaatccgaaggcgcttaaaacggattttgctgggcaacagacggtcgggcaatggaaatggcacaaatttgtaatcgaaccatacaaacagcttcgtttctggtcctttgtccttgcgacgaatttcgattggtctccaaattgtcaattcgcttttgccatcgaaatgtttgtccaccaacgcatcgaaacgtggcgaaagaagtgccaatttgaggccgagttgaggacggtcaaaacaaggcaaaatgtccatccaaacgtcgttgcaaatccaactgaaattataaaaacagtttattgttagtgaaataaatgaagaatttgtg

SEQ ID NO: 13723 - DNA, 1525 bp, Heterodera glycines
aatcaatgaaatcattcatagattgttacttcatcattttcccaatgttttttgtcctccaaaatgtccatcaaaaaccattttttcgccaccgtcgacaaaacattggcacccaatttttggaattcgttaattatttccgtttcgtccatttcaacagacaaaaggcccaactgctgcaaatattccattttcatttcaatatcgaagttcatcaagtgttccttcaaattttcgttgccattcgctggtattttaatgccaaaaagccaaactttgccaaaattaatgctaaaatttgaacaaattaattttttaaaattttaaattgaaaaaaatgaaggataataaattttttcgggcgagcgacatttttttgttttgtatttgcattaatcacttcaaaggtcaaaatttctcgggataaggtaattatagggtttatttaatttattgatgacccgctcccctccctcaacgttatttcatgtcaattcaaccccgattaattaattaattaattactcccgcccaatttgtcacctgaatccccggttaaccaattcgtccacaattttgagtgttacttctctgttcgcctccgtgtccattacaccaatttcaattttttttatattttttatttcaattttgtccattaattttgttctaatttttcctttaaggaatttgcataaattgtcataaacatttttctgctccgccacgcaatttatcacaataaaattactatactaaaaatgaagaaaattttaaatcaaaatcaaattatttctttgaattcacgacaaacaaacatcgtccaaattttaaattcagactctggtccaaaatcccgaggagggggagaaggcggtgccgacaggcgcctcgggataatttaggtgagatttactaacagtttttgtacaaaaaataaccaaatttgctcgcgatttttgagtcaattttttcgaatcagggagctttttaggtctgctggcggtgccgataagcgccgccgggaaaattcaaaaaaattgcctgcttcttaaattttgatcgctaaatgcagtgcaaatctaaaatgagtacactcgagggcactgattaatttaaaacaatttaaaagaaaagaagatttaccctttccacaaatgccattaggttttcgtgctccaacaaaacataatttaaattgctgttgcctttttcgtgcgcatcttcttccattttttgttcattttttgactcctctttaccacttctcttatcacttatcaaattgctgtcttccttttcttcctctgtctgctcctttttgtcttctttttcctcttccttttcctcctccttctcctttttgtcttccttttcctcctccttcttctccttttcctcttccttttcttcccctgtctgttcttttttatactccttttccttttcttttgtctccttttcctcttccttttcttcctctatctgctcctttttgtcctcctcttttttcttccttttttgc

SEQ ID NO: 13724 - DNA, 1404 bp, Heterodera glycines
tttttcgaatcagggagctttttaggtctgctggcgctgtcgataagcgccgccgggaaaattcaaaaaaattgcctgcttcttaaattttgatcgctaaatgcagtgcaaatctaaaatgagtacactcgagggcactgattaatttaaaacaatttaaaagaagatttaccctttccacaaatgccattaggttttcgtgctccaacaaaacataatttaaattgctgttgcctttttcgtgcgcatcttcttccattttttgttcattttttgactcctctttaccacttctcttatcacttatcaaattgctgtcttccttttcttcctctgtctgctcctttttgtcttctttttcctcttccttttcctcctccttcttctccttttcctcttccttttcttcccctgtctgttcttttttatactccttttccttttcttttggtctccttttcctcttccttttcttcctctgtctgctcctttttgtcctcctcttttttcttccttttttgcatttttctttttttgttcttttttccgtttgtttcatttcgtcccatactcttctcttttccttcagttttattcatcacaaattcattttcattaaatgttattccattcatttcaaataatttttttatgttttccattttcaaaaattgcagtaaatcttttcgataatattttttctcatcttaaataaaaaatatatttaaattacctaattaaatatttaatatattttttaatttcattggcttacaatttttttcatcacaaatttcattgcccgcttttgacgaaatttgcagaaaaatacttccaatttggagcaaatttggacaacctagaaattcctttttaaaattatttctcatttaaattatttaatatttttacccaaaaatatttctctcatttctctgccgatctcttcgtcgtacaaatgctttttcaccgtctcaaaatgcatttgctgcaccaattccaacggttgcgcaattgtttcgccctcctcctccacccaatccaattccgaaattgtctgcacaaaattctggcattgattccattttttcacggcattttttgaccgttttttgatttcattttgaatgaatttgtgaagctctaaaatttaactccgaatttcccaaatgtgctactttttaggtcaaagtcacattctggcatttttaaagagaacattttgggttttgcccaaaatttcttaaaaaaataaaacgaaaaatgtaccccttaaaatgtcaccccactcatcatggcaatgctttaatcctttaaaccatcgtggcactttttctcgacgaaagcgcaaaaaatgcggcacttacccgaaaaatatttgctttgataaaggctcaaccgatt

SEQ ID NO: 13725 - DNA, 837 bp, Heterodera glycines
ccatttgactttcggccgatttttggccatttcactcaaaaattggacgtactgtccaagtggacaaagcatccgacccacgggccattctttggaggggcaaaaagtttcggaaagtgccatcatcgtaaaagtatgcgctttggcatttcgagtttcttccacaatctttgggttttttaacagattctcctccttttcttttgcaattccaattaattgtttcattgccaatttcgtctccgcttcgcgcgacgttttttcatcagaatcaaaaatcaaattgtacagctcaatttgttcgtccgcattgagtgtcacttaattgggggggggggggtatttaaaaagggtaaatgattttaaaataaatttaaaaaataaattaccaaaattacgcaattttggcaaggaccaagcatttgtggcgaagaatttggttaattcgggaaacttctcagacaaacttattatcagcgaaaagtgaaactcgcaacttgactctgtaaaatcttgcatcattttttgatggaccaattcattttcacaattcttttcggaccatttcaaatccttttctgctaatggttttaattgcgcaatttgctcctaaaaataagaaaagataattaataaatcaaattaaatggctatgataaaatcaaaaaataggaggaacaaaaaatttaaaagactaaatccaaaaatttagattaaatattgcatatttctttccactaaaacaggactaattcttcaaaaaattgcaataatttctaaattatggcttatagtatctgttaaaaatgccaaattttatagaattaactaagaaat

SEQ ID NO: 13726 - DNA, 1279 bp, Heterodera glycines
aaatttgtaccacattttactgtggaatgtcccagtaccttaattggacaattacttgtcaaccaacacagtcgcctctggcctcttatggaacagaaaagggtgaatatcagatggggtgcgtcccttcctaaaaatttctcttttcgtctaaccatccctccctttttgtgcactatttcattttcaaaattgggaacatttttttgtttgtttctttgaaactaaaatgtaaaaaatttaatacattatttttgattttaaataatgcttctgtttcgaatcttttggctttaagtaattaaattgtaaaaattcaaatctaaaaattctcctctgaagttttgaacttggcttcaccctgcttttaagtcccaccgtgaggcgggacagttccaaaatttgtaccacattttctgtggaaagtccaagtaccttaaggactacagaagagtcaatgacgcagtcacctttggacagttattaaaaagaaataaggaaatattcgatggggtgcgatcctttcaaaaaattactctcgtcttctaccccccccccccccctctctttttgtgcactgtttcgttttaaaaattggttccgaaattttttgactctaagaaattaaactataacaaataattctctgaagtttttcacttggcttttaccatgtttttaagtcccaccgtgaggcgggacagttccaaaatttgtaccacattttctgtggaatgtccaagtaccttaattggactactacttgtcaatgacacagtcacctttggcctcttatggaaaagaaaagaggaaatatcagatggggtgcgatccttcctaaaaattactcttttcttctacccccccccccctctttttgtgcactgtttcattttaaaaattgggaacatttttttgtttgactctttgaaactaaaatataaaaaatttaatacattatttttgattttaaataatgcttctgtttcgaatcttttggctttaagtaattaaattgtaaaaattcaaatctaaaaattctcctctgaagttttgaacttggcttcaccctgcttttaagtcccaccgtgaggcgggacagttccaaaatttgtaccacatattctgtggaaagtccaagtaccttaaggactacagaagagtcaatgacgcagtcacctttggacagctattaaaaagaaataaggaaatatacgatgaggtgcgatcctttcaaaaaatactctcgtcttctacccccccccccccctctcttttt

SEQ ID NO: 13727 - DNA, 1143 bp, Heterodera glycines
  unsure (1)..(1143): unsure at all n locations
gcagtcacctttgggacagtattaaaaagaaaatagggaaatattcgatggggtgcgatcttttaaaaaattactctcgtcttctaccccncgcccncctctctttttgtgcactgtttcgttttaaaaattggttccgaaattttttgactctaagaaattaaactataacaaataattctctgaagtttttcacttggcttttaccatgtttttaagtccaaccgtgaggcgggacagttccaaaatttgtaccacattttactgtggaatgtcaaagtaccttaattggacaattacttgtcaaccaacacagtcgtctctggcctcttatggaacagaaaagggtgaatatcagatggggtgcgtcccttcctaaaaatttctcttttcgtctaaccatccctccctttttgtgcactatttcattttcaaaattgggaacatttttttgtttgtttctttgaaactaaaatgtaaaaaatttaatacattatttttgattttaaataatgcttctgtttcgaatcttttggctttaagtaattaaattgtaaaaattcaaatctaaaaattctcctctgaagttttgaacttggcttcaccctgcttttaagtcccaccgtgaggcgggacagttccaaaatttgtaccacattttctgtggaaagtccaagtaccttaaggactacagaagagccaatgacgcagtcacctttggacagttattaaaaagaaataaggaaatattcgatggggtgcgatcctttcaaaaaattactctcgtcttctacccccccccccccctctctttttgtgcactgtttcgttttaaaaattggttccgaaattttttgactctaagaaattaaactataacaaataattctctgaagtttttcacctggctttaccatgtttttaagtcccacagtgaggcgggacagttccaaaatttgtaccacattttactgtggaatgtcccagtaccttaattggacaattacttgtcaaccaacacagtcgcctctggcctcttatggaacagaaaagggtgaatatcagatggggtgcgtcccttcctaaaaatttctcttttcgtctaaccatccctccctttttgtgcactatttcatttcaaaa

SEQ ID NO: 13728 - DNA, 2140 bp, Heterodera glycines
  unsure (1)..(2140): unsure at all n locations
tgtcatcggattacttgaaaaactcgacaccaaattcttggtcgtccatcctgggtttcttttttggaatgcgaaagtttccattgaaaagccctgaagaactaattttcatagcattgaaaatatgcagtttcgttgatcaaataatagcatttagaagaaattggtgcattgaagaacagaccgacngggtccgacatttgtctgtgttttctcggcaccgtccatctgatccgctggttgtgaggtgtgctctccagtggcttggactgtgccttcgtgttcattctgaactccgtccgattcgagtcttccatgtttgaccatgccaacctgttgttcggatgggtcgttgttgtcttcggaaatactgttgctgttatcgtcattctaaagtgaccgcttgaaaacgtactagtatctttttttggttttctttaccctattccgtttattggtgtgtggcctttgtttgaatacatctttttgaggcttgcaactgaacaccaatttgccatctgccgcagcttttcgaacttccactgtcctcgtttcaccgtcttgaaaggcttaagcagttttgagagattaattaaattgcaattgatctttttttacattcattcattgctagtacggaagcaaaactaaaattaaattaacattacacaccctgcgcaattatcacttcgcccttagcattttttgttgcttcaactttgacaccctttcgcttgttaatttgttcccgtatttgtttgagcttgtcgaaagcctggtccaattccttttcttctctggtaagaaaagtcgaaaaactcattgacataattaaatctaaaaaaattgagggtaacagtttagaaagatggtattgatgcttatttggtgtcaacgctctcaattagaaatattatggtgaaaacgaagacacaaccagattaaatgtaaaaggaccaatcatccgatcaaacaaaactttatcaatgctgcctttaaacaataacatatttgttttgggtattaaactgctaatttatacgatcacaaaatgcgccaaaccaactttaaattaataatgagatcaagttttgttttattacaataccgcttcagtaaattaaatagcattgagctgttttcatataccgttgtcagaataagcaaacaatttagcgccaataaagtgatacccaaattacgaatgagcggacagtaaaatgacaggcaaacacagaattaacaaaacaaaaaatccatcacacaaacggctcgttaggtcatcttagcccccaaccactttcggcattgctcataggtcaagtaggaaatggaaacggcgggcagcaccttcatgaaattgggcgccagtcctcggtataagccacggtacccttcgtgtttcactatgtacgcaacctaagaaagcgacattaaagaacactcgcagtttggtacctgtcctgttattgtcgaaggctgatttggatcactcgaaattactgaaaataatgtaatttgcaagattatacggcgaaaatttgtttgtgtttagtgagtaaagtaatttttggctctattacagttcgttcctactttttgttcaattaaaatttttcgtcagctgacctctggcttgtaattttgtccgtatgagtgcaattggatatgttatgacttgtccgactgagcttgagacaagaccacagccgagaattacgaccacacctgataaaaactcctcaaaatagattagttagttgccgaaacccaatttggcctcttattttaaatataaatccaacccgggtccgtcccaggcgaattcttccgtctaatccacaaattctttagcgtctcataaacagccaaatcgatgccggcgtatggaataatcccaatacaattggcggcatatccctataatattgttttatttgtcaaaaagaaattgagaaaaaactctgtaaagacaggtgaagccctcacggtggtacatttctctagcaaaatggcacagcccacgattgagttcgcctgttctaaaacaaaagtacaagaattanataattgcgactannaaagaacatatgtnttgngagaccttcgaagagccaatctcgtcttcagcacttctaac

SEQ ID NO: 13729 - DNA, 942 bp, Heterodera glycines
ctaacaataatcgactgcggatggcaaagtgtgtggagtcttatggttggcgttaacctacaaattacactaaaaaaacaaagcgagaaaagcaaaaatatttacctgaaggaaaacttttagccggtcgagcggtgccgtcactgatcggctgacacaaccagcagtggcacctgcgacaaaatgcctccaccaaccccagtgcttaattgcatcttcggaaccggaagttgctgacaatgagccagaagcttcttgaaaatgatcagaatgcgaacgtgaaatgaccgaattggatttgatgaccatttcttgcaggtgttctgtgtgttgatgagttttagctaaatgatgtgctgttgccatttaggtaatctataaatgcttttcaaaatgttacgacatggttaatttgaatgagacaacacttactagcgtggtaaccaccagatttgtccttatttctaagacttgtcctggtttgaaggggaaattcacaaatccttttttcaaagattcgtccttttttggcctttcatcattatttttatttaatatttgactttgatatgtacagtaaaattacaaaaaatatttattttagtaaattcctctcataaatttgcatgtttttcatgcgatatgttcttattatcacttgttttagaataccacttcaaaactctgacttttcataatggctgcacgttctaatactaataaagaaactctaaagaaccatcaaacgagtaaaacaattgcaaccaagaagctggtggttcaagactacaaaaatcgattgaaggacagtataaaatcgttaaatgataattttgaatgtatattgggcgcttcgaaggtcctgttattgctgattcgtggatttgtcggcatcgtaaagaatgggggtcacaaatataaaattactatttatttgagtca

SEQ ID NO: 13730 - DNA, 1414 bp, Heterodera glycines
cgaaaacccccggaaactgattttaagcctaaaataaaaagttaaattagggaccctcattctttacgattgccgctttgtcattgtgtatgtacatatgctaaaggtaaattgcgatgatgcgacacatcgatcaaacagtgccggaaaattaggagagcattatgcaatcagaaacgaagcaattgcgagggctgcgcttctcgtcaaggcaacaaatgagttaaaaatgctgacaaagtaagtttttatttattatgaatttcaattaattagtaatttagtgaaatccgagaatttctcactattcgcgacttcaattttataagcaactcaatttccaagtcagcattcgttcgcttagctatttacccgacgataaaagcaatcaaagaaattcagagcagaagaagatttcaaaaagcgattgaaacaatatgaaaatgattacagtgcacttcggatgagcataagcacaatggcatcagagattgatcgagaattggtggaaaattctttgtatagattctgagttatttttgttttaaattatgaacaaacatttccttacattcagacattggaaattaagtccgtcattttcctgtcggttttttattcgcgcacttttttaaaatatttcagtaggaatgagtgagtcaattaacgttagagacttatggagggaattcaatgagataaagtcagcgcttcagaaaaaaatgcttaaaaaaccgaatttccacgaagcaattgtgcagtgtcgtcgtattgctactttattggagtgagtgaaatgcattcttattaagtaggagtttgggtttttggaacatccattgctttagggacaatgaacaattcgatcagtcggcagtatgtcatcgagaaattgcagcattttgtgcaaagattggaaatcattttatggagcgacggcatttgctgaaggcggcaaaattatattattatgcgcagatgatgatccaacgaacgaattcggaatgtatcttgggaaaggactaattgttgcaatgggtggatagaaggattttctccgcttgattttttgctaatttctcgccattttaggctctgctgagtttggcaaactcatggagcagtgctatttggaagtgatccatggtttgctgaggtcggagtcttccttcaattatttctcaatcgttggcttggttcattttgaacttgcaattcaactgatttcgctaaaagaaccgttcaaagcattcatttatttgaggagaggtcagaagaaaaattgggcaaaaaaggggccaaataaatcgaattcatttcctttagcaaatcgatttgtgcagggaaatttgcctttacaaattcaaatcattgagaatttatgcaatttggtgctaacaatggaaaggaacat

SEQ ID NO: 13731 - DNA, 1017 bp, Heterodera glycines
gaccggggacctctagagtctcttcactctctctctctcactctctttccactctcactcttcactttcttccactctctctctctcgctcttcccactctctctcctcactctcttccactctcactcctcactttcttccactctctctctctcgctcttcccactctctctcctcactctctttccactctctctcctcactttctttccactctctcactctctttccactctctctcctcactctctctttcttctctctctctctctttccactctctctcactctctctcactttcttccactctctctctctcactctctttccactctcactcctcactttcttccactctctctctctcgctcttcccactctctctcctcactctcttccactctcactcctcactttcttccactcgctctctctcactctctttccactctctctctctctttccactctctctcctcactctctctttcttctctctctctctctttccactctctctcactctctctcactttcttccactctctctctctctctctctttccactctcactcctcactttcttccactcgctctctctcactcttcccactctctctcctcactctcttccactctctctcctcactctctctttcttctctctctctctctttccactctctctcacgctcgctcactttcttccactctctctctctcactgtctttccactctcactcctcactttcttccactcgctctctctcactctctttccacgctctctctctctttccacgctctctcctcactctctgtttcttctctatctctctctttccagtctctctcactctctctgcactttcttcgactctctctcgcgcagtctctttccactctgcactcctcactttcttgcactcgggtctctctcactctctttgcactctgtcaatctctgcccactctctgtcctcactctctttccactctctatgtctctttcc

SEQ ID NO: 13732 - DNA, 2072 bp, Heterodera glycines
  unsure (1)..(2072): unsure at all n locations
ctctctcactctctttccactctttctcctcactctctttcccctctctctctctctcgctcttcacactctctctcctcactctcttccactctcactcctcactatcttccactcgctctctctcactctctttacactctctctctctctttccactctctctcctcactctctctttcttctctctctcgctcttcccactctctctcctcactctctttccactctctctcctcactttcttccactctctctctctctcactctctttccactctctctctctctttccactctctctcctcactctctctttcttctctctctcgctcttcccactctctctcctcactctcttccactctcactctctctcgcctttgttttgacccctctcccaccccctatttaagcttgccgtcagaaacattcttcgctatgttcctaatcgcttccatcactttcttggccctgaatttgccgatgaactcgtccattgcgggcacatttatgccttccgttttatgccctactttgtgctaaaggttagggcgtatgagcggagataattgggacacataattaatactagagactgaagtttttcgagtcgagacaaagcgaccgtttgtaaggtttaggcaccgccgttggacaaaattgagacgcggagcagacaagcagctgcaataattctgatgctgttgaacaacttggacccagaagttgcccaatttccgcaggtcactgcgattaaatggcaattagctaattaccatttgacgtatttccgccattcccataaatcgtcttcctttttttattgtcaattgaccatttttgttttgtttgaaggaattggtcacttacggcggcaatggccaagtcttttccaattggatccaattccgactgacccttcgtttgttggcccaaatgacagacgaacagactttggccatgtattcgggccacccgctcggtccttctcctcccgataattagctgaatgccgcccttcccttctttagggcttttcccctcccacaaagatgcgccgcgaatggtgatcaccaacggaatggttctcgacattcaccaatgactgcataatgaatcaaagcaattccttcccctcagatgatccctaattactccaccaagtcactctatgacaaattttttgctctcggagtcacaatttatggccaaatgaccgccgggagttattgttacattggaccgcaaggaatcgttcacggaacaacggcagacaaaatttgaacatccaaagcaatttgtttttcctggcacagattacactgatgagtgccattcggaagtatctcggaaaggggataagtccagcggggaaagtgttcgtcacttctggtctgggagggatgagcggagcacaggcgaaggccgcagtgatcgccggtgggtcgaagggattttattcggcaaatatttgccacttttaaaggctgtgtcggagtgattgctgaggtgaattgttaacggaaatacaaagtgatcagaaaagatactcttggcaaaggtcagcgaaagtgcgctgaagaagagacatggccaagggtggctggacacattcagcgccgacttggaagtgatcgtccgatgggtcagagaaagtcggagcaatcgaagggtaatcaaagacggacaaattcatttataaaacgaatgaaggcgataagcatcggatacttgggcaatgtcgtggaattgtggtaaacactgcacaataacccctgctaattgaaaggatcaaatgtttaaaatgccagggaaagactggcggaagagcccgagttgatcgtggaactgggctcagaccaaacctcgtgtcacaacgcttttaggagggggctattgcccggtaggactaagttttgacgaggcaaatcgaatgctaacggaggacaagccaaattttgatcggatggtgcggcagaggttgggattanagcgaacacccctacacatttgtccattctgaagcttattgcgacatattgccgctatcgaaaaactgttcgctcgcg

SEQ ID NO: 13733 - DNA, 1461 bp, Heterodera glycines
  unsure (1)..(1461): unsure at all n locations
cagacagactgtgagtagaattacagactttcaatggtcttttggcaaaatgcctttgtcagtgagtgaatggaggcgggagcagtacgaagacaatttgttgtggatcaaaaatgcggagaagcaccaattggtggtgggatcggaggcacgcattttatattcggacggaatgggaagggtcgaattggcacgggcattcaatgcggcaattagggaacgaaagttggaggtcgaaagggatggttggattgtgtattatgttaaaacacgtgaattgttgtgcgggacagggaccaattgtgatcagtcgagaccatcatgacgtcagcggcaccgattcgcccttccgcgaaacgtcggacatcggcgacggatcggcgtacacagccgacatggccattcaggtgccaatggccgagaattaggcgacattgccttaccttcagaatgtaatcggcgattcctttcggggggcgacttgggtgtccattcacaacggagggggcgtcgggtggggagacgccataaacggaggcttcggcatgttcctcgatgggtccgcagtgagttacgtaagacagagaacagtgaacaaaggaaatcccatgaaggaagcggaccaaagactgagttcgatgttggcatgggacgtggcgaatggcgtggcccggagatgttgggcagggaatgagaaggcaatggaaacggtgaagagaatggaagggatggacccggtactgaaagtggtggtcccggaaagggtggacgaagaacttttggacggactgaaattcagtgactgacagtgccggaagggacaattagtgagtggtcaattaattaatgacattttcggaattgctgtattcctctaatgatatgatgtataatccaagaattgtctgttattcacaacaaattcaatcgatttgtttcgtcgtttttcctttcattgcaaatgcctcgccatccctgcgactaattcctcaaagaattcatctttgattaacgaatagccatcaaacacttcaattatttgtttttcacttgccgactcgaaaaaaatgtcatctgaaaagggaaaagcagaattatttacttaaaaccgaaggattaaagtgaccaaccgtaaattgggataagccccgccagttccaaactcgccggaataaatgagtcacaatttgagtcgagcccaacttattttagattttattgatgcaaaaatcagataaatttaccgtaagtctttcgtctcggaaacaaataaacagtaggggtgaaatgattcattgctgctgttgtcatttccgattttaattttttggcgcgcgcaaaaaacaaattgtaagaaaaatcattgctggtcagaaaaaacgcggctttctcaattcgtctaaatgtgtatttatttgtcaattcttttaaacaanaggattgatggacaggcctggccaa

SEQ ID NO: 13734 - DNA, 1371 bp, Heterodera glycines
cctccgccttcacctgctcttggtactttggcggttccaaattcttccggatgttctccaactcttccaactctttgcggccccattccggcggcggtcgtccgctgccgtgcgcaatttttggctccggcttcggcggaggctgaaattgttttacaaaattcaatccggcgcaggctgtcctacgtgttcgaatttgttgcgtctctccccatagccgcgtctgtccgtctgccgatcaaatttggacgccacgcgcactttgggcggaagcgatgaattctcctccatttcgctcgggtccattccgctttccaaggccttctgacgcgcgaattgcttctgacgttcgcccaattctttcaactgaattaaaagagggggcccaaatctgttggcatttatttgtgtgccaatgccaacatcgtattgttggcgctcgttctgcttctccaagtcgtacttttcgccctccaatttgacaatgcgcgcgtgcaactgcttgatctttgccttgatgtcattgggcaacatgttcgacacgtccaccggtcggttcacaatggacatgtaattgcgctgaattggatgtcctcctcatggtaatcccatatatcccttgcttatccccacccctccctccccttacccaccttggcctcttgctgctgcgctttgtttgggcctccgcgcagctttggccccccgcccgactccgcgttctgtcccaatgcgtcgctgccctcctcccttttttgaacgacgaaattgcgtcccgacggcttttcttcgccgaaccctccgacaaacgcacccgccatcatattctgccgcttgcgcttctcctcttcgcgctttgccttattcgcttccgacttggcctttcgctcctcctgagttgttggcattttgcattaatttgtaattatccgccgtttaaattcaacatttcctaattgaattccgatccctttatcatttttccgctcccttccgtccgatcactactgatcggcttttgattccctcgacctcttcttggcgtcttcgttcttcatcttggcgtctccgtgctgccatctccgcctccatctgcttctgctcttctttgcgcttcacttgtcgctctctcagctccaccaactctctgtccatttggtctttctcctggcgccgcttttcctcaaagtccaacagtttggccgcctcctcctcctcgtgccgcttcttcgccgccagcattgccttctccgcttccgtttgctcttccggttccgcttccttttgctggggcggtgggacgtgtcgcaacctttgataaaagcgcatgattaaaaaaagatgatcattttggtcgatcgtcccctttca

SEQ ID NO: 13735 - DNA, 2860 bp, Heterodera glycines
cctttccgatcagtcactgatccctttctttccgcggttgaccctttcctttccgtttgtgctttttcttccacttttataggggccacttcttcctcttcttcctcgtcctcctccacctcttcgtcagtgtattcttcttcttcggacatttttaagtgtgctgacgatggactgaaaaaaaggaaaaatgtgcgatggttttaaaagtttaaaaataaagaaattgttttaattaactaaatcgaataaatggaaaataaagtggacgatgtgaaaagatgggagcgaatgattggaagagttttgacttaatggagggaatcggccgatggtaagcaaaagcaaagcaaagcaatgggagggggggggggaaggggcaggctgtgagtgtgtgcagtttcactttacacattccaaacgatggccaatcggccaatagccaattgaaacaatatgctgagccgaggatggccaagaagaataggcagcaaatggaccacgaaaagacgctcgccatatgataggaaggaaaagcaaggaaaagcggaggaaaagcagaggaaaagcaaaggaaaagcggaggaaaagcagaggaaaagtaaaggaaaatccgagcattaaatgaaggttgggcaaatggtagaccttgaaagggatcgaaccctcgtctccggtgcggcgatcggcttctcacccaaatcactgttcttaccgtctctttatgtctccgttttaaagcgatttaactgcccgctggctcaatccatacatttgtcaattaaaaatcattttgaattcgtattcgagatttgggagcaatcgaaattatgtaatattttgggttaataatcttaatacataaagaataatgtcttccaaaattagcatttaaatttttgttatttttaggtgtaccgtaaactttaaaagtacccaccttcaatcagctgatccatcccttcattcattaatcaaataataatttgaattaaacttggcattatgttttttcgggaaaattatttcgcttactcggaaacttttttcattttctgtccacacttaggtaactcttttcggaaggttctcctttcttgcatttcatattttcgagattttattcttgggcattattgttcagtcactcaaattaaataaatttaaaacaaatttttgtaaccgtttttagatttttattctcgccttttcattttcataatgtctggccaaataaagactccgactaatcagaaattgctcacaaatgttgcaattgtgcggatgaaaaagtgtggcaaacgctttgaaattgcatgttacaaaaacaaagttttgaattggcgcaacaaaacgttagtttttttatttgggcagaataaagcacatcattttgttcagtgagaaggacattgacgaagtgctgcagacgcaaacagtttttgtcaatgtttcaaagggacaattggcaaaaagggacgacctccaagcatcatttggcactgaagaccaattggaaatttgtaaattggtcagtccttaattgggaaaatgaaaattttaaacagtttttagatactcgaaaagggcgatttgcaaatttcagacaaagagagacaagtgacctcggagagctcttttaaggtaatgataatttcttctaatttccgctcactttcaatccaaataccagtccttttttccattttaggaggttgccaatctgatcacggatatgtgcgtcaattccgagacacagcgacccttttcacttgctgtaagatttgattgttttaattatgctaatcgaattgactaatttgctgtttcagacaattgagaaggcattgcatgatgcgcacttctcattgaaaagcaatcggtccacgaaacaacaggtgaccgttttatttaaaccttttttattgaaattttaaaggccctcgaaatgataccgaaattgcgcgagtcgttgaaaattgaccgtgcgaaaatgcgaattcgagtgtctgtgcctgccaaaaatgcgaaaatgttgcacccaaagctaaaggcattttttgacaccaccgaagtcgaagattgggacaaaggcgacctcgaaatggttattattttatgtgtggaataaacccagataatgtattgtgcttttaggtgggtctgattgagcccggcagttacaaaacaatcgttgaacttgtgaaaggtgacaaaaaggagaaagttgaacagattggactggaactgctgagtctgaaggttattggagagaatgaggtggaaataagctgaaaagtgaaaacattcgaatgatttcgttttttattgtgatttgacccattctcaacatttgacaatgaattttttgcatttgagtcaatttgctgccccgcaggtgcattattcacaacttaaaatgaattgaataaatatcagaaatttcgactttcatttgtcgtgccttcgccatttaattattcttattttgttggcgacatgaaaatccccttcagcagctgcacaaatggctaactctcacccccccccccaacaaacagctgtccccccctttccctttcctctctttttgccgctctgtccctttcaaaaatttgctcgtcggtcctcaacttttcccctccctccgtttgcctttgacaattttcattacttgtggtccgttggttgcccgggaacatgcaatggaaaagagagagaggagagaaagggcgaggcaatgcatggaaagaaaaaatttggaaggagtgaaattccctcactgtttccaacaacaaaagcatttaattgatatatttacaattgactttttaaatctatttttaaaagccatttgact

SEQ ID NO: 13736 - DNA, 1087 bp, Heterodera glycines
gatacctagcgaaagtgaacgagaaaacgaccccccgcccacaatggactcggatcatcactccaacaatgtttggtaaaaaagtgataattaagataaaaacaagtaaatgagaatctcttgactatataggaagtaaacataaaaagtttaattcagaaaaacgctttttcacagtaagcgactcatttaatgtatttctccatgaatttgcgatggaactccgatcgaattgcgtcatttatgaatgaaggcgttttcttcctttcgtcaattcctcgtgcacaattcttgaagacgacatcgtcatcccaacggcgtttgaccttaaactccgacgatgcggggttcagcagcggattcccatggagaatgttctcttctcgaatgcgttcctgggagttcaatttctttttgaggttatttgtgtctcacctgttcttcgcgttctttcgcctcttttgaggccctttccgcagctctttctttgcgaatgcgctcgagttccgccataagttcggcctcgttatcagagtcttcgtccaagtcggtgtcgtcctcgttgagctcatcaaatggttcatcagcgtcaagattacgtgcagatgaagtgtcctcaacgctaaaagaaattttggttaaaaatgaataaatctggaaacgataagcaccgccaaaggaaatcttgcaaattttaatgttatttgggtaatactggagaatctgggctccacccaaaaaaaaaattttcttgtgaaaaaatgaacccggggttttcggtgcttctgatcacgaatatgatatcaaaatttgcaaaataattgactttatcatttattttgaaaatcatagattttagaaattttgaccaacatggcagggtaataaatgttgattgtttatgttttcgattgttctatgatcatttcattggttaataaatagtgctgatcatatatggttacctcactcgaaaaaatgcagcatttgatcatgttggtcaaaatttaggaaaatctaatattttcaaaatcaggataaaaatctataatgatacaaatctgatatcatattcgtgatcagaagc

SEQ ID NO: 13737 - DNA, 2721 bp, Heterodera glycines
aagtgaattattttttaattacctattttgcaaataaatcaattttaaaaacttattttacaattaagtccaaacgaggagctattctcatcgggaagtggctaggaaattttatccgcagctgcctatccgctacccatagcattattaaatatcaagttcagtgttccatgcctatccgtcccaaacactgtttcacgaaattgaaagttagagaaaaatagcaaaaggaaacgggggataaaaaatgatgggattggggaataaaataaatctatggacgtaatgaattgagggaactgaacaactgacgaaaatgattcaacttaggttgatatctgtgtatgttttttcatgcaacaacagagataaacaaagtctaccaactttctttttccttatttgtatcatatatataattgaattagtttatttgtttgaaaaacttgcttagtttgttaattcagttcttctaccttcgaatttggagtgccaagctttgtttagttgaacatgtcatccgtttctgctggtggcgatggaaaaacacctgctggccatacaattccaccaccaaaaacatcgggagcagcgacgggcggtcagcagctgagcgcaagtgcgaatcaattcgtcgataaaatcgacccattctcaaaacgaggaaattcacgccgcagacgacgcttgatcggcagcagtcgttaccacgcggacaatgagccggacttgacacaattaccgctgatcaagggtactttccatgttgattaataaataggaaactcaattagaatgccattgcattgtttttgtttttcaaaatgtaagtttagatgccggtcaggctgaccagacttatctcgcaattcaaaaactccagcaatgtcagaaaatcttcgatttttatgatcccgtatcgcaactgaagagtaaagaggttgacatttcttcggagtgcaaaatttggtttattaattgtgtttaattaagataaagcgggcggcgcttaacgagctgattgactacatcacggcaaccaaaggagctgtgtgtgagccgctttacccagaaataatcaaaatggtgtcgaaaaacattttccgtgttcttcccccaagtgacaattcggaatttgacccagaggaggacgaacccacgcttgaagtgtcatggcctcacttacaggtactccaataaaaaatagaaatactctgtgcaacctatacaactaaattctttgcatagtattgccaaagttttgataactaaattcgattattttagctcgtttacgaattgtttttgcgttttctcgagtcaacagattttcaagcatctattggcaagaaatatattgaccagcgatttgttcttcaactgctcgaacttttcgattcggaagatccccgtgaaagggattttctaaagacaattttgcaccgtatttacggaaaatttttggggcttcgtgcgttcattcgaaagcagatcaactacatgtttttgtctttcgtatttgagactgagtcattcaacggagtgggagaacttctggaaatccttggaaggtgtttttatgtagccgaatataatggaaactaaaccaattaatttaagcatcatcaatggatttgcgcttcctttgaagcaagagcacaaagtttttctcgtaaaagtattgttgccactgcacaaaccccgttgtctgaacctctatcatgcgcaggtcagttccgcttgggttctcttaaaaaccaagttttatgcaaaaaataaagacgaacagtttattttatttttattttccgttgacctaaagtattactagtgtgaatgcagtaaagtaaacgcactctatgattgttttcggctctcttttagctcgcttattgtgtcgtgcaattcattgaaaaggattcgtctcttactcctcaagtgttcgattcgctgctcaaattttggccaaaaacatacagttcaaaagaggttagttgtatttgtattcccattgcaaaatttagttttgtttttgcttttaggttatgtttttgggcgaagttgaggagattttggatataattgagccggaacagttcaagaagatcatcgaccctctttttaagcagctcgccaattgcgtgtcgagtcctcattttcaagtatcaaattaaacattttcaaatcatttgctattgtttgaggttgccgaaagagcgctttacttttggaacaacgaatacattctgtcgctgattgaggactgcagtgcccaagtgatgcccattatgttccctgctctttatcgtatcagcaaagagcattggaacccaaccatcgtggctctcgtttacaatgtgctcaagacttttatggaaatgaatgggaagctgttcgacgaattgaccacgaattacaaattggagagacaaaagtaaagaaaaattaaatcaccttttacttgagtcaataaaaaacgcaatttttttataaaaaggaacccatttagggagaagaagcgggaaaaggaccgggaagaattgtggaagagaatggacaccttggacatctgcaatttgatttcacagattgaggagggcaaggcactgcccgaaccgaacattctcgcgaaaactccactgactcatttcattgaaaaggcgacttctgtgttggcgagtgccatcgtctcggcatccgaagggtaacgcaatcgtccaa

SEQ ID NO: 13738 - DNA, 2876 bp, Heterodera glycines
  unsure (1)..(2876): unsure at all n locations
atataataatcgtatccttgtagaaaatagatatttgaagagaaaaagtaaatttaatttcgagtagtaaaaaatactaataaactataatttctgtgaataattcaaagagagaaatttcattatatcattagaaattaaaatgctccaaatttctatggtttatattttaaaaagcagaaaacaatagagaaaatatacgtaattagtattttgatagaaaaattaaaatttaagaaactacaataatcgtatccttgtacaaagaaaaaaatccaattcaatagaaaaaaaataaataaaagaaataaaaatagacaatattatcttttttgaaaatgaataacctaaaatggggtctacctcagttgggctctggatttttaacttattttgtctaaataaccaagattttcggctattttttttaagtaaagataggtttttgggggccggcggtgccgataggcgccgccggggaaaatttttaaagaattcttaataaattttgttaagaaaatggccaaatgatttttgataaaagtcggtcggttgtttcggttttttgattatttcggtcggtcggttttggttaaaaaccgaaaaaaaccgaaaccgaaaaactttgatttcttcctttcttttgacaattcgaatatttttcagtcgtatgacctaatttgatgatttttatttatatatattaaaatccttcataatatttttttctattttcttatttttaaatttgcgtgcccatgcgagtttttaatcttaacttaaacaattagagaattcattgtaatttttcgaatattaattgaaaaattttttgtaaaaaaataaaggattgaaatgtttatttttaatttgcgacttttatatattcattaaatattgaataaggccaaaattattttcgtttaaatattgaaactttatcgtagcttttgcggttcttattgagaccatttagctaaacagtttttattttgctgatggcattccgaattaatttctgtttcttattttggtgccggcacattcttgtcaattcttttcgataattacgattttcaattgataatttgttcgttaagtttatagtagggtaggccaggtaggggttatttgggcaaaaattgggtccgggtattgccgggttcagaaaaagccgggtaaaaaacacgaaaaatataaatgttacaaataaatgctttattatttgtcctattttttttttgctattcaaacaagttttttgcggtcgataaagaatttgtacaaaaaatattcaagttttaaaaaaatataaagttaattcttcaaaatagtgatattgtaaaaaaattaagaaattatttgtaaaattctcataaaacaagaatagttaaaatcagattttaacaatttttgcggcgaatttttccaacaaacttcttctgggaatgcgaggggaggtagttatattatgccattaaatttcaatattatgaatatgtttaagaaatcagaacaaacttgggtcactacctccaaatcaggacaaatctgataaatcaggacagacccgagccctggttttaaacaaaaatttaaaaaaaatgttaaacagaactggtgagagaaggaattggacctgagcaaaaaaggagacgaatccaagacaataaccactaggccaagtggcaaactgtaagaaaattataatagaaaatatgaattaatttttaaaaagtttgtcttccctccaattttgcggaaaaatttgaccaagacccctattcttaccagtgtatttttggacacggttggatccggcctaccgggtcgggtaccgggtatgttttttcgaaaaaccgggtccgggttgtgctttattttttgtttttagtttacttttcatttcaatatttatttattaaaaaaaaactttatgcaattaccatcaaaaatatatcttaattaaatattcaacaaaatacatatgtttctgtactaatttagatagaaaaatttcttttaatatcaattcgggaccgtctcaataaataaaaattttttatcgtctcattaaattcttttgagcaattttcaaataggggagaatatcatgatacatttcctcaattcagaattgtttttagttcccgtaattacgactttaccggtccagaaaattaacgctgccatgcttttaccccgcttgaaatttaaaccgcaaaatatttccggttcataaaatgcacgacgattttttcgaaactcgttcagttcaatttcacgtccgaatttaaaggtcgaaacaatattttcaaccgtgtgtccggtgtaagaagcccccggacaccccgagctcttaattatttctataaattttttaatagcattttcacagtctatcagacttttcgtccccagacatatcattttcccggattcccataataatgccgtggctttgatggggcttgtacatttgataaccgcggcattgaattttctagggttatacttaaattcgaattcggtgatcgtcagagagtttagtttaattccggtaccgagattagtgagagcaattatatttacgattatcggtttttgaatttttgatacaatgtaccaatcaaatggtcctttcactccctttatataccccttctataaatagcaaccaaaaataaaattaaattgaaaaaatgaactgtccacataaaattaagtgttgtcattactgcccctgtcattacgagatttgtaagaggtgtaaaaagcacagtcttttgcatttcggtacatcattttgtgataatttctggctatgccccanatgcgcgaaacatgttccctatgaaaatataaagcgtttaaac

SEQ ID NO: 13739 - DNA, 1550 bp, Heterodera glycines
  unsure (1)..(1550): unsure at all n locations
attaaccaatttattttggtgaagatttgaattatggagtaatactataaaaaggaagttgtatattcataagttaatgaatgaacatntaaaacaaaatatntaaaaaatcacacataaattaaatttggtttgctatttttattttttatttctatttctaaattaatttttttatgctgccttttattgaatttttttaatttgaaattgtggcccaagaacaaaaaatgcccatatttttacaaacctcctatttgttgcttttttttctaaacgataaaacaataagaaaactgagataattaatgaattgtttgatatataaataacgcttaaactttagtaaaaatttgaaaaccgaccttagtccgttatatgactgaccaaaataaaaataaaaactaacaaattgtttagttgcgaacccttatttattttaatttatatagttataaatttaatgaatattttttaaagaaatggcatgtaaaatgaaaataattaagtgaaaaatttacaaaaagaatgaattttcaaaaaaataattgaaaactaatacattgtttgaataaagaattaaatataaataaagattaattgaataatgttgacgaagtttctagcgcaaattatttaaataaaaatgatagtttggatattaattaaaatatgtagaatagcaatttcagttacagcagctagcacaggaactaaagcaaagatagttttattttagaattgaaaaataataatgttcaaataaaactataattataagagttaataccgaaaaatcagagattataaataatttaaccccgaacataaacaaattgatcacaaatattacaaagtaattattaatttcctagggaatagttgaaaaattttccttaaatttatcaaaaatgtttatttataattttactactccaatgtaagccaattgataaattttttcgtttttttcttattttctcgacaatcaatatgtaaaacggaatatttaataacaacagaagtcttaaataatttaaattaaatatttttaaaatctaaagaaaaatccgttgttatgaagatgtcaaataaaataattatcaattgaagaagaacatttatgctcgaataacattttttgcatgaaaattaaaaaaatgtctcaaggcatatcgcaacggtttaaaaaatataacaacttgagaacatattgttactgatttttggtattgaagtaactataatattaaaaaaatttctaatctacagttattgaaattaatattaatactaaggaataatatttttaaacaataactttttcgagaatatgcaacgtctttgtaaggaataatatttttattcaataatatacaaataaatcaataaaatcaatttgctacaataataaaaaaatatatgatgcattatttgaattatgttaaaaagtgagtggagtttatatgttaatattgaaataaaaagcatacgtaattatcatctctaattataactggggtcattaaatgtggatgtctacatagccc

SEQ ID NO: 13740 - DNA, 4367 bp, Heterodera glycines
  unsure (1)..(4367): unsure at all n locations
aattaatcatnaatttagaaattcatggcataaaatgcgccgtaaaaaatttgttaaaaatttgattttttagataaaaattgcactgaatttgctaattttctccccaaagtntaagctattttgagaaatgttcttattttagaccctaaaatctttttttttttggacttgatgttcttattttgaaaaattttcgatggaagccctatgttatcgcccttatttaaaatgcgacttggcaaataccatttaatctttttcagcatcgatgtgcccaacctttttaacgcgacggtcaattggccgttcaatcttcaatctgctcacgtcacggatgttgccaaaataaaaacggacgacaaatgacggagattgttgtgacttttttggttttgcattgttcacaattttaaattgaatacttacaacaattgcagaaaaataaacaaattaaaccagatacaatatttttccccagaactttcaaaacccgggtatccgggtctgggacccggtcgggtacccggaagattcaggaaaacctgtagaaactaaagtggtaaattaaattttccaatttttcacgatagaataaatttcatgtaagcacatatttttcctgtatttattccgtgaccggaaaatcgttagtggaaaatgcgtcagtgctacaaatattctatattaaagttctgtagcattaagtatggtagtataaaaataaaattcttgacaaatatcgttctgaatttcgaaccccgggcgcgaattcgaacaaaaagtcgaaagtcataattttcgaaattagagttttggacaaaattggtttaaacacacggaaacaaattgaaaaccatcaatccttcaataagagattatttatgcaatttttgaactagaaataccaatttcgaaaattcgtacatattcgcaatttttcgtacatcgattaattcataatttaataacaaaagaaaatgccgttgccgcaccaaattcagtgggcacttaaataaaagtaaacattgtttaaattttcttcattctgccaaactgtcgcctcttccccaattgggcatcgcttcagccaccaaatataaaaattgtttgtttttttactcatcaatgtcagcttttcccccgttcgttcgttcaccaattcgaatggttcaattggcattgacccaaacagtgcaaagctaattatgtaactggttgaagttgtggcatggagaaatgcctaaacaattaacgagtaaaaacaagtcttgaaagtatttttttccaaaataagggcaaacgaggttaaacggttaaaaaaaagattttgaccccaaaaataaagatttttgaacaaaaggctttacattgtagagacaattaaaaactaggctgtctaaaattttcaaaaccagcatttggccgacgaaaatcatctcaaaaatcaacactttggaaattttagtcaaaatgaaaacaaaaaattttttgcgacgcgttttttccaaaaaacaaaacaaactttttggaaacagagggccgtggaaaatttttctttgaaaatttgagttcattttatcaacagattttcaccaaaaaggctcaagttttgcgatttcgaaccaatttttaagaacataaggcttttgggggccggcagtgccgatagacgcctgcgggaaaatttgaaaattgagagtttttggtagcatttttttataaaaaggccattttaaaggattttttaaatcaaaaaccagcaaaaaaaaatataattaagcagaataaatttaaaaagtttaggggaagcctgaaaataagaaaaatcttaaaataaggacatttgcgagcccattagtaaattgcatgccgaaacagcgccaattagcagggacgactcaatgccatttcaaaaatcccggcattagcttgtttttcaaggcaaaaaaacacgcgtaagaatcattaaaatttaatattttcttttccacaaagttgttttatttgcaggattcattttctttttgaaaaaatagatagcaaaatgaacgaaaataaattgtccaaatttagagtttttggggctaacatgaaaaaatccccgaaatattgtaacctccttgaaatcgttgacccaatctttaggtgtattcataattctgcaacgcaatcgcctcggttggccatcttttctcggcgtgtgcaaccatttggacaacgcttggccagcagttgcatttggcccatcatcagcgatcaaatcgggcaacagattaccagaatgcattgaattcaggttgagatcggtgagaattgttgtggagatgagacgacgcaaattgtccaggttgtcagcattgagaaattgaaaacggcgaatatttggtacaaaaattggccaaatttgacgggcccaaatatcccaaatcggctgggaatcagttccggttttgtgtgaacaacgcacattcaaaaccaatttggtcccattgtcccaaattttttgattggaacggagaaaagtgataactgaatggtcgatacacctgaaatggaactgatttgttggcccaaattattttaggagttttcagggtcgggaaacccaataattacagccgtttcaacaaattcctaatccggacttgatttctataatatttttttgcggtttgtgtataaatctgaattttgttcaaaaatggggtttcgattttttgtttgagtcagtgttcggaattggtcgaaacggatgtagaatcgattttatattatgtatgtttttgtcgaaaattcttttggaaaaaggtacaaatcgtccgtccaggagagaacccgcgatttgaaaaaaattactcaatggaaagtaaataaaagcgaattttgttaggcagcggactgtcgggccaaggtaattccacgaattcggcattcctagtcaacatgcgaattttttgtccttccgcgccagtttccgcaaatttggcattgatggcaagcacacaaagcttgggttcttccgcaccaaactttttttgaattttgattgtttttcgaattatcaattttgttgtgctggcattgaaatgcgtgtccaccaacgcatcgaaacggggcgaaatcagtaccaatttgaggccaagttcaggacggtcaaaaagtgggaaaatgtccatccaaatgtcgttacacacccagctgaaattttcagtttacgcgcccaattcatcatgaccatcctaattttcggacgacacccaacttattaatattttaatgaaaaagtctactacttttgatcctcccccattaaattggcaatttttaattgcgtttcgtcagtgttaccaatgccgtcgacttccaaaaaatgttttcacaagtgaactcggcgattgctgctgattttcactaattgttgcagaagaattgacggcgccggaaaatgcttttctttttttgatgggcggcgacattaaattattttcgcttgtaatattgaagaaagaattgcagaatttcttataaaaattagaatataaacagcaacaaaacgtaaaataataaactcaatatatggaaatgctatagaaatttgttatagaaatggttaaataaaaccaaacttgcaaagctgtaaaatccaaacacagaagcatttttccatttcaaaataaaataaaatattcagccatttttttcaaaaatttagtaattaattataaaaaatttaaaaatttaattatttacttttaaagttgtttgtccctaaaggtggttattaaattaaccgattcttgttgctgctgcccctgccggtgaccttggcaatccgtctcagatgcggattgcgaactaacattgtcacctcctctaagagacaaatgaacatcagcaccaccactaacaacaacattgatattgctgttttgtctctaaaaaattattgaacaaaagtacttttatttgacacatacttttatttgacacaaactgattattattataattaccatatcatggggccccgctgcttcaaaaagtccaccaaactcttcatttccttctgcaattgtaccaaattaaacaaaattttttattattaccttgattttctcgccctgcctgcaaatcagaattgaaaaaaatatcttcggcaggttcatcttgtcaaaaannatcgtatgggttgtttgtgttgttcatttcttagtaaaaaaagaataaatttcttttacacaaaaaaacaatattttcaataagttgctgttcgacaaataaaataacatcacattattaaaatttaaaaatttttaatattaaaatgtaaatgaaaaaattaatattaatacaattatattcat

SEQ ID NO: 13741 - DNA, 1670 bp, Heterodera glycines
gaatttaattttgaaaaaaattattttttaaattccgtatagattaaaaggccactcatttttgactgttttttttaccatgctaattgtacatattgctagcattgttttgcttccttcctttaggcaatcaaacggatggtggacagtgactttgaagaggaggaggagtatccgatggataatcaccaccaccaccacaaacaacgggcgtgcatgcagaacaatcaccgtcaccagccaaacaacctaaaaaatggtgacatttccgctgctgtgccgtcctcattctcctcaacaacaacggcaccaccggttggagcaacgagtgcaaacgcctcctcttcttccgtttctcataaacgggcaccgcgtcggctgaacgcggacggcacgccggcggagcgattgaagccgggccgcaaatcggtggacgaattgcgggagaaatttgcgcaaaagttgaccgccgtttggcaggacgtgcacaatttgaaggttggaaatgcttttttagatccatggatgtataatcaaatcgaacatcatactcgcgcagtacttcaaattattgtaaaatttagacattttaaaaattcgccaagctattaaattattctaccaaagcgcaacttatttcttgtatttttcaaaaactaccatgtcattttttcgcacaatttcttaacaacaccaattattattttttatttcacttgatacttcttacaattagcattggcagaccaagaattagttagaatcgtctgaaaaacaggaaaatttgtcctaaatcaaaaaaggagacaattttaagtattcatttgttaccaaggtgttcttttcgtcaacagatattccaaaaatcactgtttttaaatgataataacaacaatttttaagatgggcgaccgtgcgttggccgagccgttcgagtacttgccatgtgacaagacattccccgactactaccgcaccatcaccaagcccatctcgttgatgtgcattcagcgcaaaatcaaggagcagcggtacgcggactcggacgaactgctcgcggacctgcgccagatgtttgccaacgcgcgcatcttcaacaaaccggacgcacaaatctgtgcggatgtgactattttggagtcggtggcggttggctcaatgcgcacccataccgagggggtcacactgttctacccgtacagacgcactgacaagggctggtcggagaaggcgtccattgagtgagaccattgctttcataaaaataatatttttccggttttcaatcttgtcacgccgttgtaaactagccatcctacatcttttgggcgggggtcgcaaattttaaaaatttttttttttcataaattcatttaaaaatccaaataaattttcggaggtgcctatttgcagcgccggctcccaaaaacttccaacttttcataaaaaaattggcacaaaatcgcaaaaattggtcattttggtgaaaatctgtacacaaccacacctaattgtccacctcttttttaaatttatgttatgcatgacagtttcaaatgcttagttcatcttttcaggagaagaccgttgaaaatgaagaggaagggtgccatactatccactgctccaccgacagccacttcatcttcgtcctcattgtccacaaatgc

SEQ ID NO: 13742 - DNA, 919 bp, Heterodera glycines
ctcattgtccacaaatgcggacggcacaaatttgtcgtcagtgccatcaaccaccgctgcaactgcacaacagctggcggcacatcatcaacggcaacaacaacaatctcttccgcaactgcaacaaccgactcacaatcagcaacaacaccacccctcagcaatatgtgcacaacaacagcgctcattggccgccgcttcgtcttccgccgtttatgttgcaccgccgctgccgccgtcctcggtgtgccagacactgaacaacaacaacaacaataatgccattgccagcacaagcggtgccgtttattatgccgctggtggtggctatttggtgccacagcagcagcaacaattcattttacatcaccacaacgtcatgcctatggcacaagcgcaaccgccgcaacaatttgccgctccccattcggttgtccatgttcagcaacagcagaaataccttcatcaacaacaacaacaaccgatggcattagcaacatctgtcaaacacttgcagcagcaacaacagtgccatcaatcgcaacagcagcagcagtatttctcgtcaacttcggcactgatcaacggcggtggcataccgccaaatgcggctttgcagcaagcgctgcacaatgggccaattgctgcaggtgatttttgcggacgagggagtaggggcctagtaaactttcgtacaattcgtatactgaaaattgggccaacatggaatgggacataaattggggagcagctcgtttctccccaccatttctccccgcatcgttctcgccccccgataattttttttaaattgctaacttagaaatttttcaagaaaaaatcttataaagttttttcataagaaaattctacgaaggaagaattttcgagaaatttttatggggaattactaagattt

SEQ ID NO: 13743 - DNA, 2547 bp, Heterodera glycines
tatttgccatttatttgcccattcgaataaattatgctttgatttatgcataatttccgtgtcggctcttgctttatatcaaatatataatttaacatcatcagcatataattttattttcactcctgatggcaaagcatcaggaagatcgttaatataaatcaaaaataataaagggcccaggacagagccctgggggacgccagaggtaacttttttacttgaggataaagaatccccaattttaactcgaaaagtcctattactcaaaaagccctttatccgcatcaaaagtttgccccttatacctattttttccaatttgtataaaagtaaattatggggcactgagtcaaatgctttttgaaaatcaatataaatacagtcaacattttttccatttataattgcctcgtaccaatcttccacaactgttattagttgacttgtcgtagacctatttctaacaaaaccaaattggtattccgaaattttattgttttttaagagaaagttgtaaatattttggctaagaattctttccataaccctgcaaagtgagcagtattttcttgggcctattcaattcaattaaaaaaaatgaattttttttacatttattttctaaaaatttaaattttctttctcaagaattggatttttatatttttttaaaatttatctctgggattttatttgacaattttccatgatgacaaaattaataattgatgatcaatatttatttgtcaatattacctgtcaggttgaagtgaacccgggccaaattggcggccccggcgcggcaactgccgtttcaaagtgccaccgtaaaatgctggacaaggtggagattatgcatgtcaagaaattgccaattttggcgaaggcatttgtgcctgaaaatcgcccagggccaggaattgcgcggaccctttaccaagcctggtaaacaaaattcaaaaatgcttttaaaatcgattaaagtcaattagcacattcattagtatggacatactcaacaattaatgccaatgaaaaaaaaagatttctttgatagggtagcgacaaaatttcaaggacagataaacgtgcaaatcaagatacttagaaatatatatattagttcgtcaatttttttgacaggaaaatgttcggcgacccaaacgcaatcattttgtacgtcaatcagcccgacctgttcccggtgtgccacttagagcagctccaatttgtgatgttccaagtggaaaagcttgccaagcaggacggtaaccatgtgctggtccgtcgggcgtcatttattgaactgcgcaaaagatgaacaaatttgggaatgtctaaaattggcatccatgtgccattcgagacaaggtgccatgcgtagtttaaagagtcaacaactttgaaagattgggatcaattattggaattaatctggacctgattttgaattgaacctattttttgtggttttgtgatcggatcaggatcatggaaaaatattttcaggatctttctaaactgtggcccaaacttatttaaaacgaaaaaaaccctgattcgctgattactgatctggggaccgaaaaatccatgtgaaatccgtatgcatgaagattgttttggcgatctccgatgcacacgatccattgttctgctgatccgatccttggatcaattttatttttttcgaaaataaaaaattttttttcgattctttcaaaacccaaaaatcctattaattctaagcctaatttttagacttagccttgacgaggccggcgactattcactgtattttgacggtaccaagcgtgttgcattagttcacatggcctacggttatttgcctgaacattaccctgagaaggactttgacctgcgcgtgatgatggagcgttcaacagctattgtacaaatttaaattcattgaaaatataaataaatttatatagttattagttcaaaattaattaacattaatccgaaaaaagagtttaaatccaagaaaattttttgagactaatagataaacgccaataaaaaaatgaacttttatagcacacaaattgcttttaaagatatatgcaaaaaatgggttttttggtagaaattaattaattttttttatatataaaattctaaataaaatataaaattatattaattcattcttttttattgcataaatatcattaagctgtcgcctaatcttcgtcttcaacttgccggaacaaaaaaaattcaacaggtgggcgttggaaaatgataccaaaatttaaattcaatttttttttaagattttgagcaaacccggcacattggaacacttcttccccaacgaccctcaacaagtggccaaaattcgaaacacattcaccgaactgtggggcctcgaggagaatgatgacatcaccaaggcggtgattgcggtaaaaaaaattagaaaaatttaaaaaaaattcgaaatgcttaaggatgccatgaaaaatggccatgactatgtgaagaaatcgcaaatggacggcggacatggcatttatt

SEQ ID NO: 13744 - DNA, 2356 bp, Heterodera glycines
  unsure (1)..(2356): unsure at all n locations
aaaaaatattaaataatatttttcagaccaaaatntatcaaataatatatttttaaaccaaaaaaattattaaaccaaaaaattattaaaagatttatttttagacaaaaaaattattaaaagatttatttttagacaaaaaaattattaaaagatatattttaaatattgtaactaaacctggtaaaaacagtcattatattcgcccaatttaataataaaatatttttttccgaataaaaacacaatttaaattccaaaaaataaacaattcccgaaaaataaaatattaatttttatcatatgattttaattctcaaaaaatatatatttatttttgaattcttgacaataaatttaaaattatcatgtcttttaatttagaaaattttttacatatttttccaaatttttgctccttaagaacttcatggttcgcccgttcgagaagccgcaccaagaggaagtgaacagtgagatgggcatctatggctcactgatcggtgatcagagtacgggaaaagtgctggtcaactcggtgaacgggcatttggtgcgaagcaaagtcagaatttgaacacaataaaaaataacttaaattaaattaattttttaatatattagcaaatgcgtgttaattctgcgttgtctttccattagtttaaagttcattagcatttttatacatttttatattgttaataaagataattatttaaaaccaaaaatccttacagagcgttgccctatgattatcctttttttgcggcgcttgtaatactttttgggatttaaaaaaaatcttttccgggaggaggtgggggtaatgcttttccctttccttaatggacaaaatgaccttaattaggtgataattcggcgttgaatatgaaagcccatcaaatcggctgggaccacaattaatagaatttattgacatttaattaactttttaattaaaaatttaactaatgaccctttattaatgatggtcctaaacgttcacacacatttaggccgcctcacagaaccacggcggcgtgtgcagtggcggtgtcgtgatcgactccgtgttactgttcccgtcaagcgaattccgttgaatatcataccaaaaacacacaccaaataaataatcaatcatttcttaacaagaacagcagctaattatgtcaattaaatttaattgattataattaatttaaaaaatatgacatttttagttttaaacattgattaaaaatccgtgtacaattagcagcatttctcacatgttcttctaaatgttaacaattcgtcaaaatatagccaattttttcactgaaaaatgattttttttttaaatttaattttccatttaaacaacaattattcacattaattcaccacaacaattgaattgtctgccatacatttttaattattaaaatattttaccggaataaacatttcttgctaatttttatttatttccattataattttacgtcaaattgactttttttttatacaaaaatggttacttttaagcttttacatggacttgtctaactcaaaagtgaattcgctatccttttgaattttaataatttaaactcacgaaaaacctaaaaattatttaattttcaaaatttttttaactctcagaatatctttaaggccaatttgtttttattgaccaaaaacaattatcaatttaaatacagtaagaacggaaccatttttttaattatgttttgttagactttcgtgctaacaaatacaagtaattattcaaatttattatttttacaaatcaacaaaagaataaattgggcaagcaattcatttaccgctttttcaataaatatttatttgttttcctaaatgtttttgcttctggttggatcgtgattagaagcaagcacgaagggtttttaatacaaataatacattgaaaacactactcacaattaaaattttaattatatctctttgaatgttgaaattttaatgattttctaagttttcgtaattagttcatcataccaaattgtttcttccatttgaaaatgttcgaccgatcaattttcaaagtttttgcaattttctgatcactaatttttggattcttcaatttaatttcccaataaattttcattttttccattttttctttttccgttctttttttagtgagaattccaaattgtttcttccattttttaattgttccccaagaaactccaattttcttacaaatttctttataattttgttgccattcattatgtgaatattttcttttttgtttaaattcatttgctattgaaatgaatttttgcacaatttctaatttttcttcatcagtttttga

SEQ ID NO: 13745 - DNA, 889 bp, Heterodera glycines
tataaatggcacaaaatgccaaaacatatgatggacaatatggaaaaaggagagagattttgttgagttggggggacaatggacaaatttggggccgaatttgaataaaaaagagaaaatgttgcttattttaaagaagcagtttgaatttattaatcaacattttttatttttggaatcagaatattgaaatgaaaaatgctataaataaaaaaattaaaataaaaagaaaataatgctacttcagatttcatcaattatatatgaaaatcaaaaaaaaaaatcaaatttcaaatgaaacaattatttttaattaatcgaaatcatattaagtttatttttttaattacttgaacgagataatgactagagaccgcaaaaaaaggcaccaaaaatcgcaaaaaggcactataataagcaccaaaaaattgaaaaaaaaggcatgaaaagtcacgaaacccctaaaaaaggcatgatgattaattaaatgttttaagaatagttattcgaataaggaaaatttttaaataaaaaattttttatcaagaaaaaaatatgaaattttggcgatcaatttttaagaaaattttcaattcttagggggtatattttctgaaaatttttcaggtcatttcttcggggtgtattttccgctttcattgcatttaatggaattttcccgaaaaaaaccaaaaaaggcaccaaaacggcaaagtgccaaaaaaggcatttaaggcatgaaaatcccgaaaaaggcaaaaaaaaagggcataataaaagttaacgtagaagcctcaaaccaagtggaaacagcgttttttatgcttaatatatcgaaattatttcttttattcaaaaagatagataatttgtatttaaaatcttattg

SEQ ID NO: 13746 - DNA, 2397 bp, Heterodera glycines
gtattacagaaaaatattcaaataatcttattaatattcgaaatttgagaaaagatttttgcgaaaaaataagcacaattgtattaataataaaaaaaaaatgcgaaatatattcatttagcttggtctataaatatataaattatttttaaaaaataataaaagttatataattaaattttatccaaaaatgctttttaagaacacgatagaatttgtgattaaaacaaaaacttcaaaaaatcttataaaaattagaaaattagagaaaaacaaaaaatgtaaaaataataaaatataatataagaagaaggaaataaagtttattgaaaatcatattaaaagctctctcttcattccttatgacaaaacattttaatatgatatcagcaaatttttgtttgtcattattattcatgaaaattttattcataaaatgcaaatttgtcccaatttggactctccaaaactttgccatcgctttaattgtttttggcgcgggttcgacaaccagcgccaatctcacaagaatttattggcaccaattccacacaaatgccagcccaccattgtacaattcaatgtggcgaggacaccgttgttgtttatgccactccagagagacattcccatcccccctcaggggagcctcactaaaagttcccagcccttaatgtcgagactcttgagaaaattggacaggatagagggaggggagagtgggggcaaaggcttccaattgacaaccatagccaggcattaatgtaataagcttcatcgacttagtgccggaagcgaggtgaaaacaggcaaaaaggagacagacgaaatttggcacgagagggtgagtgtgggccaatgccaatacaaatgggaactgattttttaaattctaatcatgccatgaatgattatttaaaatgatttattttaaaatgtaaattaattatttagcttatacgaggtagggaaggttgtgcaagaaatgcgataatgagctcgagagttgttcacaagagttcttgaatgtaggaatatggacattttcagggatcggaggattaggccaaaatatgggagagaattcgaggttgaggaatcagcaacggaccgtaattcgtacaaaatccggaatctgcattatactgtaaatcaaggtttctgattgaacccagatttctgcaattgcgaaaattttggcagatttaagtagatttaatcaaaaggtttgccattatttttcaagggccgttatccgtcacatttgtaatgatgggctcataataggcaccggatgatatgccatgaaatgggcaaatccctaattatgccatcaacacaatgaaatcattttttcataactgaccttgggcctaaaacggtctgtccctaacaaataaggttggctggtgtggcaccaatcaacggggggcgggaattcgaatgatgaaaatgctaatgggtggtgccaaattaaatgttgccctcattcatgctggcacgcggcagactgtgagcctaattggaagggaccgaccgcttctgcttgctttgctgatgatgatgatgacgcggcggttacggacgcggcgacgccggaggtggcggtgttggtgggtaaagaggagcataatttgtgccaaagaaaggatggcacgacgatgccaccaccaccaccaccaacatccaccagcctaagagaacggagaaagcatcacattgggctaattgcaaacgaaaaagtggtggtagtgcttttaaaaaacgaatgctaatgggtgggggcggtatttgaaagcggaagcaaaaaaaaaaattcagagaataattactagtagcaattttatattttaactaaatcccctaaagtttcattaagaaacacaagtgccatgtaattaggagtattatgatttaattaattgataagtaaatacttcctaattagtatttacatatattcaaaaattttggtttagtggcgaaaacaaatttaattatttttaaataaaaaaatatttaaaaattaaaaaaaatatattcctggtattacatagtttttttcaaacattttcatttttgagcaaatttagacaatgccaaaataatgcggaacttttgacagtatctaaaattattttagaatcataaaaaaattttgcaaaatttataaaattgtaaatgaaaagatacacttgccattcattgtttcggtgtaaattttcaattttggacaaattcaaattgtgccgaaactatgctgggctttttgacgacggaccatcaacatcatcccaccattgtatgctgtgtcccgtgaccttttcaatcgtatcgccgccggggcgggggcggggggggggtgaggcggagaggcagcggcggctggcagcagca

SEQ ID NO: 13747 - DNA, 2795 bp, Heterodera glycines
gaatatcccaattagaaaataaaaacaaagcgaaaccttcagtttggcaccgcctttttatagcttcaggcaaagtaaaccctaatttttttttcattcaacgggcttttgcttgtttatatccaactgttttccgcttcatcaacacaattcgatatgagaaaagtcaattgatgcagacatcgcacgatgcatcgctggtgaagtccctcttcaaaaaacgcgaaaatatcgtgccgcagggttacaataccatcaacaacattaaccctgctcaccaaaatgatcaaaattaccatgccaatgttaatcctgataatatcatcaattttctcgttggtatttctcgaaattatgaaatatgcccgtattcatttttcaatgttttgttatttttttgttgttaacacattgataaatctgttatggtgttaattttaaagaattttcgagaaacaaatcagaattggatcaatgtaggacaaaaacagcttgcctcgactaaaccgaccctctgactaaaccgaccctctgactaaaccgaccctctgactaaaacgaccctctgactaaaacgaccctctgactaaaccgaccctctgactaaaccgaccctctgactaaaacgaccctctgactaaaccgaccctctgactaaaccgaccctctgactaaaccgaccctctgactaaaccgaccctctgactaaaacgaccctctgactaaaccgaccctctgactaaaccgaccctctgactaaaacgaccctctgactaaaccgaccctctgactaaaccgaccctctgactaaaccgaccctctgactaaaccgaccctctgactaaaccgaccctctgactaaaccgaccctctgactaaaacgaccctctgactaaaccgaccctctgactaaaacgaccctctgactaaaacgaccctctgactaaaacgaccctctgactaaaacgaccctctgactaaaacgaccctctgactaaaccgaccctctgactaaaccgaccctctgactaaaacgaccctctgactaaaccgaccctctgactaaaacgaccctctgactaaaacgaccctctgactaaaacgaccctctgactaaaacgaccctctgactaaaccgaccctctgactaaaccgaccctctgactaaaacgaccctctgactaaaccgaccctctgactaaaccgaccctctgactaaaccgaccctctgactaaaacgaccctctgactaaaccgaccctctgactaaaccgaccctctgactaaaacgaccctctgactaaaccggccagactaaaacggccagactaaaacggccagatgattcttggtcttttcttttcattaaagcaaatgctaataccacccattcggcacgatcatttttttcatactaaaaaattcctaataaacttataaaaacgaggtataccaagccatgaatcaaccaaatttggcggaatccttttgacgcaatttcaaacgttgcatccgcaaccataatttcacaatttctagcggcttttaattgcacgtttgatgcaaataaaagtactctaatttacatttctgtatcttagccattcagttccttctaatggtttcccaagcttaagtttgatagaaccggtttttgtcaattgtaaacgttcaggtatgtcaaactaattcttccatagggtcttcttgtgcatcaatttcacgcactttagcagctctgtcgccaatctttaattgcgccacgagcttgggggttggggtgggccaagctgaggcgggattggttcccgctcctcttcaccgctctcgtcccttctctttctgctcactccgctcgctgtgccgtaaagggaatggcaccctttttgccgttcgttttgatgggtctgatgctgctgaccgatccgatcagcgccaaagggggacgagaatgggaggggggaggggtgacaaagttggactggtgcttgatggaattgtgcagcgatttgctgcttgcttaacggcaccaccgacaaggtttggagaagggcttgtcggacccctttgaactgctgcttcgttctcgactcgacgatcacgggtttcgactcccgcccactgcgcgcttctccggctggtgggagttgcgctgacgaacggccctgtccttcgttggacgatttggcaccgcccggctcttccttccctcactaccctgctcggacttgacgacgacgggagttcacacccgtctcttcggctgctccgactggtgggagaccgaactgctcgaatttgccgctgcttcgggcactcccgaacttcccccaattgcgacgggaagggaatttgatcgggagggttggggaagacgacgtaggccgccgggaaaggaatggatcaggacaggaatgggcgccctcgtttggccccgcacgataatttgccgaccgtgatggagtgaggagggtctttttccctccttctagtgtcccccgaaaacgaatccgagactccgattccgacacaaaatttattaacgaagcgatcgacgaattaaaaatgcgtaaatggtgaaaaattgatcgaaaagtccagcaaacgaataaacgcgaatggttggggggtgaggaagcgaagagagcgaccccttgggcagggccgcttaaatagacattcgaaaaaatgggcggagtgacagacggcccgataatgcgatgagaaaaatgggacaaaaaaaatgggcagaaattgtgatgtgaaaagtgtgaacaaagaaatggcgcataaaa

SEQ ID NO: 13748 - DNA, 2271 bp, Heterodera glycines
tttatgagtccaatcaatgggtttttatacaataactttgtttatgctcgaacaaaccctatctttttggtatcattcgaaagtacgaagtctaaataatgtaataatacgagaaaacaagaaaattctaacatttcaagaaagttacaaacgaaaataataagtatttacttaaataatcaaatcttttttggtaattgcctaaacgctgcgattttatatattttagcttcgttagactttgtactttcaaatgataccaaaaagataggtttagctcgaacatgaacaaagttattgtataaaaaccgagtattttcaattgattggactcataaaagtcgattggactcataaagtgcactagagccatcgttttttgcgtaccaaatcccgacccagaattcaggtcggactcgaccctaatccgacctactatgttaaattccatttcttatccaggttcttataacaaatctattggccttgattcctattaaatttttctagtttcaatttcgtgccaacgtttcgtgccagagaactcaaaatttttaaactttttttgaagttttttgttacaacttttgacaatgtttttaaatgcttagaaatatcttaaaatggccttctttgtcgatataaatcaaatttataaaattggtcaactgagaaaaaattaaggattcttcatccgcaatggcacggaaacagtggcaccgaactatgttggtcaacaaaattttcattcaagaatttaccttgattttgtggataaggaatacgtcgttctccgcgccgagtgtagcgtagatcaagagatgtcggaaagtcattttctagaatattgagttgatattagataatatattttttgggttttttttaaataaatttgaaattaccgtggtcggccaattcggaaagcattgttataccatatatgaataatggaaaaattaaattaatcataatggctgataattttaaaattataattaccaaatattaaattaattttaaagaatcaaataaaatttaattatatttttatattgtctttattaaaatattaaaattaatttagtttatttgaattagggattgccaatggtcagcttaatttaaatggactgataagtgctttcaaaagcacaaatgaattaaaaaaacaattacttatgtcaacccaacttataagcaatatgcaaaacaattttaattttaaatgaatataaaaatgtccaaaaatgaaaataatttaaaatttccgtcacataacgctaggcgcaaattgttaatttggatattatttgtctttaaaacagccttccctagcttttttgaaataagataaaaatgaacttcaaatcgaagattttgaccttaaaaaactttcgggaaaacgaataaatcctgcggtgccggtatacgccttcgggggaattattttttattgttaaatgaatatttttcagtttaaaaattgctcataattctcagcgaactgacatatttaaggggtgtgtttttaaaatcaaaaaaccaaataccaaaaaattggtaccgctggttttcggtattttcagttcggttaaacgaccgtgactaaccctagtttaagttaattatctattcattactattattattattttattgcatttttatcattatttaaatgatttttttttgaaattatatacatatattaattagcgttattttttaaaaaatattaatttatgaataatcaaatggaattaaaaagaaacgaatttttaacacagtcaaagtgattttatcattaatattaatttgttaaccaattgtcaaaataataacattcattaatttctgtgtcaatcatcgctttgataaattaaaatgaattttcatgtggacaattgaatgtaaagtgattatgttgaaaattttattgtttaatcaacgattgctgaaacgaaatggcgctttaaaataaatatttaaataatggcaaaaacctgtatgcgagtgaatgggaggatttaaatgtccccatcgaaaattcaatgtttacaaatatattggtcattttgttgagttcaattttgatgatgtcatgcctttgttgtgccttgcgcaaggaatgtgcaactttggatttatttatggatttttctgtctggataaatgggaatggattttccggacacaactaacggcaaaaattgaaaacaaataatcaaaaagttatgtagtgtattatcaaaaattgactgatttggc

SEQ ID NO: 13749 - DNA, 1085 bp, Heterodera glycines
cccttcccacaattagcgctgtttctgctgactctttctgttcagttcgtctccgtttcgttatttctgctcttggcactgctgtacgccttcagttgcattcagttgaccgtccttttctgcacgttcactcaaaagggacaattggtccaattgatggttcgtccgtccctttggcattccgtccctttttaaattcgaattctccccgaaaggacggtctgtccttccaattgctcggcctgctcagttggaagtacagtccgcccctgcacagtgtcggccgttgtctgttcgcttcacttaatcccgtggctgcctttggtctcggcgtccaaatggcgtgcactttcgaaactcgaagtcggttttaaaaatgagatgacctcggaccagggatggcacggaattccgatttccttcatttttggggtcagaactacgatttccgacttccgaaaaatttttgggcctcggaattgcaatttccgaaaaattcttgaccctcggattggccaattcagaagtgtgcttcttgtgccatttgcccttttgtacttacaattacctaattaacactgactaattgcccattagtgtttctgctcgattggccccatctcttctccggctcctcccatcagttctccgtcggcttggccatgcttatgctgctgttcgactccgctctcttctctctgctcactttttactttgactccgtttggcccaccgatgaaagcccccggaggcatccgctctttttcctccaggcattttttgattgtttcccaatttgaattaaaacaccctgtgaaaattagcactttggcatcggtctgtccaattatgagaaagtgacaccgtacggagaggacgaagacggggagggatcggctacggtggccaactccgagaacaccgaagtcgagacaacggagaatcggacggcggacatcgaagtgcgcgggatgagcaaagtgtgggagtccaccggactgatggcagtgaacgcgctgagtttccgcgcttaccggggaaaggtaagcgatgcgatgccacggggggcggggggaggggggggg

SEQ ID NO: 13750 - DNA, 1570 bp, Heterodera glycines
ttatggccaaagtacacatgtggcctggttttttgaattcttctagtcataatttttttgagcattaacgaaattttttgaaacttagcagactaatagagaacacttagagctttcgaatgataccaataatgttagatttggttgacaaagaaaaaagttatagtccaaaaactgggctggcgccgaaacgagcggcgccgaaacgagggtgtccccattccccaccccttttttaggttttcgttttgcttggccacaacggcgcgggcaagtccaccacttttgctgtgctcaccggctccgtgcgcgcctcgggcggcgatgttctgatctgcgggcaacagttggagcacaatttgcgcgactgtcagcgtcgcattggcttctgtccccagtacaatccgttgttcgacaaattgacagtgcgcgagcatttgctgttttacggacgaatgaaactgagccaaggggagggcgcggaagaattgagacggcaattggacgtcgaagttgccgaattggtcgcagaagttggcattgcggcgcaattggacacggcaagttgacgcgagagggagcggggaaagtggggaggggcgtgcgagaagtgagaaggggtggagagaaaagggcgggcgggggaagacgggagacagacgcgagagaaagtggggaggagaagagggcggcagaacgtgtagagcaagggcggaaggacgggagggagttaattctgctgctaaaaattcgtccataattttttcagttggctaaaaatttgagcggtggacagaagcgcaaattgtgtcttgcgatggctttggtgggccgaagtccggtcgttttgctggacgaacccaccgcagggatggacccgggggcgcggaacgaggccggcaaagtgttggagaggataaagcgcgatcggtgattatttttttgggcgtgagagaaatagccggggaatggctaactcgccccttgctatcactctctgccaaactacaacccgtttcattcgttgatcactaccatccgccgtttgagtacgattcgcttggccacccaaacgctttccatttcagtaccattctgttgaccacccattacatggaggaggccaacacgttgggcgatcgcattggcattatggtccaaggccgcatggtgtgcaacgggtcgcccgagtttctgaagcagcgctttggcgtcggctacgttttgtccgtcgttgtccgtgcgggtgccgactttccccgcgcagtcggcaaagtgttcgacgcaattaccaaacattcgcccggcgcaaaacttgaacagaaccaaaaaccacccgagttttccatcgtcctcccgctgggcgacaagcgaaagttcggcgacattttcgcggagttggagcagtgcacggacgaatttggagttgactcattcggagtgtcttcaaacacgctggagcaagtgttcctcaagtgggcacaaaccaaaaaaataagacagttttgggacacattggcataacaaatttagagtcggtgaacaaagcgcggaagagaaaaaaggggaa

SEQ ID NO: 13751 - DNA, 2317 bp, Heterodera glycines
  unsure (1)..(2317): unsure at all n locations
tggcatgacaaagggcccacaaccaatgaacgctcttttggattggacaaaatcggtcaggagatgacaattccgctccaagtactgctcgacaatgacgacaacggtaacccaccaagacggcttactgttcaatccggcaaaaaacacctttaagcgacttggctttcaaagacaataacggacatggcaaaggcacatccctccattaaactgctccaaattgacggcgacaaacaaatggacaagacacttttggacacattttaccattggccccctctcggcgttggggcgatcatttcgcgcaaccaaagcaacggcaaactgaatgtccaattgttgttcaacggagccacttaccacgggccggaaattgcgctgaatttgttgggaagcgccatgttgggaaatgccacaagtattggacatcagcaggactttggcttacaattagaggaatttttttggatatttcgacgggcattctttgtccccaatgaattgactaattttggctaatttgtttaattgcccgcagcgatcattcagccgagcatcgaattgtacggggaggacgagaaccccttcggcatgctgaaggatctgttcaaagatgtgatgggcaacatgggcgccgcaatgtccgtgatcaccgccttctccataatgactgccacaatggtgatgccgttggtggaggagcgaggaagccgcttcaaacaccaggtgagggacgggcggaggacgaacggacggggaatgggcggacaattcggcggatggacggaaacttattggaaaagaatgaaagttgngagaccggtgatcaatacgtcattcctatcgaatgtctgatcaaatttaaacaagacaatcttgctcaaattgccaaatgccattgtccataatatttgccttggcaaatgccattcttccgatcgctttgatcactttctattttcctattttcttcctcttttcttccttaatcttccctaatctccccccccctccctctgctgcagttgttgctgacccatctccacccctttgtctattgggcttccgttctgttgtggaacttcgttctgtacgccgtgttctgttccgtcatcggtgtctctctgttcttcttcaattggatgcgtccctttctcggctccatcgttctcctttggcttctttacttttgggccaccgttccaatggtcggctgcgcgtctttcctttttgaaaaggtataaatattatttatttattttttatttcaatttgatttcttcactttttgctccaggcgacgaaggcattcagtgcgcttatgtgttggtttatggtcggctccatgctttccaccattggcaccgctcttttgaaactgaatgccggtgccatcggcgaacgtaccgcccttctgctgaacatgctgcttggcattgtgttgcccaccaaagcgttaagcggcggcattctcaacctggcactgattgccacttatcagcaactgattggccaacatttcgacgacgggtccgacaacagtttcttcggcactgccgggcccatcggcgagctgtggaaggaattccgacgggaactgttcgccatgggcatcgccgggctcatcttctgggttctgttggcactgctccaatcgcgccgcgtcgcctgggcatggcacaaaatgagcaacaacatcgccgtgagggacaatgcttttggagtcccttctcctgataatgcgacagcattcagatggtcatctacggcaatcggtcgctgtctgaggaggacgaagacgaagacgtacgggaagagcgggacagaatgttacgggagaccaacgagagccacgcccttgccgtgatgggtctcaccaaattttatcgccggttttgtgctgtccgagaaattacctttggtgtcaaagcggaggaatgttttggattactcggtaaacgatcgatggcacgattattgtatctgagtacaagggcataacaatgaaaacttaggaaattgaaggctcacggcttcggccatccctttaggggtaaatggtgccggcaaaacgaccaccttcgaccttttggccggcgtacagtacgccagcggtggaagtgccaccgttgccggccgcgatgtgaagaaatgcccgcgtataggctactgtccccaatttgacgcgctgcccggcgaactgacagggcgcgaggtgctcactctgctgatgcgactgaacggattccgcgacagtggtgaacgagccaggaaaacgttgtgggcaattcggatggagggcaacgcggacaag

SEQ ID NO: 13752 - DNA, 3135 bp, Heterodera glycines
  unsure (1)..(3135): unsure at all n locations
tccaaggagacttccttcgattcgaattcatttatctcctcttttgacttcggcacttgtcgattcttgtgcctgtgtctcttactgtcgggaaaatacagtacacagagcgggactgaaaattttagagttagagggagaaaattcagaactgacagcagcaaatgattcaaacataaaaattgttgggaaaataaaagcgaaaattcgaattgaagactcagtgacgggtaaatttggagaatgggaagcgacactgcttgtttcacccgacaagcactgtcctggaccagtattgcttggtttaccttttcttatggatttgaaaggagttattgcacttggggaaaagaaagttcgattgggtgaaatttggacaagcatagtatcagtgataggcacggaaccaccaaaaccaccaagagtaattttaccaaaaaatgacacgtttgaaccacggacggaaaatattcttaatgcgagagttgatataatttttccaactggacaaaatttcttggtaaggggtatacagcatcagtaccctgggattatcattggaaggacattggttgccccaggcgcgaccaaagaagtgataataagacttatgaatgcgggaaacgcaccaattaaaatttacgggaactcacatttggcagatttggagccattacaaattaatgcattacctggcgatgagattgcggctaaagattttattccacctgaaactcgtgaagtgaaaatttgcctaaattacccgtaaatcacatgaatcggcctccttcagaaagaatagatttggaagagacaagactaagtgaaaaggcacagcgagaattttttagaccttatcgcacccccggagactcagaaagaaattgagagacaaattaaaatgatgcttgaccagaatattattcgtgagtcggaatccgagttcgcttctcctattgtgatggtcccgaaagcggacaaaaaatcatggagatttgcggttgattacagggcgttgaataaaatgaccaaaaagagagtttttcatcttccgaatattcaagagcttttggatttaatgggagccaaaaaatattacacatgcatggacatgcagcaagggtttatgcaaatccccatggcaaaggaggacattgaaaagacagcttttatttctcatttgggcatttatgaatttatcacgatgccttttggtttaacggcagcaccggacacatttcagagggtaatgaaatgagactaattacccatcgattgagcgagaagctttggcattagtctattcagtgaaagaattttcaccttatattgttggatcaggaataagtaagatcatcacagattgtatgggaaatcgtgagaactgagattgtgaaagcacaagaaagaaacaaagagggaaatgatgccataagaagggccacagaaagagagttcgaaattggggatttagttttggttaaaaaggaagtgatgaaacataaatttgatcaaaggtggggtggaccattaagatgtgttggaattgaggcagaaagaaaaaatttgattttacagtcattagatggaaaaggaaaatataaaaaagtacatcaagaaaaagtgaagaaattccatggtccagcaactttgcctttgagagaggcggatgagccgataaattgggaaaaatatgtgcatgatccaaatttggaacaggaggaggcagaagaaagtgaagaagaaggctttgagattgtcttgagtaaagagaaagaaatgagcggggaaatgattggcaaaagcaaaaaattttcaaaatttggttttgaaagcagtgaagaggaggagaatggtaatactattgcttttgttcaaaatcaggaagaaataagtgacgatgagggtcccgaaattttctttgaaaacagaaattttgtgttcgaaaatgacgagacaccaactttgttggcagttatgttgaacggtaaaatggttacggtgtgtacagggtggttaaatcccaccataattccccttacttcatcggtccctgagaaccaagtggaagaaaattgggaaatttatagtaatgaagacggtgagagatatgtgacgtgttggatttttggagagagttttgaaatgtacattagcagtattacggacaaaattgttttgggcatggatgtccaatttctttttgcagaaaaatggtcattaaaaacggaaaatgaacgggaatcatattgggaaataatttcgggaataaatggagtaatgtatgaaataaaccagattccagaaattttcataagtgaaaaagaaaattatgacgaccaaaacgagttcagaatgagtataaatgtcataagaagtgaaaaaaatgaagaaatgggacaatttatgaaaaataaggagcgaaataagcagcttttaggcctaatcgagaacatgaacaagaaaggcagattaaacgagcccaaagaaaagaacgggaaaatttacgaaagccattcatttttcaagatggaattgttatcgaaagaggaggaagaatctctgaagaggttgaagagaaagctcgaacatcaacttctgaaggtccagcaaagtctgaccgaaagcgaaaaatggaaatccggaacgtcggacgatgatccagtgggaccacaggagcgagaagaaaatgaggaagaaacgacgaaaaagggcaaaggaatggagaaaaaagaggaggaggagaagaaaggaagagaggaaaaagaaaaagagacggaaaagaagaaggaagagatgaagcagaaggacgagacggaaaccaaacgaagcctcagcgtcggaacaacgaaagacgatgaaatctcgattgtggattctgaagaaaaagaaagagatgccttcgaaaacccgccgaagccgacaaacgagcgaatggcattttgggagtcgactttgaacaatgaggcaaaaaaggatttgcgagaggacaaagagaaagccttanaaaacacaggccaaggtattgtcgtaagctccagaaaacgaacgataaacgaagtcgacccgccaactctgtcnaatgaagccgccacgaaattcggggaaaaatgcggcaagcattgaacaggatca

SEQ ID NO: 13753 - DNA, 608 bp, Heterodera glycines
cccccaatctctctcccgctaatatcccgagaccgaactgggagtcccttcccccatcccatatatactcatcatatatatttgtattgtgcgcacatttactcaataaaaggacataatcaactgccgccgctgggataattgggaagggacccgtcgcctatttcaggtttaaataaaatattaaattaaaaattaataaaggaaaaattattacaaattgttgtataaattcttaaagaaaattctacatcgtttataatcaagaaaaataaataaattttttaaatttaattcgagtcattaattcaaaaccaaatataatttactgcgttttaggtaaactccggaattaaggaggccctaaagcaatttgtaaatttaatgcaaaaatataaagtaaaaatgcaaatttatatcaaacgagggactaatgacattcatcttgcgaattaatattaaaattaaaaaataaaaaacttttaaatttaaatattaattattttgatattttttattcattgtatcaacatacaatatgaattccgagatatttgaattatgacatatgtcaaaaaactaaaggtattaatttgtttaaattaaaa

SEQ ID NO: 13754 - DNA, 2093 bp, Heterodera glycines
  unsure (1)..(2093): unsure at all n locations
tttttctcaggctaatagtgaattaaagagatatntcataacactacnttagttaatatcaaaaatttattgctaacaacgcagaaanttattggcgccgaaatggggttgattaatttatttttaatggtagaaatctataaaaaaattttaaaaatatttacagaaagaaacatttaacaaaagttttaaaacagaaattttcacgaattattataaatggtttatttcaaacaaaaatatttccataatttcaagcgttaaaaaaacacaaattaaaaaatttaacagagtttttaaaacaaaataaaattattttttgacgaaaactctgttgataattcattttaacacgaattattttaaaggatgtgaatatattatggatattcaatttctgttaattcataagtaattgttttatcgttgtgtcggaccagtgcagactcgtcataagaagtcaatgtcaaaactccagctgcaaagaaattaaaagggatttatttaaattcacgcatgcatttttttaataaaaatattattaacatagcctttttcaaaccctcattagtgtccgcattcactgcattcgctgtaaattcatcgcccacttcaaatttgatcgaattgggaaaaacaaattgggttttgttgataccatcggtacaaattgttccatccaatctttttgtaagattgtatgctgtcggctttcgtgccacgcataaacggatacaaccttgtgttttaaaattattaaatcaatttactattagtaaggatggaaatttcaggcataaaaatcgcgaaattgctactttaaattacaaaaaaatcactcaatcaaaatttctatcaacaaaaaaattttgtagaaatttttgagaaatgtttccaattactaatagttttttgttggtgtttttttcaaaaaatccaaaaaatacgttcctaggtattaaatacaaaacaaaagtaataataaaaaatattaaaaatcattgtagacatcctaagcaaagtgtaaacctgtttttcgtgtttaactgtgcatattaagtacgtaaaaaatttaggattttgccaaaatatccatccctactaaataaagttttttaaaaggtttttcataaaaaacaaacaatcttgcttgtgttcacaaaaacgaacacaatctcgtcttttccaaggccttctttaactttgacattttgaagtttaatagtgcatccctaaaaaaatttttaatggctttttaatgcttttcatacttctttgccactcaataaaaaattcaaaaaatccgccaatattccatgcagttatttttgttttggttttttctgaaataaccaaaaaataacaatgcactaacatattaatattatttaattttttaatattattttaaatggctttaattacacaaaattttctcctttccgaattttttaaattggtattgggctgaaatcaccggcgaaggaaaacttgtggctcaaaaatgtaaaaaaggctttttcttcattgctcggtttcgcttttggaagcgcttcaattaacgccacagttgaactttcttgagcccgtagttcaaaatcaacacttccataattataaggtgcataaactttccgggctgcaaaagttttgagcataaatcttcttgccttaagcaagatcaagatttttatttcccaaaataattaaactttgaaatcagtgccaatgtcacgaatcaaacgttccatatttttttcacaaaatgtaatgatgagaaaatcatttctgtagaaaattagtttaattcattttcgtttttttggtaacccacccgtctgtaccaacgacagtccaaacttttttgtcttggaccaaacgaacagcgtccgccgtgacaaacgttagttctatgtcactaaaaaccatcgtattatgagtctataaactttgttttattaaattaataaaataatttttaataaaaaataaaagcttacaccattgtttctccaaattttattgcttgtatcggagaacgtttagcctttttcagtggcgttttttcggaagacatttcaattattattaat

SEQ ID NO: 13755 - DNA, 1985 bp, Heterodera glycines
tggcacccgtgagcagttggaacccgagggcttggcgaatgggcatgcgtggcacgcgtgagcagttggaacccgagggcttggcgaatgggcatgcgtggcacccgtgaacagttggaacccgagggtttggcgaatgggcatgcgtggcacccgtgagcagttggaaagggcatgcgtggcacgcgtgagcagttggaacccgagggcttggcgaatgagcatgcgtggcacccgtgagcagttggaaagggcatgcgtggcacccgtgagcagtcggaacacgagggcttggcgaatgagcatgcgtggcacccgtaaacagttggaacccgagggcttggggaatgggcatgcgtggcacccgtgagcagttggaacccgagggcttggcgaatgggcatgcgtggcacccgtgagcagttgaaaccagagggcttggcgaatgggcatgcgtggcacccgtgagcagtcggaacacgagggcttggcgaatgagcatgcgtggcacccgtgagcaatgccaagaaaagaaaattgtctaatggccagtggatgtcaagaaaagaaaaggccagtggatggcaataaaagaaacattataaaatggccagtggatgccaagaaaagaaaattgtctaatggccagcggaagctaataaaagaaaattgtctaatggccagtggaagccaataaaagaaaattgtcaaatggccagtggatgccaataaaagtaattatcaaatggttactggaagccaataaatgaaaattgtctaaatgtccagtggaagccaataaaagaaatattatacaaaggccagtagatgacagacagacatcgcgtcgacccactgtcccggggtagacactttgtccttgtggtgaccaaatggtctaaaatagacagtcatgcacttgccactgccctacacgcacaaaaaacacggtgtcgacactttgtcccagcaagtgtgtagacactttgtccgttttgagtgtcgacactttgtccgttttgaccaaatttgcgaaaaatgtgctttttacgtctgcgcccatcctttttgactcaaaaaaacaccgcttcccgcgaaaataccgactttgcattttgcaccccccagcggctaaagggggttcgacccttcagacttgtcgaatcgggtcgaactttcttttaaaatgctccccatggcgcggcgcaactttcgccaagcgacggcaagacagctacgcttcagcgccaggcgctagacgccattctagaaaagttagcaaaaacaggttagcatatctcggcgcaaagcgcccggcgagagacggcaatttgttttcccagcctttcagggtgcgggacgcgcggggaaaaaaattctgactctccagcatcgctggcccaaaagattgctgtctatggcgcaaagctggtcaacaaaaagacagcaatctcggcgccaagtttttgcctaaatctattatttgcaaccttgtcccattgcacaatcctttattaacattcaaattacgcaataacataatcatcgcacccttttttaattttaattcatggtttggcatacttgaacatttaaacgaattaagaatttctggagtggaagcattatttttcctttcgtccgtttcatctatgcttaaataaaccttacagtcccctggaagtaaatctaaaatttcttcattatatttgtcaacaacagcattatacggagataagattgcgacttcactaataaaatcataatccatgttgtttaaaatattgccaaaaatttcatcaattaaatttcctttacttatacaattatttggaacttttatatatccattttctcccattgttccatttccaatcatgatcaaatcttcactgaattgtttttcgtttatattttctcgcatgttttgtgttaattttaatgttttaaataatttccacattggtgaattttttattaacaaa

SEQ ID NO: 13756 - DNA, 3077 bp, Heterodera glycines
tgcaggtcgtgggcataaataatacaaatggtcgaatataaaataatccataaggcataaataaataaatataaaagtaaattaaaaaataagcaagataaattggaaacattatagaatttaatccaagataaatgaaaaacaggttggaaaatcattgtaatcaatttaattgaaattcactacaaattacgattagtttttatgaaaattagcttaatatttaaaatatgaccaatatattaattctagataaaaaattaatagaataaaataaataaattcttcattcatcataatatgttatgcggcaaaataaaagcattgttttttcctttattgtaaaaaaggagagtttaattaaaaaaatttattattaaaaggttgattttgttttttaaataaaaataaaataatctgtttcgaataaacaaaaaagaaattaaaatattcattaggcaagccattagaattaagaagctaaaaattttgcttttgcgctacataaatttattaaatttaaaaaatctataatctaaggacatattgccattacggtaactacacacggctcaaatcgaacggtatttccatgtaaaaatattttcagccataatgtcttgaataattaacagaatatgaaaaagcacaaatgcaaattttaacaaaatttgaaaattaaaaaaaagttacagtatgcgggaaagaatcttcaaccgacattgagtcggaagaatacattattacaattatataaaccaatgaaattctaaaaaagctcaaaaaataatttccatgaagaataatgattaaatatatatatatatatatatgaataataaaagtgtaacaagtagaactttggggccccaaaaaaataccaattaaaataaaatatttaatattggtttcataattaataatcttcgtaaatttttaaagaactttattgcaaattattaatgttgtataaaataaataattattcaaaattacggcaaacaaattaataaaaactttataatatataaaatttaccatttaattcaaaaattgttcaaatttattgtaattttttttataaagtcattttgcctttggtcaaaatttatttttattgaaaaaatcataaattaatataattaaaaaacaagtagcgattatgatgataaacaaataataaaataatgcaatggaaacttcagtacccgtatgcataaagatcaggatcggatccccggatcgtgatccacgaatcactgattcgaggatcgaaaaatccgtggatcaaaatccgtatgcataaagatcggattgggtgatccatggatctcgatccgtggattgtattccttttcttttcctcagtagttctcatcaaatccaacgctattttcctttcctctaaatcgacctgatccgcggatcactttatttaccatgaatattaaatatttgggttttttgcatttttgttgttgcataatttatggattaacctagatgatcaataactgaaagattgtttacccaaactatgtttttgatggcggtgaatttacatcaaaacaatttcttttgccattctttcttatttttcccaaatcaatttccccaaaaaattaaaattattaatggcggcgcgattcaatgaagccatggtggctcgcttgatcgaacttgttcaatcgcgtcaagatgatttgaaccctccaactcgaactgcaaaagcaaacgaaaagcaaaaagaggcgtggaaatttgtcactgattctatgaatcgtgagtttcctcaggaagtgccccagggcggcttaacgattgcacaaatccaaacaaaattcaaaaatctaaaacaaagggccaaggacgaacgacaaaccgaaaaaaagttaatcatatgtgcgcctgtgctgggtttcagcattttctttaggcatcagcgtgccacaggcggtggaaagaaattcgaaatgactgaagtttcgcgcaatgttcaagatgatttgaaccctccaactcgaactgcaaaagcaaacgaaaagcaaaaagaggcgtggaaatttgtcactgattctatgaatcgtgagtttcctcaggaagtgccccagggcggcttaacgattgcacaaatccaaacaaaattcaaaaatctaaaacaaagggccaaggacgaacgacaaaccgaaaaaaagttaatcatatgtgcgcctgtgctgggtttcagcattttctttaggcatcagcgtgccacaggcggtggaaagaaattcgaaatgactgaagtttcgcgcaatgtttcccaattgtttgctgattcaccggcatttgagggtagatatgtgttcgagctaatgtgtaagtagatgtttgttaaaggagtgcccggcggcgtacagaccggtctcaacatcggcgacaccattttctttgaaggcaaagaacaagaggaaagtgccgaattttcctcacagcaagttgttgttgaagaaggaaagtcctatgccgttcttggcactgtgccacgcggagaggcggtgaaaactccaaaatttgaatcaagcacctctcgcgtgccattccgatctcgtgccggaactgcttcaactgttacagctgctgatgtaatggaactgcagcggagtgttctcgagatgcaatttgaagaaatgacaaaaaaacaagaaatttttaaaaaatttgaggatgttcttgacgatgctaagacattttttactgagggtcgcgaattttttcgtggaaagcattcaaatgagaaagaaacttaaataatgctacattcatttattaattggtgcgttttagcactttgtatttttttcagtttattttaataaacttttttgtctgcagcaatgtgtgccgcgttttttccaattgagacacaaacagcggtaaaaatttaccgaaagagggcagaaattctcgcccaaatgtctgatcaagatctctataagagatttcgatttgacagggaagggatagaggtaccatttttataaattcatttagaaaagctaaaaaggtacattactaatttggtgcgtgaagaagtt

SEQ ID NO: 13757 - DNA, 762 bp, Heterodera glycines
ttttcttagaaagaatttttctaagacttttttcttgtatttttccaagtttgaaatttaaaaaaaaaaaaaaatttttttcttggcggagttttgtcctgctccgtttttttaaatatttaattttaaaaatttcgtctctgccctccccacccactcacaatataattttttatctcttcatatttattgccgttcgccgtcttctccccctccaccctaacatttttttaaatttatttaattataaatattttttttctttaatttcttgccgacttttgacttttgtcttcctctcaccctccctcacaattttaattcatttaaattttaaaaaatttcttgccgatttttggttttgtctgtgcctccccctcccttcaccctcacacttcttaattttattaattattttttttaattttaatccatttccgccttttctttacccgcccgccccctctctccccaccctcagaatttaattttacttaataatttttttttattttaatttattgccaactttagactttttgacgacttttaatttttgtcttcccctcccgcaccctcacatttttatttgattttaattattaattttttatttaaattatgcctatggcgataatttttttatatttattgccgacttttgtctgcccccccccctcccctctaattcattttccatttaaatatgtttttatttttatttatatttatgcatttattgccgccttttgtctgcccccc

SEQ ID NO: 13758 - DNA, 1955 bp, Heterodera glycines
ctccacaaatgcgctgcccttgagatctttccataccatagtctcacgcaatttcgctttgagttcacttctcaaatcgcattcgctgctctgaaggcattacgtgtcccttttctgtttccacaaattgcccacttcatcgccgtggacagtgaaaaagatcggcggccgatcagttaaagagaaagaaaataaatttaaatgtacaaatataaataaaaaatatttattaatgtttagctgatcagtctccgatggaaaccattcaaaaagggaaggcgaaaaaagggacctcggcctccgtccccccccccccccaaatgtgaacgatgacaccgggccactgaggccaaattttgtgcataaaattagacgcggtgctttcaattggctgggaaagaggaggcccgggcagcgggctctttatgcgcgcacccatttaaatttggtagtttttattcgcaaaaaatcaatttttacatttctttatccttaaaaattgaattggagtatttaatttgtgactgttaacaatttcacaaaagttgagaaattttcggttttttttttggggggggggggtccttcctggttatagttttcaagttagtcgagaaatcctcggtttttttttggatgaggggggggggagtctttgttgttgttttcaagttgtttgagtcaccatttattaatctcgctttttacaaccaccatgcgtcatttctcggtcactattctcggtaaaaatcatttttctcgcacatccctgtcaaaggtttcaaaaatggccttcttagtccacgaggccattatgttataatcaaaattgcctctattgcagttcacgcgttcaatcaatgggccatcttcagttttttaggcctcaacttttttcatacttggtaaatgcctacattccttggtaccaattgaaaagttgaagtttatagaagcttttgtattgctaaaagacaacagagaaaaaattattcttgaataaacccgaaagatgaataaactgaggatgaatgactaattgattggaagcctaaagtgaggtagagcctcaaatcaaaattccaactccttaacgttttttatttgctgtttgcttctgctgctggttaattaaaccccattaaacaaaaggcatttttggaatttgtggttatttcaggcacgtacatttctttcattcttcgtcttaattgaattgctgtttaaaattaaacgtcttccaattttttgcttttggttgtgctctctttttcactctgttcatcagaaaccaattgctctttattgataaattcaccttttctccatagattgggtttagtcgattaacttactcaaaaataaaaagattttttatgtatttttacaattttctgggcgagtttcccaaaaaaaaattatgtgaaggggctaactttcaaaacaaaactcttgccggttttctgtcactaaaataaattacggaattttcaaatccctgaaattccatactgaacacattcccaaatcctgactgatttggcctttctgcggcttgttgaaagaaaatgtgtagtaaccacaatgccaaaaattaattacgcaaaaataaaattttctttacctaggagctaatctaattgtaagcctgtggcaggatttagcccgatttccatgttcctatcattaagcataactattttgccccaacgactggatttcaggcttaaaaatcctgtttttcaggtctaatccgggtcaattttcaagaatttacccggaaaggagtacggaaaaatcctgacagaatccggtcctgtctggtctctctctacttgtgaatgtccaaatacgggatgacaaattaattttgttgctttaataaatgaaattttcaaaagttgaacaatctctttccgaatcacagaaatttacattgtgtgcacattcttttt

SEQ ID NO: 13759 - DNA, 1534 bp, Heterodera glycines
  unsure (1)..(1534): unsure at all n locations
ttttgcttctgcttccttcgctttctttcttcaggtgatgtcggcacttccgcagcttctcttcctgcttcagcttttcttttgtctcttctgccttcttctgnttcggccactagtgctttggcttctgcaggtgcgcggggctttccctcgggctttgccttttgtttcttcatttcttcctcctttttctttgcttctgcctcttttttggccttttcttcggcatctctcttcgcttttgcttctgcttcctttctcttcttttcttcaggtgaggtcggcacttccgcagctttctcttcctgcttctgcttttcctttgtctcttctgccttcttctgttccggcactagtgctttgggcttctgcaggtgccgcgggcttttcctcggcctttgcctttgtttcttcatttctttcctcctttttctttgcttctgcctcttttttgggccttttcttcggcatctctcttcgcttttgcttctgcttcctttcgcttcttttcttcaggtgaggtcggcacttccgcagctttctcttcctgcttcagcttttcctttgtctcttctgccttcttctgttccggcactagtgctttggcttctgcaggtgccgcgggcttttcctcgggctttgccttttgtttcttcatttcttcctcctttttctttgcttctgcctcttttttggccttttcttcggcatctctcttcgcttttgcttctgcttcctttctcttcttttcttcaggtgaggtcggcacttccgcagctttctcttcctgcttcagcttttcctttgtctcttctgccttcttctgttccggcactagtgctttggcttctgcaggtgccgcgggcttttcctcgggctttgccttttgtttcttcatttcttcctcctttttctttgcttctgcctcttttttggccttttcttcggcatctctcttcgcttttgcttctgcttcctttctcttcttttcttcaggtgaggtcggcacttccgcagctttctcttcctgcttcagcttttcctttgtctcttctgccttcttctgttccggcactagtgctttggcttctgcaggtgccgcgggcttttcctcgggctttgccttttgtttcttcatttcttcctcctttttctttgcttctgcctcttttttggccttttcttcggcatctctcttcccatttgcttctgcttcctttcgctccttttcttcattcacttcggcacttccgcagctttctcttcctgcttcggctttttcgtttatctcttctgcctttttctttctctcgctgtttcttcttctgctatttcttcaaacatttctaattgctttgctaattatttcttcactaatacctcctttttatttgctaattacctctaatacagctgtcacttgcccatttgagtctttttgttgcacattaattgcaattcgtatctcttcttctctttccaatgagatactctcttccctaacacattctacttttatctccattctcattcc

SEQ ID NO: 13760 - DNA, 1300 bp, Heterodera glycines
  unsure (1)..(1300): unsure at all n locations
cggctccccttttcctcctctttggtcagtttctgttccaaaagagtcctcgantttcgtntnnttttggggntncccctttcctcttcttcccttcctgcttttccttccgtttgcttttgctcctctttgtcttttgctgctcctttcgccttctcttcctctcccttcgcttccattcgcttttgccttttttcccttacgctttcatttgccaatgcttcttcgaatgtctaaattatgtgcctcttcttcccattgccaaatttatgaattatttttcttcctagatcagatcaattcttagtccccccccctatgggctaaattcaaaatgcatttactgtaataactcgttctgttgtcccgtgtcccaaattacctcaacctttgcttggacttcttccttctgttcctcatcccttcccagtcgcacttccatttccagctgctcttcctcctcctcctttcccctcctcaattgctcctcctcctcccattttaattcctccgctgcttcttccatggcatttacaattatttttagcatcatttgctctgccacactctccgccactttcactaacactgcgtatctttctgaaaaacaaattttacctccaaaatttcatggcacattttcaccttcttccttctctatgctgatcaagtctgccttttgctgttgcttttcctccgcttcacttgctttttctgtgcctttctccgcttcttttactattaccgtatcctttatcttaccgtcctctctttctaccgtatcctttattctaccgtcttccccttctaccgtgtcctccatcatactgttcccactttctaccgtaccctcctccaccatttctttgcccttccccgttttggtgtccttctgctgctgttcctccacaactccgtcctcatagtcaacgatcactttcgtcccttggctgtccttgcccaatttgttcaccgcgtgcacttccactgaatttgtccttccatttaatttctgttggcttctctttcccttcacctcttccttcgattggctttttgaatgttatttgttcatgattctcgaccatctgtttgatctcgacgtttttgccatctttcacttcgaaattattaaccatccattggaattcggctaaatttggcattttcatctcaatttgcgtcttttcgcctttcgcttgccttttggcctcgactcggcccgcacttccaaggccaaaggctttccctgcccgataaaaggtgccttttcaaaattcgaaatgattttcggtgccat

SEQ ID NO: 13761 - DNA, 2997 bp, Heterodera glycines
  unsure (1)..(2997): unsure at all n locations
ttcttaagattttcaaaagaatatcttacaaaaaaacatttcttatttcaaaaaactccctttttaagaaacattttcggcgtgctagggctgggacttttgctgacattctaaaattcatatgattatcatttctgtaaactaaaaagatagaaaaaattttcattttaatttatggtctcaggcggcgcggctccaggacaatcgggcagtaaaatacacaaaaagataagaaaatgccatcgccgaaggggacagattgtgccatatcagaaaaaaggaaaataggcaaagaaaaaaattcaaaagctcttaacaatctttaccagctaaccaaaattaacaatgcttcgcatagaaataaaacaataaaaaatgacaaaaattctgaattttctgcaattttcacgctttaactttttatgggttgcttaatcgcttcgaaaaagcttacaaatatattcgaaacacttagagctttcgaatgaagtaaaatataaaatttgcttcatttgactaacaaagaaaaatttatggcaattgtaactcttctgttcagacgtagttgacacctcaaaaaccgaaaacgttttcgaaattttcgaagaacgaggccaaaattgttcaatttattcaatacaataaatttagattaaaaatcggatttagcattagcagaacggcgagagattaactaaaattatttttctcaattttattagcgctttattatttttacatttgttttcatattttgtaatttttttatccatgtttatgcatttttatccatatattaaatacatttgactattcatcattaaaactattaaaaaaacccattttaaagataattcaaatttatcagtgccaatattttctcatttggtccgttcagtgtttctcttcgtctgatgagacaatccaaagcttgtccatgtcttcagtatgttcctcaagatttgatggcccggatctttgactttcaagccgttgatcatttttctccacggttggcaaatgttgcgatggcgtgttaagagcatctgattgaataatcgaatgttgcgatggcatgttaagagcatctgattgaataatcgacatgccaaatagctacataatttcaatccaattattattccctcgatttcaaagtccataaaagcttttccaatacttaaatcgcactattatcccacctctttgatggggcggatgacgttgtccaggatgggccactgtgtttcggcgtcccatttgtgccgatgccatgccataaattggcattttgccgttcccatactgctgcccaactaccgtggttgttgctgtctgtggaacgatgctgtttttgttcagcactaatttatgagagtggtgatcagctgctgttgctgttgattgccggccttgtgaggatgcaactgctaattaaaggaaaaaaaattaattaattaattatgtatataattcattacccaagccatttgtcagacagttaaataggagaattatgtgttactgacaataaaatattatcagaccaggaaaatggttccatgatcagatcacatcatgttaattattgctttgatcgggtctcatccttttgccgaagaagtttcgaaaaatttgataactgcaaaattacaacgccaaattttttcggaaaatgttctccgttcattcttattccattttaaatattccgttactgcccggagatgtttaactgagaatcgaacaatattttatcaactcaattttcggttatattttttgtatatgtcaaaataataatttaaacaattagtaattgggagagtaaatccgttcacttttaaattttttgcaatttgttaacaaagtttttcgtgacgtgcttatctgtgcgtatcaaatgcgcagaaattttaggcaattgcctaaaaaacgcatccctactaattggttcagatgtgaccattccgatgtgccaatgtcgagcaaatgtgccgataaaaaaactctcaccaacagataatccttcttcgtgcaattgttttcgctgttgttccatcatctgcttctctttgatctcaaaagtcacattccaagcagtgattttggtttcaagtgcttccatgcgcttcgcaaggctttcaatgcgtttctcgagctgtgccaagacttggtcggcattttcgaatttcaaaagtgggccaagcatttgctcaatctttttcaatcgctgatcaaactcagcggcagaaatagttggcctattatccgctgaagtctctaaaatattggcccatttatatggccattctcgaaatttcgaccaattttcgtgaggttttgagggattatgttgtccttttcaacgggatcgtgcgagatctggcattggcccatgtccaggcctgatccaggcctttaggagcctgggtttttcctggatccaggcccaggccatttttcggcaaccaagatttttcatggacctggattttcctggatttttttccaggaaatccaggtctttggttccgatttttttaaataattttttgaaattttgcggagttaaaaattctcttctttaatttacaaatttacctgttgatgaagcgattggcttttttcgaagtttggacaaaaaattgatattgataccgccgccaggagcacagcttcccaatgtttcacattcgcagtgcaatatcacgaaaatgatgaaaaatttgaagagcaaattcatttgttacaaaaattgcctttttaatttgcgtttattttaaatttaatttaacttaattactgataacaattaagatggaaaattgaaaaaatttagctaaataacataatttctanaaatattagtanaaaaataaatcctataatttttgaattaatctttnaaatcattgtaaaaagatatttttatctnttacaataatatttgagaaatagtaaatgctatacatctatgcaaattgaagtcataat

SEQ ID NO: 13762 - DNA, 782 bp, Heterodera glycines
aaaaaaaataatttggtaaatttttttttgaaaaattttaaaaaaaaaaccattaaatttttcataaaatttcaaaaaaaaattgctgaaaaattttttcaccaatttttttattttaatttttcttataaaaaaatttttctaagaattttttccttgaaaaatttgtaagtaggaagattttttttttgaaatttctacggcgagatttcgaccggcgagatttcggcggcgatattttgtctcggcgagattgcgcccggcgagattccggcggcgagattttggcggcgagatttcggcggcgagattttggggtgcaccccaaatttgtccgggtttgaccatttaaaaggttggagtgtcccccattttgttcatttttccgaattttaactaaatctttgcatatttttttttatatcgttttcagcgactatgaaaacctaaaaaagtggttttgagtgttttttggctctgtgccttatgataaatatttacctacaacaaaaagtcatgtacttattgaaattggttccaatgtcttacaattagtgtaccgtttacgaggaattttttggttttaaaatatatttctatttgttttttcaattttaaatggggcaaatttgcagaccaaagacactgcacggcacaatttggcttcatcttttgtgaatggtttcgtcaactgtggctttggaagcgattcgctgttcaagacggacaaaggcatcaacgattggctggcaaagcacaaagaatggagtgggaaaattttt

SEQ ID NO: 13763 - DNA, 2397 bp, Heterodera glycines
attttttcaacgagtacgaaccaatcgcacaattttcaccgccaaaaagctcttatcgaaaaattcttcatcggccgacgatcagtttcgatcgagcggcttcgtggaattaggcctattacatcggtagacgtacatccatttacgaaaaattttagggttttcgttaaaaatatcgttggaaaagccattttttggtatcgagtatagaaaatgctcgaaacccagtgcaaacactccaacaattttttaaataaattttcggctcactcccgaattttctcaggcgaaattgaatgagtgcccacgggatcgcgtcgttgtgaccatcagcttcagtcagctgtggtgccatgatgcaaatgacttatgaattgacaaaatttggaaagcggaagaagtaagcaaaatctaataatgcctgcacccagaaaataaattatcgggaaagtttagaaatttaatcaagggatgccaaacggcggtcggatgggtgctttctaagggaataccaaaaaaggggcggacgatttggcacgacccgatttaagttttctcccttcctcattaaaattattagattttgtgaacattttctgggtacgggcctaattaatacactcaatctcctccaacatcatgactcatgacaaattccaaattctagcattggccggcctgaacatgaggatgtgcaccgcaagtgcttctgattgagcggcggcccgcagggaggcgaaagaaggaggaaaatgttggaaagatcaaatttgatttctttttttttgctgttcgtcattggcatatttaatttaaaaatgataatatatagaggcggatttaattttatgaattgcttggagtaattaggaaaatcttattccttggcgtgtgaggagtttgacagtgatttgatttttttaaatttgaggcaggcgggtaatacctctgcatgtccctcctattttctgaaaaaaataaattttttagaaaatcaaacgcctttcctgggtcttcagggtctgattgactgacacccattctagggcaatggtgtggaattgtggtcccgacggaaaaaatagtaaaatttcaaaaagcattttttctagggtaaaaaaggttctagtcggttttacgcgtcccatgacattttacgcgtcccaacaacagtttacgcgtcccatgacattttgtgtccatggcacggatggcattccgagaccccaaaaattttcggaaatcggaattccgtgccatccctggtctcatggtattatagttgtcctaataactaagagaaaaactttttttgtcaggtattcagtaaagtttttaactataaatttcgttgttaaacctaaggttatcatgacaacttatacacaggcaactcgaacaatggcttattgttagactaggcctaagtttaggcttttgtaaattttttttcttatattagttgaatttctgttgacatcaataagtgtgcttagagttgcttttgcacttctcttttatatacaaccacgcgaaaacggccacgcgaaaacgtcctgctggcccgaatttaacaacccttgtgctcaaaaatttcgaagttcttgaaaattgaaaaatttttatatggaaacctggccatggacggtaaaaaagaaaaaaaagcgacaataaatctttttatggataattatgggaaaaaattggcgttctgtcacatttactttttatctttatttctctcacttttacgtactatctcttcattcttaataatgtaaagaacaacatttacttcatcctgtttaactttttttctgtttgttaaatccacaccaaattttgcatatcgattgagaaaaaaattctgcatcgaatgttctataaagttttaatgaatttctatcctattttaaagttaagggatgatgaaaattttgcatttcttttcctctaattttggcgtactattttcatgtctctaacacatgaaaaaacatcaaattcgctaattctaacaattttggtttataggctacaaaatcactttgaacgcttagaatcaatagaaaatgattagttttcgcattttggttgaaatcagcagtttaggacttgagttataacgtgatgaacatttgaaactctcacaacttttttctgagatgtcaaattgcttagcatttacttagaaaaagattctccttttcaaatctttttttagataccaaatttgttcatttttgttgggaatgaagcgtattatggctgatcaaaataaaaaaatacaaaaaaggcatttaacagtgtaagtgcatatactttgtttttgcgtgtgttggcgttttgtttttgccattatttttttggaaatttttttcgttttttaccgtccat

SEQ ID NO: 13764 - DNA, 705 bp, Heterodera glycines
ccttgatcggatgatttgtattctttttccccctttactttttgtgccaacaacattttagttaaaggtacatgagaagagaagggtctctcttaagggagtcttaaggtagccaaatgcctcgtcaccattaagtcaggtagccaaatgcctcgtcaccattaagtcaggtagccaaatgcctcgtcaacattaagtcaggtagccaaatgcctcgttgctaccacaaagtcaggtagccaaatgcctcgtcaccattaagtcaggtagccaaatgcctcgttgctaccacaaagtcaggtagcaaaatgccttgtcaccattaagtcaggtagccaaatgcctcgtcaccattaagtcaggtagccaaatgcctcgtcaccataaagtcaggtagccaaatgcctcgtcaccattaagtcaggtagccaaatgcctcgtcaacattaagtcaggtagccaaatgcctcgttgctaccacaaagtcaggtagccaaatgcctcgtcaccattaagtcaggtagccaaatgcctcgtcaccattaagtcaggtagccaaatgcctcgtcgcgaggttgactggcagcggccggcgcaggcaagggagccgagcgaggtggactggtagcggcaggcgaagggagcgatggctcctttgtgttgagggctggcagcggacggctcaggcaagggagccgggcgagg

SEQ ID NO: 13765 - DNA, 2861 bp, Heterodera glycines
caatcgactagtgtttaaggttttgactttgacttgctttttttccatttattccaatcgattagtgctttaaggtttagtctttgatttgcttttttttcattttttccaatcgactagtgctttaaggttttgactttgactttgctttttttccatttatttcaatcgactagtgctttaaggtttagtctttgattttgctttatttttcattattccaatcgcctagtgctttaaggttttgtctttgattttgctttttttccatttattccaatcgactagtgctttaaggtttgactttgactttgctttatttttcattttttccaatcgactagtgctttaaggttttgactttgactttgctttatttttcattttttccaatcgactagtgctttaaggttttgactttgactttgctttatttttcatttattccaatcgcctagtgctttaaggttttgactttgactttgctttatttttcatttattacaatcgcctagtgctttaagcttttgtctttgattttgctttatttttcattttttccaatcgactagtgctttaaggttttgactttgactttgctttatttttcatttattccaatcgactagtgctttaaggttttgactttgactttactttatttttcatttattccaatccactagtgctttaaggttttgactttgactttgctttatttttcattttttccaatcgactagtgctttattttccaatttgggatttttttgtaatttcgctcttttggtcatgaccgtcaggggcaagtgctggctagcgctttgttccttccggtatgcggcagcacaaaatgcccgtctgccgcttgcggacgccagaccgttcgagggggtctgtggcgctggggataactgtttttggaatctgttgagcttgacatagttaattaaagagtttgaagaatacgcttggtggagcgttagtgcatggaatcaaatggtggtagtagcaaatattatacgagcgattagccatgcaatgattgcaggtctaagaggtgtcaggagtccaagcctctggactttaaactctgaggttggctccaccgagcagttgccgacgtacactaaaggtggaatttacgtggtgccacccgtcgcttaaggcaatcccacaggtgacaataagtcccgttggcgtccattgacgtcccgctggcatacacctgttggttaccacattcggtggtcaagggccggtcttgactttgcttttttttcatttattcaaatcgactagtgctttaaggttttgactttgactttgctttttttccatttattccaatcgcctagtgctttaaggttttgactttgactttgcatttttccatttattccaatcgcctagtgctttaaggttttgactttgactttgctttttttccatttatttcaatcgactagtgctttaaggttttgactttgactttgctttatttttcatttattccaattaactagtgctttaaggttttgactttgactttgcttttttttcatttttccaatcgcctagtgctttaaggtttgactttgcttttttttcatttattcaaatcgcctagtgctttaaggttttgactttgactttgctttttttccatttattccaatcgcctagtgctttaaggttttaactttgactttgctttatttttcatttattccaatcgactagtgctttaaggttttgactttgactttgctttatttttcatttattccaatcgactagtgctttaaggttttgactttgactttgctttatttttcatttattccaatcgactagtgctttaaggttttgactttgactttgctttatttttcatttattccaatcgactagtgctttaagctttgtctttgccttttatattaaatttaaaaaaaaaattttaaatttcttttttaaaatttgtaacaaataatttttttaaaattagaattttaaaaaaaaatttttctgttgtgaaagtgcggaatttaaaaattttaagaacaaaaaaatttcaataactaatttaaaaaatttcattattaaaaaaagttaaataataattccagaatccggattctgacttttcaaatccggaattccggaattctgagcctcgcgttccaactgagcacgggtgccacgcatgcccattcgccaagcctcgcgttccaactgagcacgggtgccacgcatgcccatttcaactgagcacgggtggccactcatgcccattccaactgctcacgggttccaactgagcacgggtgccacgcatgcccattccaactgctcacaggttccaactgagcacgggcgccacgcatgctcattcaactgagcacgggtgccacgcgcatgtgccggtagctgctgctgcacgaacatccagacacgcatctttcgtcagctgctactgcactaacaaccgcaacggtgcacaccttacgcatctacacctcgaacggctagggcgcggctggctaaactgaaccgcgcatgccctcagagcggctagttatctatatataaaaaaatggggggggctctttgcaaatgtggcccgcacattgcgaattctgcacctatcgacccaattctttttgcgttagccaactgatctccccttactccaacttcaccgtgcaaaaaaatttgggaggccctcggcgctgagcaacgctaacctgttttcgctaagtgttgcgcagcgccccggcgcgcacagctagcggttgggcgccgcttggcgaaatgcgtgccatgccgtgggggagcattttaaaaaaaatttggcc

SEQ ID NO: 13766 - DNA, 1642 bp, Heterodera glycines
gcgaggccaccaagccaattttggaaagaatctcgctgaaggaatcaattttgagtccgggaggaatgataaaattgaggcaaatcacaaattatttgtttttttattattttatttttctatttcttttgttcgccaatttgtcctttttttctcgctctgccttatgccatttccacccatttttgccttgcgcagggcgccggacttttcgacagtggatttttcgacagaggacttttcgacagaagttcttttcgacagcaaaggacatttcgacagaaatattataaaaatgggcgccggacttttcgacagtggatttttcgacagaggacttttcgacagaaggacttttcgacagcaaaggacatttcgacagaaatattataaaattcaggaggggacttttcgacagtagatttttcgacagtaaaaagtaattaaatttcacatttagttgtgtaaaagcgtaaaattttttccaaaaatcaacaattaagccaaatcagtattgagatacataatatttaaactcttaattaacaaaaaaataaataaataatttttggtgattatttttagaaaattttttaattcttattgatgtatttttgaaaattttaaggatcgattcttaggggtttaatttttgtttttattacatttttattcataaattttgagcaaaaacaaaaaaggtcaaaataggttttgttaaacttcttagggttcaaagaaaataaaaacgataaaataagtgctaataactcgaagagttgcttaacaatcaccaaaaaacatattttccatgctttagggccactggaagttcagaaaaaataagtaaaatctaaaaaacttatttctatgtagtaatattatttagcaatacacattaatatgttaattaaaaagaaatttagtaaaactgacaaacaataacttgtttttatgattactgtcgaaaagtccattattttttatttttctgtcgaaaaatccttcactgtcgaaatgtcctttgctgtcgaaaagtcctctgtcgaaaaatccactgtcgaaaagtccgggagccctaggaatcggctaacaacaaaaagccgtggaaagggaattcatctaacaataggcaggcacattaagaaataacaattagctaattggcctgggattaggctagttgaaacaatgaggtttcagttgcaaatagcttaaagttagtaaaacacagccaatctctataatttgaatgaaatttaaattaaatttttttttggtcaaaaccgacaaggcttgtttcacgaatcttccaaaatctcagaaaaaacgccacgaatcgcggtccgctccacccctgctgatgtcagattagtgttcagcaccccggaaaaccctaacatacaaattttccaccaaaaaaattaaatcagaaacccccattctcaggattgtctaaaaccacggaagcgcggctttgtgccatgtagaaggaaattagtgtttatgaatggacaaatattgccttttctcgttttatcgtataattacagtaattagcacaaggaatgtaagataaagtgaagtggaaaatagggtcatcacttggaatggaataaaggacactaacaacaataacaat

SEQ ID NO: 13767 - DNA, 1580 bp, Heterodera glycines
  unsure (1)..(1580): unsure at all n locations
ttgccgcgttcatccaccgcgtgacccttcagaaattcgaaagtgccgaaacgaaacgcggacttggggatggaaccgtagctgaacaaaacgagggcaaataaatggaaacagtttggcaaaacgtacagcagaacggacagtccgcggtaaaagccggaaagtccgtgacttcggtacgtttgtttgacacaatcggcggggccctggaaaaggaatggacaaaacttcaaaaagaacaattagtcattaatcatcaccttaaattttggagttgccgacctttcatccaactgaagttgcgttttgacgtactcagtggggtaagtgatgcaaatttcgatgcctcccgtaatccctccgatcacaactcctttcattgtcctctctgaaggagcaaacctaaaaggaaatgcgaaaacaaattccccttgaacacaccttcgccatggagaaacagcttccttttctatgttcggagaagtgaccacttcagtcattgggcaattatgtcaagaaatttttaaattgtaccaaatggaaaagagtcaaaaacaatttgtttagctaaaagagaatttaaaaattacgattcatagggcaaatgaaaaatgggaggaccaatctttcaatgggtggggcggtgaacaaaacaatgcatgtgcatattacaacactttaaaatggaaagaattgatgaatgcaaagataaagggaaagaaatttgaaaaaggaaatgcaaaaaattaagcgttcttcgaaaatggtatgatcaattaagggggattgtaattaatttgaaaaagaacattatgtcattgcataggatatttggggctcagaaaattgagtacagaaggaaaattgggatattaaaatgaaatcttactttcaaaatatttcaactaattaaaaaagcattgcatagcttgagattgtcaagttttgcattttgagcataagaagtttttaaagaaagcctgtgccataattatacgttgtgccatataaggacaaaatcacaacgtaaatcaaagaatgtcttcaaatcctgtagaagggactgaaaacttgggccaactacgccaaacggcaccacaacaaacggtgaacatatttttacttgctgaaatttcttgctaataattccaacaattgcttgtattttgagactgccgcggatccgtcgtcattgaattcttcgaattccgctgccgttgaatcaatggattcggagggtgtttatctttttgctgaccgtacccaatcctccaactcgctcacccccgaacaggccttcgtccacatggtcaaggcaatgcttggcaccggacttctctctctcccttatgcgttttcccattctggtctttatgtgagccatttctccacactttaatcatttgcctcttttcagcttggtttaatccttttggtcttaatttgtcttgtttgtatgttttgcatgcggcaaattgtttttgcggcccattacatttgtacaaagttagtcttttttaaatacattcttgattaatgttttctncatttacaggaatggtcgtgagattattgactat

SEQ ID NO: 13768 - DNA, 1005 bp, Heterodera glycines
aaaaaactataatttaaaattaaatctcagagttcctgaaaagtaaagtgctcactaattgatttggcgctattccattttacgctgtccaaaagagcaaaaagactaaattaaaaaagaaaaaaactttgagaacatgaaattcagcttttttcgagtatatcccaaaataattttgtatcagttgtctttatcccagaatttcgacataaaaaattctttaggctttaagccttcctttgaccttgttaaaataaatggctccataaaccaacgggatcatatagcccatattccttgtgacatgcacacaaatttgtgcccaaatcatcagatcggtgaaaatggctttgtatggaattttttgtcgcactttttcagcattgtttaaggctaattctgtttgttcaattaatgccaattccgctttcgacacatttctaaaaatatgtttttttgagtgatttatttattcaaatcacttttgttggcgtggtgtatcacggtaaaaaagcaaaaaaattgccgaaaataataatgtgctggtgcctaaaacgtagtaaactgttggccatccaaatttttcagaggtacacaaagcggctgctaatggcattgttatgacagggccaaactgtaattaaataaaaaaatttaaataaattaagtataattaatatttttttcttgcctgaaaatttagtgtaagcacagaaagaaatattccataggtatctggtggactccaagatgaactgattacacctaaaaaatgggatttaaaattttttttaaaatattttttaatcgtaccagctcctgaccagccaattgaaattgcaatacccttaaaaatatttaaaataaattagaaaaaaattcaggtaaaaacacctgcaaaaattgtagaaaaagcaatgggaaaaaaccaccaaattttactgtcattggtgtaaataatgtggaaagagtgcttatcaaaccataaactagcatagtgtagct

SEQ ID NO: 13769 - DNA, 3146 bp, Heterodera glycines
aagggcactgccattttgtgcatcattttcatttgaatcattttcttaattttttttttgttgttttttaccagcaatatgaaaataatttataaaaatattcgaaattttgttcaaaaaataaaatttaaaaaagtatttatattttcaatttttacggaaattttataattttgtgagtattttcgagcttattattcctttttttttgtttaaatttatatatataatttgagtgtttatttaaatttttgtgcttgaaaatactaacatttaatttaattatacataaataggtaaataattttttctaataatttttccaccttttaccatgcaaatgacggtgaaattaaaagccaaccaactgctgaaaataaaattccatgtaaattaataaattaaatcaaattaaataaataaataaaaattatgaaaatgacctggcgatcagcgacaaacagattgtgctcaacactagcacaacatatcgtgtgatgccaaaacaatgttggaatggtagacaatcatttttagtctcattgtcaggcaaaatttttgtaactttgcacatgccaacgcttttaattgaattaaaaaataaaacaaattaaaaataatataaaaaaattggaaaagatttctcaaggaatttgtccccactctctgcaaatgctaataaatgaaaagcattttcttccccgagcgcatccttcccgaccgaattgatttgtttgctttgcttttgtaagcgactgtctggaaaaggttggacgatgtgtggtgacagaacataccaaccgcgagccgaggcgatttccattttttcatctttttttttttgtgtgcttaaaatgttctttgctttattggaaaaatcgatcgatgggatgaggacatccccaccacaaagtcgggatctcgacataatataaacaatttttatggaatttttgttgttttatgtgagaaattgggcacggattttaaacatgaaagtttgatgaagtttgaagaaattattaaatgttaaattagaagaaatacaaaaaaaaaatattataaaagtaaaacggaagatctcaagttaaaccaaagagaaattaatctgtttttgaattattaaatttttaatgaatcatgtgtgtgcgaaacaattttcaataattcgatttaattaaaggtaaataaattcgggatctcaagaattaacaaaaaattaatttattggtgtaacatggatagaaaaattaaaaaaaaccaattttagaaaaccggtataaaataaggagatgattttttaaattttagtgaacaagaatactccattgcttacacagctgtcgaaaattaatgtgtatgaagaacaaaaatgggagcaacagctgctggctggtcaaaagagtcttcattttcaagaaaattttaaaaatttaaattatttaactatcattcttaaatatttaaaaatttaaattatttcattattatatatttttaaatatatttatgaaaatattttgctgcttaaataaattaggtggtataaacaagttaatatggagaatttctttgtttccatggctacaaagtcgaaaataggttttgattagaaaatgtaattgaaaagttggaatttttggtgtttgatcaaatttctccgcatactcgaataaatagtgccatggttctcgaccaacttttgctattagtaaaattggtcattttttgtagtcaaatgagccatattaaatttaaaaagtgcttgctgccctaccttataagttaattacttgggctgggatttttaagcaaaaaaaaaaaaaatagcaacgattcattttttatctaataaaataatttctatagcatatcaatcaacaaatgatgacatcatcggaatcgtcgcaatgcacttaaatgcgcttgtgagacccgctggtgccagggttactaagcacactctcagagtcatgcacttgcggatggtctcctgaaaaaaaaaatttattaaaattaattaacttttaataaaaatttaattacccttgagagtgcccaagctgatttgcccaacatgaatgcccagcgcagcacagttggtgtcaattgtgccaacttgttctcggaactggacagccaaattggccaattcggcgttggcaccgacatgggaagcggcggaagcggcaatttcgaacatggcacggacgaagccgagagagcgagcacactcatctaattaggaaccaaattaatagaaattgaatttcaattaaaaaataatagatgattttaaagggatttaattgtccattggtaccagatgatgattgagctgcgttgatctcgttgatgagtgtttgaccaccattgccagggcaccaaattgttttcagttggttttccaccgcagcggcgactctttcggcactcagacaaagcgaagactttggcatcgaagcggagaatgtgccggtgtgatctttcatcatcgaaacaacatgttggctgccaggacagcatggatctttttaaataaaaatgattttaaataaaaaatttttaattaatacggggtgctgaaaagcagcatttgcacagcaaacagacaattgcgacgatggaaatgagtgaagagcagaaagatgaagcaattttctgagaggatttgaattcttagaggatgagtgaatgtgatttgaatgatggttttttggcattttcttctgcgtttaaatatgcaatgaatgaaaggttagctaatgccacttttaagacgtggatttcctccgacaaaaaaattatattaaaatattattttgttataatgttttgcttatttgtaatatatccgcatgaaagtgaaacatttgagttcataaatttttgtaataaataggaaattgctggctggaacttcctcttaatagtattcatgtgaattataaaagatctttctcaattataaagataatcaatttcttctaatgaaaataaaatttctgaattttattttaagacttatttgttaatgatattgaaaagatcttttattatcacatgaatcaccataaaaaaattctagcaatttcctatttattaccagaatatttatttcattaaaggaaatcgaatatctcact

SEQ ID NO: 13770 - DNA, 1430 bp, Heterodera glycines
  unsure (1)..(1430): unsure at all n locations
ttataatacttaccaatacgagaaagtcatcatcatcttctaaactatcaaattaagatttgttcaaaaaattacgtaaactaaaaaaattatggacctgagaactaaaaaaatggttttttcgaatatatttgacaataactttgtttaaacgtaatgaaattttttgaaataattcagaaaaattagaaattttattgtaccgagtgatttcaacaattcaatagatacccttaagtaaaagtaataatatgcttatattttacagttaaattttttagttaaatagcttcatagaagtaattttttaaattatttttgtatgaaagataattaataatgtaattaaattagaaaacatgaaaaaaactagacacataaaggaactttctaatatatttatatacattaatttaattgaatataaaagcttttcataaaactttacatatttaaaaaaaaattttcgataagactctaacacatttatttatcgcaaagtcggttttacatattttttagaaatattcaaattatttcttgatttttttttacttttaaataaataaaatagaatatattataaactaaaaaattgagaaattataattcatttatttaccattatttttgtaaatatttttttatttgatgcaatacataatacgaaagaaatttagcatttgtcagattttattttatattaaataaaaataattataattattgctttagttattttgatttaaattattatataattacctaaatcattatttcacattataaaatatttaatattttattacatattttcttgagatatttcgattataaccaatgtgtatgcatattcctttttatgctaattaacacttttggaaactcaaagaatggctagcaaagtttcattcactcgtacaagtgccggacatcctattgcacaggctggcccaaaatctggcacatgttcagataatgaaaaatatataattattttatttattttattttttatcttggaacatttataaaattctgtcttatcacttattcaattggataaaatggatttattttgttttgttttttgttataatacaataaataattaaattttaaaagaattaaaaaattgatgattttatataaaaattttgtttttttcaatatattaatgtttaattatattcgttagaatttacttaatatttttattttttagcatgcaaatggaactttttttaataacaaatcgtttccttttatacccttttaaaattaacatattcgcgttatgttgtttggttaaattttggtccaagaattatgttcgttaatattaagaaggttaatttgttatataaagataaaattttcatgggaatatttttgtttaaacnaagaatttgcatatttgatcatgcaac

SEQ ID NO: 13771 - DNA, 2310 bp, Heterodera glycines
acaggtttttattttgcattgttagataactaaagcatttggatatcgtcgagtgtattccataaaaaacattttaattttgtttttacctttttagctgtttgagggctcaactgaaattatgggaaaaggctaaagcgtttatcgtacgggaaaatgtgagcattcctcgcttttacttcgctattcgccgaacttgaggacttcatcaactgtcaatgggaggacaaagaaggaagaaaagtttgctcaattttcacccacctgtaatacacacgccgggaaaaattttgtaattttggatgcgatttgttaacagattttgtccaaaaaaaccaaaattttttagcgattttgagcaaaattttcaggaaaataaggattttagagtccggcgctgcagatatgcaccgaaggaaaaatacgtggacaacaatttctaatctaattttttcacaaaattcttagaaattgttgtgtcataatattacctaaaagttttaaaataatattttaggaattaaaaaattttttgataattcttttttgaaaaaaataaaagtcacaaaatgaccaacttttacgttaaactttgaaaatttaattggaattttggagatctgtggaaatttttgggatttttacggattttttaagaaaaattagcaaatgataatattttttaatttaaaattcaagatattaattaaaaaatggagatttttcgaaaaattatcatgacttcaatcccgcgggatcccgcgggattggtaaaatggtcgggagggatcccggttcgggatcccgatgaaatcccgatcccgatcaatcccgatgaatttaaaaaatccttctggacggatcccgaggtcgggatcccgaatttaatcccgcgggatcccgtagaaatcctgcgggatccctatcccgtccggtctctagttaataacaaaagtgcttaagattataatattaaaaaattaaaataattccatgatgcttaagtaattattaaagtttccttgcaaaaaaaagagcaaatgtaatttattcaggtaattaaacaaaattaaataagtattaaatgcaaacaacaaaataataaaaaacaaaaattcaatttaaagattaattaaaattgaaagcatcatattttattaaggacaataatgattatattaattaaaacaaatgttgtaaaaaatgtaaaaaccataaattattttattgtttttaacttctgtatattttcgatttttattagtcagttttccatattttatattttgtttgattataattatggttctaattcatttatttctttgttatgattccaattaatcaaggttatttcacgtagcttatagattgtgtaaaatcctccagtagtgctaggaaatcgaatcattaaattttttgtttcttttttcaattatatttcattcattaattaaattaagttctatatttcatactaactgtttatacaaaactacattttttttctctttttttttcatttaaagtttatattcttttataatatttttatgttttacgcattttgtttttgtcttatttcaatcaacaaaacacaattttttttcaagtatccatctgtttcaaattgtggcgaaatttaacaaaaattagtatttcatcgcgcattacaacccaagaatttgagtatttaaagagaccaaaatttttattatcttataaatttttgacttcaaacattaaaattatggcgatttaaccatggcgacaactttttggtttatgagtcctcagtaagctttaccattagcataggatgctcctgctggataaaatttatgaaattaagtagtccatattttatttctgtttatgttatcaattttcaaataaattaattcattacaacttttataaaaaatgtttattcaaaatctatttttttatcaagccccaaattcaaaatctatgaatacagaacagtcttgaagcaaaaaatctaaatttagttttcatcatataattattattttttaacttttaatcattaatctatttttctgtatggatattgattatcgttttttaaataaattatttttcaaatgactttgatttttatttacttaaattttgattgcttgataaatttcagattctgtttaaaaattaaaaaagtatattttattataatattaaataagttattagcaatttttaaaataaatagcaaaatttacgttaataataggcatcgcctgattgagcgcgcatgtgggctttctgaagattggacggaaaattttt

SEQ ID NO: 13772 - DNA, 2870 bp, Heterodera glycines
ttcatttaagcaaataaatgtttatggatgtaaagggggacacattaagcaacaataatcggacatttgagagatgtggggaaataggacacaaacaatcaatcaattagcgaagaaaagtgttggaattggagggaatatcaaataaattaattagttttccaccacaaaagccgtgatttaaatcgaaacaacaaaaactcaaacattcagagagagatggaaagaaaaggacggtttatttccttgaccatgtttatgatcagaatggtggtcaaccacctaaaaaattaaaacatagcccacacaaaaaacaaatgactccgccattggtgaattatttatggtaattttgatcactttacacaatttcttgaagccgtggtgacggttggcgctgctgttgaacatttgttgtcgctgctgccgccgtttccgcgttttgttgcggcgcaaaattcctcttcaacatctgcaaaaaatggggggattttaaaaatatggcaattggaatggttagaaaaatcaccgagaaaaaggcccatcgcgtgatgtggttggtcatctcctgcgtactgctccatttgcatcgcaaatacccgtacagattggtgaaggtcatgcctggagaaagatggaaatgggaaatgtttaaagaattggagcgtaaattacgattttttcggcgataaaaacgaaaaatcgctgattttttccgaaacgagaagttatggtcaaaaatgttgggaaaccaacgaacttagagattttgcaggctaatttagaacacataggtatttgccgcctgtttctccccaacaaacagaaaaaacgaggacatcaaaccaaacggtcggatcattaccaagatagaaactgtccctaaaatttttgggccgacaaagtcccgaaaacgttaaaatggttgctgttttggcactgacctgctccaattgctgcgaccaccatccattgccagtggagcgtgaggaaagcggtgcacaccaacagagtccagaagaatggggccaccaccaggccggcccagaaaattttgcgctcaaacgtgtcgtaattgtcgggttccttggaaaggagaaaatttatgggatgacactcattttttgaggtggtaaggcatttaaaacacgaagaaaatgagagaatatggaaaaaatagtggaaaaaacctgggaaacttcaaatttccaatggtttttgccgtccgcgtccaccaaactccaccagcgaaggccggccaacagacgacccgtcacatttttgacggcccacaaatccgcggaatgaagtgccaactgaaaacgcaaagaatacgctaaatcaaaagggaatggtcacgaatttggcaaatttcgttcaaaagtgagtcgaaaacttggaaaattggcaaagcggtgcctatttttaaattttttaaatcgcgctacaattttttatgaattgagggccgttacaaaaacaggcatcagccgaaaaagtgtcgtttgatattcaaattccaaataaaattaagcggagcccaagtcgatgtcaaaaaaaacgtatcgtaaaataatttaccaaaatcagaaactgaatgatgaacgaactgaagaagaaatcggccaacacataaaagacaattgcgccaattcgaaagcccaaatgggccaacacaacgaagggatgtctggcaaaaagaaaagaaaattaaaggtaaaacaacaattggggggggggaaattcggtattttttgcttagattgaataatttcttttttccacgcatttaaataattgaaaagcataattaaacatgtgaaatgggcccttaatttgagcacataacccacttcagtgctcgaagcccagtcagaggcttttcttcaccaaaatccatttgtgtctcgaaattataggccatacattaaagctaaaatgtggaattaataaaaattaattttaagtaataaaataagcaaacttttaagcgtataaatcataaataagccaacaaaagcatcaattaagtaaaagtgttaaagccaaagagccaacgcaaaatttattttttttctttggtttatttttaaaaatttatttgtcataagaacataatgccatagagggttattttaaactttcattgaatctcttaaaataatatacggtatttcatgttgagaattactttaatttcaaatatttgttttattttcttccttttccaatttctttgtttgcatttgctaaaatgaccaaagatgcaaaaattttgctgcatttttataaaattctgtccaatatgttcagccaaattttgtttttccgctcttatcacaaaagagacaaaaatcggagaattcatttcggggaatccctccggcggcggcggggagtccctctccccccccccccccccccacaaatatttgttttaatttttggtcacattttaaggcaataaaaatataatggacaaattggtgcctgacaaattcagtctctaaaaataggaaaatgccggatcagcgtttgatcaatgatcagggtatagggaaaatttttggctatgttccaatttaggcgtccaatcagtggcctatttttgggttcaagaatgatcaaaattcattgatcagatcactactaaacgatttcatttggctaaattagctttagaaaatttcaatcgggctatattttaaaaaggagtttgaaatttttgatcatacatttgctcaattcaatgatcatgatcagcggcgggtgttctttgatctgccccactgatctttggttttccctggaaaacttagaaatataaaaaattcctttctttaaatgggaaaattgaaagtgttaaaagg

SEQ ID NO: 13773 - DNA, 1994 bp, Heterodera glycines
  unsure (1)..(1994): unsure at all n locations
ttatcagttttatcaccccaattntggtgaatttcccttccgttttttgttttcaaatttgtccattgaaccgatcgattctaaattcggtcccggactgaattggcgacgtttgttttgtccttttcccgctggagggtcacggcacaccaacggacgctgcttatcattagcgtcaaatcatgggacacaatacacacacatacacattaataaattggtcggtcgcctctccaatttgggacaacaccccccggggtccaataaacattccctgccccacccctcggggggtattaattgcatttcaatgataggacaattaaatcaaagggaaatgggctccccctatcctcactgtttgctgctcctcattaagctgtcagtttcattaaagttcaaaacataaatgcacttcttgtgaggctcgagaatgggagaattcccatttggcccgaaaaaaatctcgaaacttttgtcgacgccgaactctcgagctccgtgaacattaaaacacttaggatgaaatcaggttaattagtataagccgaagtcaaaaggacataattttttgagggtggcgggcactcactgatcactttcccatccataaatccctgatcaaacttcaactggaatgaatggccaacagtaatcctaatcagtctctgatcatagcgagactatttaaatgatcgcgaattttctctcaattccaaaccttttaatcagttttggatttgatcgatcagccagtagatgatcaatttttctatctcatttcaactttatctttactttcggcattttcatttatttttccccggcattttcccagatttttcttcaaatttccgcattttttcccgccattaatgagttgtggcttatcttttcccccggctttttcttgcctcttctgtactttgctttttaattttcgttttttcagatttactttccaacaacatcccaatccttctttttcttcctcttcctcaccctttatcccgttcatttgtccaatttctttcccctaattaatcccctcaaaaagtgtgtgccacggcccgtgagttcctttccatgcttttccccgtgtgcccctgagggggcgattagcgggtgccgtcgtcgggcgcccgactaattgcttgcccgggggacacatttccgccactttttgcgcccaatggaatgaaaatgcccccgcggggcgaaactcaactcggcacagcccccgggaagaacacattaacacttactgctcaaaaagcttcttcctccgcactcgccgcgccagcttaacagaatataaatttgaggattttccagccaaatttaaatgaaatttaaactttgattaaaacttcaaatttttaatcttacggggtaaattttatcaaattaaatttcttccccgactgtaacctaatcggattttatttcggtttatttcattttttcggtacgcaacattcgtttcccatggcattcgcttcttttcatcttcaccgacggaatggtggtatccgaatttagcacttcatctattttcattagctgccccgaggcacaatgtgagaatgagtgaatgaatatggaactccgagccgcgggaggagggtaattggacggagaggagagagagagagatagagagagagagagagggagggagggagagagagatagagagagagnagagggagggagagagagagggagggagatagataaaaagggaaagaggaagacaaagagagagagagaggagagagagagtaaatgaaatagtggcctagagaaaagaggagagaagagtgagaagtaaagaaagaagaggcacagaaaagatagagcgagagagagagagaggggagagaaaaggagagagagaaatgagtgtgtgcacatcagagaaacaaagaaggtacacagaagagggacacagaagagagaatattcgaaaaaatgcatgacacacaagaaaa

SEQ ID NO: 13774 - DNA, 458 bp, Heterodera glycines
caaaaactgccaatttttgcgatttttaacaagtggacgactttttttgtttataaaaaaacgtttttttcgcggcgcggtttattaaaaaaacttttaggggacaggggggttcggcggtgccgataggcgccgccggaaaatttttttgtaattttaatgctatttgtaagcagattttgtctaaaaaatgaccaaattttgagatttttggccaatttttaaggaaaaaataatattttttgggggccggcggtgccgataggcgccgccggggaaaattttaagaatttttaatgaattttgttaagaaaatagccaaaattttcagaaatttccctcttttccccttcggcggcggcgaccccccccccacctctcacctcttttacaccccccccccccctcggtgcgaaatgggcggacattttgggccctttgcgggggaaatggggggt

SEQ ID NO: 13775 - DNA, 2611 bp, Heterodera glycines
  unsure (1)..(2611): unsure at all n locations
gatgacggcaaaggtcgacttttgccgtcccttcagaattgaattattaaaacaaaaattgttcaactgattcttagaaaatcaattaatattttttatcaaaaagttttagaagttacaaaaattaaatattcaaatttttaaaaaattatttgaaattttattttttcaaataattattttcatggaatcaagaggtcaatttaaaaaaataccttctaaataatattttaagattttttttgctagatttatttatagtttttatccaaaataaatttttagattttaacaaaaatcttatggagatataatattaatcgcgatgagacggaattgaacatgagcagagggataagagagggattgtctagtttacagggccaatttcacataattttaaagaaatttttttatgttttaaaaattattgaaaataaatttcaagggttttagagattgctgatcacgaaaatagcatccatttcaaccagttccgtatccctgatccaaactcgaacaaaaagtcgaaaaattaaaattattgaatttgagtttttgggtcgaaccatattaaaatataaaaaaaaaagaatttagtcaaattcgttataaaattagtacatttgttgaattggaaggaagagaaaattagaaggaaaaaccaaaaataaaattttttagtaattttttaagataaaggctttttaaaatcccagagagaaattccaaagtttttcatttttatacttgagatggaagcgaaccctagaccttttttgttcaacagcaatcggcttatcacccaaaccattcccttttgttctctatgcctctgctttaacgcgtttaatcgttcactggcccaatccttacaatattttagttttttttaaattttcgtgggtttcaaattactgccgccaatgggagagtattctaaccagtcagaaatttgcaacacgaattaataaaagatcctagaaattgcctgcgatatctccaccatcacattgccccggtcgcacatttgactgatctcaggcatagctaaaattgaaaaaaaaatcgaaatttctcaaatttctattatatatttattaatatttgctcaaatttcaattaaaattaattaattatttattatcttttatggttaatattatcaaattgttttattttaattctttttattttttgtataaatttatttattaatcttaaaaaaactgaattaaagcgcaacaaattccaaacgattaaaatttgaaggatttgaaagttaatttgtgaattttagatttaaaattttgcatatatagcaaaagtaattcaaattaattaccatgaataaaaaaaaattatagattcaattcatttgttaccattttccgaaaagtttgccgctgttttttgctgactccggccacaaaattagctttaggcctgcttggtactaggcttaggctttttttgtaaaatttgttacagtacatttagctctattgcactttaggagcccaagcgacttttatgagtccaaaagtattttatgagtccaatcaaataacaatacctgatttttataccgtaactttgttcatgtttgaacaaaccctaatttttggtatcattcgaaagaacaaagtctgaacaaggtaatataatacgagaaattaagagaatgctaacatttaaagaaagttacaaacgaaaataatcaacaattacttgattaaacatttgctattgcctaaatgctgagcttttatatattttagcttctttaggctttatgctttcgaattatatcaaaaagatgggcttgttggatatgaacaacattattgtataaaaaccaagtattgtcaattgattggacacataaaatacctttggacatcataaaagtcgattggactcataaaaccgtaccttttgacttttgtacgaattgactattctacgagttgctttttgtacgaattgtcttatacgagttgcaattgaaccgagtttgaacaatgctaggtaccaggactggctctcccacgaatgcgcatttttctcaaaaaattaataattggccctaaggctaacagaaagaagcaatcaaatgttctactattaaattcgtacttggcaattcagcgacggttcttggccctggtacactggacgacacgcggcctgggcgcctgaaaaaaattcactaattagcagtaagcagtatttggtacaattgcactccaatttgccaaagttttattttccttttttatgctataattatttttaaaattaacaatttgacattttacccatggagatgacgggatgaatgagcccgcccagccgcagtgcttccacgaaggagttggccaaactggcccaaaaaaggacggattgccaatgagtgactaaagattgtttgtatacatttttggcattatgttttccgcgtattttaaaaagccacaaattcataatttattttttgtaaaaatatttaaatttctttcattcattttttgagctattgattcttcttctttttaattttccgnaaattgatctatgtgcttcgagttttttgtgttagcaccatttt

SEQ ID NO: 13776 - DNA, 1324 bp, Heterodera glycines
aaattcacgtatttttcagcagccgccccacaaatcggcctccgactcacgcgttgcagcactatccgccgacgcggcacagcaacaacaaaaccaacaaggacaggaaggcgcgacaaacggtggccgaacgggtggtggtaatggccgaagacgacaacaaagccaaccgcagcatggtttgcaaaaatgaatttatttaaaaattggcaattttacactgggggggggagtttgcttattaaaaaaaattgcggggtttttcggggtcgctgaaaatgaagaatttagatattttttttggaaatttcttattaaaaaatttctaataataagatttttcttaagattttttcttgaaaaattctaattttgaaaaatttttagaaaaaaatttggcggcaaaatttcgtcctgtttcgctgtgaaacacatttgggaaaaccaaaaattaaaaccaaaacgcgacccctatttttgaccactttttaattagcgccaaaaaacacgtttctatgggtttccaaagcctaaataaattcaacaaatttatgcataaataaaacaattgactcttaaaattttgtcttttcattttcaagaggaggaatacgcagcgctcaaatacggtgcttcccacgtcattctcctgttcgtgccgggtaagcacttttttggcacttccatgccatcgcatttttgcggcgtcctttttcggttttaattcccctttttatatgcccggttccctgattacgaatattacatccctttttggtaattctgaacccaaattctcggctttattgtagtttagacgcccaattgactttcggcatccaatcaatgactttctttagtttcatagatagttccataaattgttttcttttggtcaatgcctaacaatttcttggtatcaatcgaatggttaaatctcgagaatttataaatgcaagaaagagccaataatgacattaagaaagtgttacaatgagaaagaaattctgtagactaagatttcaattgataccaaaatttaggcatttaccaagtaagaaaaaaagttattgtctaagaaactgagaatgatcattgattggacgcctaaagcgcaatagagccaaaatcgttagggctgctgaaatattttcgttttacatccattttatatttttagtatccatttgtatggccgtggtcacaatgacagttgcgtcggttggcttctactccaaaaatgatggcctctacttgtaagtgtattctgtggcggtttgcaattgagagacagcaaaccgaaattttgaaatgcattttaagt

SEQ ID NO: 13777 - DNA, 1047 bp, Heterodera glycines
ctaaaaatgggcaaaatttactcatttatcaacaaaatatgtcttttccaatcgctttccaaaattgttccaccggcggcactccccatgttccacaaaatttttgaaaaaagtgtttcaatctcccattgtattggcctgcgagacatcccttgaatatgtttggattttttttttgtctaagaaataccagttttgaaggtctaagggaattgaagggacccctcttggggaacaccaaaaattaccgttacaattttccattttttttgctggtgggtaatgtgcatgtctagaagcgtaagaatttctttgttgggctaacaaaactgaactaacgaaattttatgtttaaattgccaaaaaatccccccccccccctctctctttttagttctatttgatcgtcgtttccgctttgatggcattgcttttcatcaaatatttgccggattggaccgtttggacagtgttggcaattctgtcaatttgggtatttttttcactggcattttttggctgcatgacaataactcagtttttgtttggcaccatttaaaagttcaaattctgcatcgaaaaaccgagtgctgaatttaattaaaaaaaaaaaaaatttcgtttaattgcaggatttggtggccgtcctcagcccaaaaggtccgctgcgaattcttgtggagaccacgcaggagcgaaatgagccaattttgcccgctctcatttattcatgtaaaaatttttttcgtgttataaaaaaattactaggatttctgaaaaattttgtttgaaaattaacaaaaaaattcaaagggcggggggagcagtaatttatccaatgtaataaataaatatttaaatatataatatttttaataaaattcagcaaccgtcactgtcctctactcatatgtgctccatggcgttgtttcttccgcttttattgtcgccgccggggtgggcacaaatggcgatgatgaagacgaacagcaacaacggcaaccacaaccgaatgatggtaggcagcagggatggccaaatcggaaa

SEQ ID NO: 13778 - DNA, 893 bp, Heterodera glycines
  unsure (1)..(893): unsure at all n locations
ttgtaagtttttaaaattatctntaaaggactttcgaggattttttcaaatttctaattttctttttgaaacaaaatttcaagaaaatttaaaaatagttttagtttttttgaaaacctaagtgttaataaaaactaaacttgctgaatctccggggaaaaaacttggaaaaatttttttatttccttgaatttttttaataagaacttttaatttttctagaatttttttcgtattaggccagtaaattaattttgataatttttcttgtgcggcgagttttgtccggatattttattgcgtctcatcacagatggcagtgccaacacattgttgaccaccgtgttgaccaccagcggcgggagcaccgagtcgcgtacgcaaaccctcgtcgcctcctcttcgtccgcttccgttgacggtgatcgtcgcactggcggtgccgccgccggcgtcaaccgcgcgacgcgtacagcagcacaaccagcggtagcagcagcgtcacgcgcttcggcgcgcagccgctcgccgcgccatccggcatccgaacgtgccgtgcctgtgactgctgcagcagaaaccggtgctcatcatagtggcggcggccacggcggcacgtcggaagaacaacgtgggggggggacatttatttgggtttttcaattggcgtagatccatagatatacaaaacagtgttcggcatgatcaaaatttagcgcggtgaattatcattaccagtcgattttttgggggagggggagaaagaatggtaaaacttgttcaatttatcatttaccgctcgatctctggaaaacccgggagcagctcggttccccccccccccccgagaaatttttttaaaaaaanaaattactaacttagaaatttttaag

SEQ ID NO: 13779 - DNA, 2539 bp, Heterodera glycines
caaaaattcttcatttgtcttttaatagaatgttcaaaataaaaaatatataaatctaattgaggaaaaatttgttgaaattttgtacattaaaaatgcttaccataatgtgtgttttgaaactgttcattattgtctactgtaattggcatttgttgggctggcataatattttgggatggaaattcaacaaaaatttcgccattgggttgttgttgttgttgttgttgttgttgttgttgttgttgattttgtgatggtgtgacttgattttgtgatggtgtgacaatgttgacaatttgggccacatttaacaaatttggcaacaccgaattgacaaccattacgcttaaaagtgaaattgaaaaatttgttaaatttagtaataaaatgaaaaaatttaaaatgaactaacggcgaggtaatttttttcttattcaaaaaaagtatcgcaatgttttaaaatcaaattcatatttaaatgtgaaaaattaaaaataaaataaaatattaaattacattttaattaatggaaagaaatgctaaaattttcttcttattcgaaataaaaaatcacaaattaaatcacatccagaaaataaagttaattttagaatataacacccaggaaaataaatgtacttaaatgaactaaaaaattataaaataaactaaaaattacaaaaaaaggcaaaataaaactttcaaaattttgtttgtgaattcgatggcataaataaagtcaaccctttagcatcatcattttgtgaactgatgaagcaaatggacaaattgaataaacccaataaaatgaatgggcttttacattcttctgtactcaaatggcttgacaaatttgattttgttttatttgtttttatttctattcagctaaatttaatttttattttgtctaaatcagaaatctcaagtaagaaattttctaaaatagccaaaaattgggcaacaaataaaaatttgatggcattaaattttcgaaataatgtactgtatatagatatttttaaatattaattagttttatgatgtttattatataaaataaaaattattatataaacacattaagaactcaggcattaggcatatcattcatttgtttcccacattatattagatgcatattatcatttttttttgataatttttcgtcatcttgagggtgtccttacaaattagtatctttgcccctctacccccccccacatttataaattttgtacgattggcaaatgatttgtcgcttttgctcatttgcctcggttccattatgcccaaaaggcatatttttagttcaccaatttcatcgcaaaattctgaacaattatgctttttcgcactttcgttttccacttaatgtaatgtcgatttgcttgtcataattagtctagtttaattaaaattagaaattttatttgttaaaaaagttaataattcatatttgtcttttaattaaaatgtttttgtatttaaaaaatttttataataaaagcataaaagccattaattatttaaatattaatttatataaatttcttaattaatctaactttttcaaatattgacaagataaaatttagtacaccaatgacgatttttggtcatttgagatcatcaacagattccgcaaatccttgaccgcgattttttacggaagataaaataatgggtcaaagcgtccgaccgtcgtaagctatttttgaacggtgaatgaacgaaattttggtaattaattaattgatgcgattacacacatttgttccaatttttgcaaataaatacgcactgaaaaccgatgagattattcagtgtcatttcattcagttaattaattttcttttaattaatttaaaattttttttttcgaaaatttttcgagttaatttattttgaagataaaataaaataaaagaaattgaatttgtttttgtttttttaagaattatttaacataatgaattcaatttcagcaacataaactgcatttaataacacatttaaaaatatttaattttgccaaaaccgttatccgaaatttcgataaaaattatctttttcctaataagattctctttaaatacaaaactaattattcaccaataattaatatttcttagaaaacattttccagaccaaaaaaaagcatggccaaattcctttctggcattatgttttgcgcattgttggcactgctggacaccaccagtgcatggaagcgcgagtttttgcgcatgccgaaaagcaatgaaatcggcacggcggacgacagcagcgaaagtggcaaaaatttgaaaagccaatcggaactgatcgcttcaatgctgccaaaaagaaaaagtaggaaaattggtaaaatataaattacttaaagaaatgaaaatgaaaatgggaaatattaatattaaattattattatttggaaataaaaataattttttagtattaatttttttttaattctaaaactaaaaaaatacaagaaaaaattaataatgaaatcttttttattcctttaata

SEQ ID NO: 13780 - DNA, 1667 bp, Heterodera glycines
  unsure (1)..(1667): unsure at all n locations
taagctttgcaatgctactacggcgttgacatgttccgcaccacacggggcactgaaggtggtgccttngaggaggtcaaatgcgatgacgaagactatgaccgctgtttaattggcaaatgcaagggtaaaaaaatggcaaaaaatatataaaaatttcaaaaaaaattccaggacaaaattttgtcgaggtccgcaaattctgtgccaccaaagatggatgtgccgcgtttggatgtgccgttgaggaggaacttgaatgcaaaacgtgctttggcgaactgtgcaacttgtaaaaatggatcgagaaattattttcggattttcaaagatttcatgacatttttcggaccaatttgttcatggacatacaattaattttgtatatttaataaattaatttattttcaatttaatttaattgataattgttaactttttttaaagaatttatttaatattaattaaaaacatttaggaagtttgaacaaaaatttttcataaatttattgctttctttaaaaatttaaattcatttaattaggtattttaagcaaaaaaaataaggaaaaaagttattaacaatatttgctgacaaccttcgcataaaataaaaagcaatgattaaattttagacaattttttcttattaccaatgttttattaaaattgtttttttttctaattatcaattttattttttcaattaaaatttctctttttgttttttaaattatttcttcaatcgattaatcccatcaacaaatttgcctccgtaaatccgtaaatatgctttacgacaaacagctgttaaagtgggcggatattggcgtttattttcgaaagaaaatgctttttgtttataggaatattcaataaaataatttaatgatttcatttttccattaaattaaaatatttattttaaattaaatttgattatttctaaaaatgtttcccgcgggcccaaagaagaaattttgttcaatatgccgggccacaattgaagtgtttgatgaaaaagtgatgacagaaagacatataggttaatttttttaattatttttaaaattttgcgattttaatttaaattttgcggattttttatttatatttattaattaaaataaatttagtacacaaaaaatgcttcaactgcggcatttgtaacactccattgttgattggacgatgtgcaatggatgatgtgctttaccatcaatttggtcatatttttgcttattttgtgggattagaatggaaccccatggggttggaaatgtcggctcccggacaatccatcagtgatggacaatccgtcagtggacagacaattcgtcagtgaaaaagcgatattttatataaaattatgtgaaaatgaatttaaattgaaacaaaaaaacttcctccccccccccctcccccctcgaggggaagtgagtgagtgtaagtgaactcgttttcggagaggggaccccgcactgcattatcagcaagtttggcgcgcgccatgttccgcagctgtttccggcgcccccttcgactgggcaattttgtccatttttgatttgggtgggcaaaaaaggaaaactgttgaaaatttaaaaaaagaagttcttggcaaaatgtttaagttttaagagcattttaaaatgcgcaaattaaat

SEQ ID NO: 13781 - DNA, 1086 bp, Heterodera glycines
ataaaattaaatgcatttaatacaaatgggatggaatcatttgcggaaaatcacactgaaaagcacagtgtcatcgcgaatcagaaaggcacagaacggacggtcggcgacaaaacggtattctttgctcgaaccacaatccgacacttctccttctgtgactgccgcagcgacggtgccctcctcattcacctaaatttcgttgtttaaattagttttttctttgagaattgagctaaaactggtcaaaaatgtataatttttctctggaccggctggtgactttttttaaattttgcacatcgatggtggcaaatttgtttaatgatggacaaaaaaggatgaatagaaacgcatcttacaaacttaaaataggctaaaagataccattattgtatttggatttttcgttcaaaataagtgcgaaaataaatggaatccacaaaaataagggcactaattgtgggcaatcaccgtacctcaatgaccgccttctgcatcacttcgctgagcagcaacgttttcttgccggaaatgccctcaaaattggcgttgtcggtgaacgcggtgggcatgcccatgttggtcaacggtttgttcaatccgtgcgtggcctccaatttgaacttgggcaacaccacctgggaaaagaaggggctcggctgggatagggaccaacaatttctccctttttcattctcattccctgatggaaaggatcacagattagggccgactgctgagagttacagaaaaaatatacaaaaatataatcatggtaaatattcgttgataaattggcagacggtttagaggtaaaacaaggaataaaatcatttcatttgccacatctaaagaaggctttcttattcataatccttggaaaaaaataaataaagtcgcccagttgacccccactgttttcttccccctcccgccaaatcaacttccccatatcgtttcacggattaagaaaggttttttttaattttcgtgggtatacatgcctaacgaacaattgtaacacaatgtcaactttcgccgtttcagggtcaccgacctaagccatggcacattggcactgat

SEQ ID NO: 13782 - DNA, 2639 bp, Heterodera glycines
  unsure (1)..(2639): unsure at all n locations
tcatgggtaaataattcgttgataaattggcagacggttttgaggtgaatcgcaaaaaacaaggaataaaatcatttcatctgccacatctaaagaaggctttcttatttataatacttggaaaaaaataaataaagtcgctcagttgacccccactgttttcttccccctcccgccaaatcaacttccccatatcgtttcacggattaagaaaggttttttttaattttcgtgggtatacatgcctaacgaacaattgtaacacaatgtcaactttcgccgttgcagggtcaccgacctaagccatggcacattggcactgattggcatttgttcgtttggcatacccacgctaactcttgaattagattaagccatgaataaaattacgtcgacgttctgtcctgctccagggttttttaccttaacggtctctttgtcccgctttttgatcagtttcatcagctttttgccgtccaattgagccaacaattcggtcagtccaaagcgttccttgggcaacagcacgaacatgaactcttctccacctttgtatggcatgccgaggagtttgagctgtacaagcaagcaaaaaattggcaaatcgatcgaaacaaaaattcatgaaaatgtctaaacgacctgatcgttcttgtagtaaatgaaataggcctccaaatgcatcatttccagctaaaaaattggtcgtttacggacaaaatgaaaatgaagctaggattttaaaatgtgtttgtctccgccacctctttgaagtttttcgcgtccacatgaaatttcgcttttttggtgaattttgagtcgaatttgtccgcccatgtgcctttgaagtaaagcgcgttgatcagcaccaaactgcaaaaaataaataactattttcaaacttttacaatttttttttttgctatttccatcaaataacatttaaaaaaaaaaataaatattcggacttttgaaattgccgcaaaaggccgaagacagcctaattcaaaaactttatgattttttttttacgtttttttcttttttttagtatttttttgcggaacgatgttttgtccggcgacgtttttgggccaaaagtatgttatccattgaataagattagatttgccacagaattttagaaacaaaatttaaaaacttttaccgagtgttcccgtcaaaattgtcgggcgtgaccaaatcgcggattttcttatgagtcgcttctttcacgaacttgttgattttctgaaggcgaaaaataatgtttcccaacttttaatgaaacaaaaaatttttgcaccaaaaggattcaccactgtccgtatgctttttaagaaaaaaaaccccaaaatttgacttttatgaagagttattattctaacggaatggaatggcttaaaaatgaagcaatttttgacatttttagctgatattttcctatttttgggcctgctttcgcattacgccaataaaacatttcccacctccgccgtccctttgccgtccaaaaagtccaccgtctcaaactgtcccccgtaatttccctcaatttgctctttgaacgcgtccttcactttgctgcctttcctcacgtacaatttgttggccgtctccaaagtgttgctgctgttcgttccacttgtgatcgatttgagcaaagcgccgaagtatttgtgcacctccgactcgggcgcacctaaacaaaaagagagggggcaattagcaataagggggcaattaggaatagggaggattggtgggggagggtaattaaaaggggaaggggatgattattgtccctcattactttaggtgaggcatttttcaagggcactgaaaagaagagaaattgttgttttcaaaagtaggaggataatgtttctgggggttttctaagtttttgataacgaatctgccatttattccggccaaattcgaattcaagacccaaattcgaacaaaaaaccgaaattctaaaaatgatttacataattttcagtttatgaaatttcgaaactttccaccatttgccagcagttggcccatttcttcgccggtcttttccttggcgcccgcgtaaaccatggacaaagtgacggcggcagaaaacggcgaaacaatgcacgaacggtcgtccgtggacacttcgcgcagcaatttcaacgcaaaatcggcctgtgcctccaaaatgagcgaggcttttggcgaggggggagaagacattaattaatggcggataatggggcaatttgaaggaggaaatagaagagactaaagcgaaaatgagataaaagctaaaaaaataaaatatgcgtgacagccatcaatcatatatgaagacttgacgaaaagatggcttttttatgattttttcgtgagttttttaggaattcagtaatttctagagctcgacctggacctggatccaggtccaggccatttttcggaacctggaatttttcctgggactgtggatttttgtccaggaaatccaggtccagatcaatttagaaatccaggtccaggcatgaaanaacctggatttccnntggataattttttanaatctttttatatgtgaaatgtatttannnatgtaatttttttcacctttttatatgcgaaatgtattt

SEQ ID NO: 13783 - DNA, 958 bp, Heterodera glycines
caccatttgccagcagttggcccatttcttcgccggtcttttccttggcgcccgcgtaaaccttggacaaagtgacggcggcagaagtagttagtcgccggtacccgttgccgtttaaggtgtgaaatttcacaccttaaacggtccccggttttttgcccttttttaccgcaaaaacccaagggtattggctgttttttcgcgcatttttggggaaggggagggaggtcgacggtccctggttttcacacctcgacggtccccggttttaccgcaaaaacccaagggtactggttttttcggtaataaaatttaaatatttttgggtttgatttaagatttataaattttttcaactttaattttggtaatacaaaaaaaaagtctaattttgaatgccgttgccattgccaccatcaaatgccgaagtcgtcgccgaaccaaatgccacaacttcaataacaacagcagcaaaagtcatcgccagccgaaataccggctgctctacatcatccaccgcattgacaatggtcacgcgcagtgcacaacgacgtgcagcggaggaggaagcggttccggcacttgcaattcgtgagtttaatttttaaaaaattaataaaaaaattttaaaattgattataaattcattgtatttcctttattaaaattttttgaaatttaagcgccgccgccacctgccggctgctcatcatcatcatcaacagcagcaaatgttcctcagccgtcgtcgtcgtcactttccgccgaagaaatcacacgacaaaaaaagagggataaaaacaacaaaaacaaattcaacaaaaaacaggcaagctttaataaaaagtttaaatttcatagcatttaaataattaaaaatattaacctttcatagtcttttaaaattattataaaaagggttttaataattatttttaaaaatatcttccaaatttct

SEQ ID NO: 13784 - DNA, 1812 bp, Heterodera glycines
  unsure (1)..(1812): unsure at all n locations
aagggggggggggaagctagcaaaggggaaagagggaaatgctaaaaatttggctatttttacaaaaaatcgtttaaattctgaaaaanaattatcctcggcggcgcttatcggcaccgcccgccncaaaaattcataattatttttaaatattagctccaaaatcttagtcatttttttgcaggatattggtttttgtttttacgctcttattttaatatgaaaataggtgaaggaaaatttcctaaatcatcttcctgtgcttaattatcaaccaaggtaatgagttaagttttcgtatgtatctgtttttcagatgaattttacagatttaatatgctgcaattttgatttaaatctaagccattaattaattctttcaacaaatttcactaacttttgataattgttggaagtaattattccaaagcaattataaaattagaagaaaacaaattttttctacgaaggcattttataaacattatttgtgaaagtgaaatttcagaaacagattcccatacataattcactccctttgaaatgggtaaatttttcggtcatattattttgcaggatattggtttttgtttttacgctcttattttaatatgaaaataggtgaaggaaaatttcctaaatcatcttcctgtgcttaaatatcaaccaaggtaatgagttaagttttcgtaagtatctgtttttcagatgaattttacagatttaatatgctgcaattttgatttaaatctaagccattaattaattctttcaacaaatttcactaacttttgataattgttggaagtaattattccaaagcaattataaaattagaagaaaacaaattttttctacgaaggcattttataaacattatttgtgaaagtgaaatttcagaaacagattcccatacataattcactccctttgaaatgggtaaatttttcggtcatattattttgcaggatattggtttttgtttttacgctcttattttaatatgaaaataggtgaaggaaaatttcctaaatcatcttcctgtgcttaaatatcaaccaaggtaatgagttaagttttcgtatgtatctgtttttcagatgaattttacagatttaatatgctgcaattttgatttaaatctaagccattaattaattctttcaacaaatttcactaacttttgataattgttggaagtaattattccaaagcaattataaaattagaagaaaacaaattttttctacgaaggcattttataaacattatttgtgaaagtgaaatttcagaaacagattcccatacataattcactcactttgaaatgggtaaatttttcggtcatattattttgcaggatattggtttttgtttttacgctcttattttaatatgaaaataggtgaaggaaaatttcttaaatcatcttcctgtgcttaaatatcaaccaaggtaatgagttaagttttcgtatgtatctgtttttcagatgaattttacagatttaatatgctgcaattttgatttaaatctaagccattaattaattctttcaacaaatttcactaacttttgataattgttggaagtaattattccaaagcaattataaaattagaagaaaacaaattttttctacgaaggcattttataaacattatttgtgaaagtgaaatttcagaaacagattcccatacataattcactcccttttgaaatgggtaaatttttcggtcatattattttgcaggaaattgttttttgtttttaccctcttatttaatatgaaaaaaagtgaaggaaaatttc

SEQ ID NO: 13785 - DNA, 3868 bp, Heterodera glycines
aatataaccggaaatgtgtttttgtgataatttattccaatcaaaaatacattcttaaaatgcgtattttttatgataaatataaccggaaatgtgtttttgtgataattaattccaaataaaaacacatttttaaaatgggtatttttcataataatatagtcggaaatgtgtttttgtgataattaattccaaataaaaacacattctaaaaatgcgtatttttcataataatataaccggaaatgtgtttttgtgataatttattcaaatcaaaaatacatttttaaaatgcgtattttttatgataaatataaccggaaatgtgtttttgtgataattaattccaaataaaaacacatttttaaaatgggtatttttcataataatatagtcggaaatgtgtttttgtgataattaattccaaataaaaacacattctaaaaatgcgtatttttcataataatataaccggaaatgtgtttttgtgataatttattccaattaaaaatacattcttaaaatgcgtattttttatgataaatataaccggaaatttgtttttgtgataattaattccaaataaaaacacatttttaaaatgggtatttttcatgataaatatagccggaaatgtgtttttgtgataatttattccaaataaaaacacattctaaaatgggtatttttcatgataaatataaccggaaatgtgtttttgtgataatttattccaaataaaaacacattcttaaaatgcgtatttttcaagctaaaataacaggaaatgtgtttttgtgataatttattccaaataaaaacacattcttaaaatgcgtatttttcatgataaatataaccgcaaatgtgtttttgtgataatttttttgtgattatcattttaatttcattttaacaattttttatttatccaattaaaaaataaaatcaaatttcgactattcattttttactgtcggaaatcattgaattatgctaaattaacatattcgaccaaatatgtgaagcaaaaagcaaaaacaattttttcccattaacttatttattatgcacaatgggaattaatttcatttgctttactaatttttattccatttttatttgaatattattttttacgaatttttattattactaattttaaaaaattcaaattttacgccatttataattttaaacaaatttataggaggaaagattttaacggcactacttttgccagattaacagtttattgtcagattgaccgatgggattgaagaatggagcttggaacattcttttttgctgtttattttttcagcttttaggccaatgctttggtaaaaataataattatttttatgataaaatttatatattttttaattcaatagttcaaaaatttcacacataaaatattaaatcggacttatctatttttttatccacatcatcaacaaaataattttatttaaaaagaaaattattttttaagcatacagagaattgaaatgcaaagttggccgtgctcaggcacagacaaacagtaaaaaattagaagaagtcaaaactggaaaatgcgcgtttgaacagtatttttgcctgatgatcacctgtgttgttggtaaattaattactaatttgaactcagcacggcaaaaaattatagactttatgtcatagaaatattactaattcaaaatttttatgatttatagagcaatttgaaaattttatttgacataataagaatttatcaaaaattccaaaatacattagttacgaaaatagtgagcgaaacgcaaaattattgacacattttttaaattaataaatgctataaatcgttaaaatgaagagtatccgagattaaaacattgctttcgtacttcccaaacaaaaaaaaattaataaaaatccctactcattagacataagccaagactgatctgaaaggtcttaacacattaaaatgccagaaaataggtttaaatttttgcagttggaaatccgtcgtacgctttcactgattggcaatgctcttacagcaacaatgccgaggtgtgtgccgaaagaactgaacaaaaattgcgagaactaaaccaattcaaaaacccgcgctgcaaatgcgaatttggcaaattcaacgaggaaatggccaatgaaaagccggcggcacaactcccgacaacgccattgccaagtgcacttttcactagaccttgtcgggactttacagaatactaggccgggtcaatacctagtacctctgttggggtcctagtatgcgtttttcaagattcccgccacgtttgggcatcacggttgggcaccaacatgtttttgcactataacttttttctttttcaactaaatctaacatttttggtatcattcgaaagcttaacatacttagacgctatttctaagctattgtttcgcggttagacaattgcaaaaaaaattataacatgaaaattgcaacaaaaaaagtctaattttctgaaattttttctaaaaaatttttgtaagactaattagagcacatccaaagagctttcgaatgataccaatcaatgttggatttggatgacaaagaaaaaagttatactgcaaaaacatgatggggcccaaccgtgccggctcaactgagtgaatccgaaccggcggcaatagataaactcagatattagctaattttaacgggttttttaaagacttgttctgcttgcggggagcatacgattacaaaggctatggcatcgttgaagaccgtgaatgtgcccgagaagatcggcattgctttatcgcaaattgcaagacaggtaaaatggttggaattgagtaataaaaaaatatatttaaacaaatatataataaaatatttaaaaatgtttaaacaaatatttaacaaaatatttaagcaaataccgtatttccttcaattatatgcccgtctccaattatctccccctttctgaggaggttgaaaaataatatacccgggcatacaattagagaaaataaggtattttaatggatttccagataaattatagaaaaaccttgaaactgctcgtaaccacaaaaagtttcatattatttaactgaatataatatatattttccattccatcagttccgtttgaattaaaatatgggattaaatgattttctgaataatttatttcccggcatttaattttggccaatgccgccgaacccctcatttttggcattctcccattttttcagcagacagtaaagatggcatcatggcttggggttgtgcggaaagcgataattgtacggcaattacggaaaagttgtccacaaacaagcacaaaaattacgaatgccgttgtgcatttggcggttttggcggcaatatgaccaacgaaaacatgacaattccgtcgtggattccaccgcccacgcttccgtaattttggggaaaatctcggtagaaacacggacctagggccaatcttagaaaggattttggtttgaattacgtaaataatgattagaaaaaataaatagttcatctaagcgaataacttgcttttttttctttattccgctaaacggaaatggaaaaacaattaataaatttttataggaaattattaaatttttaatcaccaaattagtgacgaaaattcgttcaattattccaagctttttttattcaattaaataatttaatgcatttaattgtgtattattttgcttattttaagtacgaccacggcttcaccaccaattgaagcgcaagtgtggagttgtctgctgaaaactgcttgcgaaccgtttgaaaattatttttcataggatttggggcagtttttaattgctaaaaact

SEQ ID NO: 13786 - DNA, 1157 bp, Heterodera glycines
  unsure (1)..(1157): unsure at all n locations
atgaaaaaaattaatatnagaaaaaacaaaacaaataatctttatttagttaatattgatgactttaaaaaagctgtaacacatgtttcttattgtaatgaacacaagtaatgaacacaaccttccgtcaacataatcatatgaaaatcatgaatttttaggagattgtatattaaactttttaacatgtgaatttatatttcaaatttcctaattataacgagggtaaaatgagtaaattaaaacagctattgattcaagaaaaaacattagcttttattagtaaagagataaaactaacaaattattataaaactcaactacaagagtattgtcaatcaaaaaaaaatctggttatatatgaaactataaactagagtgccacgggaccgggaatttttgccaaaaccgggacttgccgggacctgagaagccgggaccgggacctcgattttttttcgggaccgggaccgggaccgcaagaaaaaccgggaaccgggaccaaccgggaaattttaaaaattcaaaaaaattttaaaaatttaaaaaaaactatgaggaatcatattttttttataggaaacccacgagtatacaaaaaaaaaattgaaaataatctaatttctgtagagggattgaaccaggggaaagaagaagggaaagtcaaggagactagccattaggccatttgcacacttaggcagtgttacttttaaagaatatattacaaacctattctttttttcttttcttttataagaaccccttcatatatctgagcaatcttagttgtcttatctatagaaaaacctaatacatattttgattcagttaataatgtagaggtagtaaaaggaggcttagagataacaaacccatcctctgtcttaatatcttttatttttaatgtaagacctaaattagaaataacatctaaaacagtatctttatctttataaatttttatctctttgcttttattcacctctttagttttatatgttcaatatatttttgtttttctaactctataataaaagatgtcttcttaaataaaaagttaatctctttttttatattaatttgatactttaaaataaaatctcctaataatttttcaatttctgtcataacatcctcttcgttagattctataa

SEQ ID NO: 13787 - DNA, 3945 bp, Heterodera glycines
  unsure (1)..(3945): unsure at all n locations
ggacgagcccagctcggacatggcggtaatgcataatgaacccagttgaggaccagtccaagacaaggggtaccactatttttttctattatttatttctttgcttttttatttaaatgttcataatgtttttttgcagatattatattatatttctttttatcatattctattttaattgaatattttttcttttgttatatttggcatcactattttcatcattatcattttttatctacaaattattttttattaaaattccttgcagatattatattactttttaccagattttattttctattttcattttgtataagctttttgctacatttggcattactatttttaatctttattatcgttatctttttttgttatttggaaaataataaaaatttcttaatctttttgttatttgtaaaaagaattaaactttcatttaaccaattctttggtctcccgttttcccctttttcgcattaaacattttttgctttcccttaaaatatttctcaatttttattaacaattaacaaatagaaaaaaacaaaacggaaccatcaaacaaatcatttatcaccaccgcccgatgcggccaccgaatatcttccagcttcgactgcgagctcaccattcccaacgtaggtccgcagagtctttttaactcggggattgacctaaacaaattaaataatatttaaataaaatatataaaaattgtcattattacatgctttttcgaattcagtttgtaggtctccaatttttttttaaccagttcgtgcttttgaagcggcctgcatcatgcagaatcgattttatcatctaaatttagaaattacccctaaaaattaaatggttaataaacagaaacgcacaaatatatatggttcaggttcgagacgggccattgattttaaacaatttaaaagacaaaatacctgaaatttacgataatttttattgaaaaagaaattaaatttgcacatttgtaaaaaaggtatttgtaaaaaacgatatgaaaaataagtcaaaaatttaaaaggtcaaataaaatacatattctaagtataaacaaggggtacaaatttttaaattaaatttgaattttatgaaaaatattaatactggtaaaataatgatagagccgtgcaggaataagaaagacaactcaaattaacgattttaaaataacacgaaaaaagaaatgtgcgaaccaaccgaagcgatctaatcgtagataaagaatggacgaacaacgaattttataaacataaacgaaaaaaaataattgatcaaagatattttaaataatactttcaatttccgaagaaattctatttaaaatacgatttaaggataaaaaattacgtatccgaatgaaaatatattattacagtaatttaatcccaaataaaacctaaacattctggtcgcgggagtcgcatggaaataattatgtaccattgttaaaaaagggaaaagtaattagctgtgtgattaatgaacggattattatctgctaaaaaatcgagaaattgtggttaaaaaattgtaaaaatagccgaaaataactgctaaaaatcgctcaaaccgaaaatagtccttagaaaatgtgtttttttgtgttttttctcatcaagtactacggtaaaaatataccgcaaatttaaagaatattaactaatttattggataaaaccatatattcgacaaataaaatataagtattcaaaaactccggtcgcggttgcgaaacagatttgcacagaaataattatttaccattgtaaaaaagggcaaaaataatcggcggtgattaatgaacagattattatttgctaaaaatcgggaaatagtgattgaaaattgtaaaaattgtaaataactgcaaaatacgctcaaaccgaaaaggtgcttagaaaacacgttttctgtactgttatcatcaatactttactactgtaaaaacagattaaaaatatagatatgtcatataattcggccatagtaggactacagatttatattgaactttagaattttaaaaaaaactaccacaaatttagatttttatcaataaatttgaatttgttaaaaattacttttatttatatttcaaaaatgcaaaatgtataaaattgttattcaatatcgaaaatgggtttttattttttctaagtaagaactgtcagtcggcatgcgggcgatggtgggcgggggatgaagtgccgtcaccgagagcgctcaagagcgctcagggccaagcatttacttcgccaaaaatggctgcaccataaattcgaccgcaactttattcagttgcaattggactcattttcaccatttttagtgtttaaattacaaaaaaaaataattttttatttttgaaatgccttccaattttctcgaaaaccatatgatggacttttaaaagttaaagtcataccgccgaaaaagttgcggtaccctttattgccttttcatgccgtaggttatttatttttatgcaaaatcgttttaatgtttagggtggttttttactttttccgacttgtggagagtgtgcacgtaagtctaaaccggattttgttagggcagaatgtttcaagaagtgcagacactcagcagaaagacggggtttagttggggttttcacttctattgaactccgaaaagcgttagaactcggctacaaaataacgaaattttatcgagcataccattatgagaattttgacacaaatcttttcaaaaattatgtaagaatgtttttgaaaattaaaatcgaatcgtcgggctggccggataatacgactactgaaaagcaaaaaaacgagtttatgagtatgtacaagcgtaaatatgatatagagcttgatcctaataatataaataaaaatccaggattacttttaatagcaaaattggtgagaatcaaattcatttaaatatgtatgtaaaattttagggtctaaactccttatggggtaaattttcaatgagaaactccctttgtcagaccaaagtgattgatagttcggctgagtggtataatcttttgcttgatgattctatagagctttctagcccaataataataaatgatgagatgattcgtgtgatctatagaaagaaggatagttttatcaaagaacacggagtctcgaacataatcatttctctatagtgagactgtaaattatacggtgttttattttatttttaggacaactagtgctgcatgtttagttttatataaaaatatggaaagggtatttaatacgccgggctgtcgtcttttttattgcgataccgatatgtcaaaatacaaatttagttgatttttattttgttcagattcattagttattgcccaccctccgaactcatgtcctcttaaagaaggaaaatttttggggaaaatgactagagaatatgcagattccgatattattgagtttagggtggtcctaaacagtatgcattgaaattaaaaagacgggaaactggagaaatttggtataaaaccaaaatacgcgggataactttagatcgtaataataaatttgattatgaaacttttaagaaaatgattttaaaatatagagacggagctaatttcaaatttacatacccggaagttttaggtagtgttaaaaaaatttctgaattgaatttcttttattaaggcccggccgngacagtttaatcattaatcgtgaggttaagaaagactataaaccgatacagaagaagggcattattgataccaattttaaacgtactgccttttggatatttttgagtaaaataaacattatctttttgtcgttacttaaatcaaggtgtcgttttttccaccttaatgtttccaaatcaatataaaaatacccgggttttatgtatctttgcaacaattatacgcttgatggagaa

SEQ ID NO: 13788 - DNA, 3926 bp, Heterodera glycines
ccttttccctttttcgcgttaatttaccttcggaatggtgatgttttgccatgagatgtgaattggcaactttttgcaccgttccagcagcaaattctcacaaaacccgggccttttcacacaacgactgacaaaatttggttagtttttgttgttaaacaaaaacacttttggcacggcaaaaggaattaatgaaagaaaaggcgaactttttgtaatttctgtcgggaaaataatttcgtggacattcgattcgctggcagcgataattgcccaataaattaatgcacaaatgcccaggggcgcaaatgttctccgattggcactcgtcgatgtctcaaggggagagacccgaataaatttcaaaattagcaattatttttagtgcctttgcaagtgatgccatccgccattatttcgtagccaagcggacacgtgcaggcgaaagagccgggcaaattgacgcattggcccatgcacaaatcattgcctgaaatgccaaaaaatggttgaactaatacagggaatggcatggcacggcacctgactttgcccaaattgcgcactcgtcgatgtcctcgcaggtgacctcgtcaatgcccagctgaaagcccctctcgcaaatgcattggtaggagccgggcgaattaatgcactaattgagagaggcaccgattgggactgagttggaaagggccgaattgcagcccttcgctcactttttgctgacatcgagcgacccccgaggcgcactcgtcgatgtctgaaaaggcactcaaagggtaaaaatgcacaaaaacaaaaaaacagcaaaaacgggccgactaaaagcggatctttttgagtgctttgccatttaacactttcacagaccgtcgcagctgcgattgtcggcgcccaacttaaagccgggcccacaaaggcactcatgcgacccgaaagtgttcacacattgcgcctggagggagcacgcgtgcgctccgaacttgacgcattcgtccacgtcctcacaacgcctggcaaaagagcggtcctcgggggggaacgaacccgcccttccctccccccctccccgaaacgcctcccctccaccgcccttcgcccgttttgctaatctatggcaaatgcgtatttgctgctgcgatacagtaggctgtctgtcccttacagtatctgtctctgcctaccgttcgacccaccgttccctcctcacattgtcaactcattgaattcgaaacccgccccacaattgcagcgatatgtgcccgggagattcgtgcactgttcgtccgtttcgcacgagtgcgttttccgtgcgcattcgtcggtgtcttccatttttgtgttcggttcggtttaattttcgaatgcttttcgttttacctaagcaaaagccgctgtccttgtccatgtggtacccatttgaccacacattgccctgctcttggcaccggaaactgcccggggtgttgacacctgcgcggttcatttaaaccatgccattatcctcccctttccccacactcttcgaagatggcacaatggcgtgtctcctcccggcactcgtcgatgtcttcgcagcgtccgtcgatggctttgtacccgaccgggcaattcaccgactgaatatttccgaaccctttcctcggctttccctttgctccgtcactttgcattctccgctgttcgggtccatcgcttcgtccgctgcgcatcgcttcggcacacaacggaagctgccctgggtgttacggcattggtacatcggtccacagtcgtgtgccccgagggcgcactcgtcgacatctgaaccgaccaggacaaatgggacaatcgccgggggggggagtaaaatggtaaatgcaatgtcaacaattgatagggggacaatacccgaggtgccgaaattttttatatgataaagacacaccgacgcattgctccgtttcgctgtccatggcatagcccgtgccgcctcaaaatttaaaatcaccgaaacaatgcatttggttatttacatgactgagtcctaatacatttgaatcctccgggctaaatgcaactttaaaatccaataacaaaaactgtcctaccgtattcagacaccgttgcgtctcggcacagtcgtcaacgaggagaagacactcgtcaacatctgatacggtagcgggaaaacggtacaaaagaacggacgggcacgactgggccccgccgactgggccccgccaactgggccccaagggacaataatttttccaccattattgtataatattatttatatatttttcattacatacacataggtatgtgtgtttcgtttacaataatctaatttgtgtttatatttttttcgttcagtgcctaactacaataccttttcttcagctattttttaaatttaactatcatttcatggcaaataatatattatcgcagaataaccacaaaaaaaattgagcatgaagggcatctttatgttttcgctaacttagtgcggatggttttatcaaattttggaggtgtgagaacaaaaacaataaggacattttgcacgaaagaactgttcacgagcaggatcggacgaacaactttgcggaagcagcacaccggcgattgcaacgcgccttttcgtgtcatcatccatcagtgtggcggttcatttagagaccggcgcgggacgggatcccgcgcgggattttgcgggatcccagtccgcaatcccgcattttttggaaaatgcgggatttgcgggattaatctcgcgggatcccgtcccgcaaagaattttgagttccaatcccgcagcgggatccgcaaatttgattttttgtgcgggattatgcgggattttattgatttttttgaaaatttttctaagacagaatgccaaatatttttaaataaattaaataataaatttaattaaagttaactcatttttcatcgcaaatttcattcaaaatttgtgaaattttcccggcggcgcctatcggcaccgccggataggcttttacttaataatcctgtagaaattgagtcaaaaactgcgtcatttggtcaattttagacaaaatctgttaacaaatcgtattaaatttcataaaatttctcgcagatgtcgataggcaccaggtatggcacggaaagacttccggtttccgacatttttggggtcggaattccgacttccgaaatttttgatgaaaagtcggaaatttttttaatttttttttcaaaaaactagtaagttttctacaatttctgttatttttaaaaatttcccggcggcgcctatcggcaccgccggaccctaaaaataactatttttcttgcaaaatttgctcaaaatcgcaaaattttgtaattttttggacaaatctgttaacaaaattttctcggcggcgcctatcggcaccgccgtaccctcctccaagtcccaaaaagtttttgaaaaaatcgcgctgtaaaaaacgtgtaaatagtcactccttttcccaaaaatgttctaaaataatgaaaaatgacaaaaaaagattttgataaaataattgaataattttttcaagcgaatatactaaaaacatttgtgaaataccttttatttggttaagaattaaaaaatttagcctattaaaatatttagaaattttttttattatattgtatattttttcaaaaatttccgatttccgacgtttttggggtcggaaatccgatttccgacactttcgaaaaatttttgggcctcggaatgccatccctgataaggaccgccggaccccctgttcctagttttttgaaaaaatgcaccgcaaaaaagtggttttgaaaagaaaaaaatagacaaatttatgaaccgttaataatttgatttccgatccagtggggaccgtcggatccaatcgaaaaatcttagtcgaccc

SEQ ID NO: 13789 - DNA, 1707 bp, Heterodera glycines
ctgaacaataaatggggacgggttttattgaaaggggatgaacacattttggcaatgcgtaaaaaatgaaaaaaaaaaatccaaaaaatctcattaattggtgatttattgacacttaggtcaaattaaaaaaatcacatgtaagcaaaaaattaattagtacaaataaattgaaagtgaataattgggagaaccttaaaaattaattagttacctaattaatggtaattaggtctaatttaaaaaaataaaaaataaatcaaagccattatgtagtaaatttaaatttaaggataattgagcacacttagtcctccacctcccccccccccccctcataaaaaacagaaaaaaaaaattataatatcaaaaattaggaaaacgatcacttatcactctacaattggaaattaaaaactttcgaattttgactttttatttgaatttaggtaagggatttgttttgaaatgtattgtatgtcagaattcatgttcagctatcccaaaaaatttccaggaaaacattttagaccagattcattcaacctaaacaacctgagaaaaaattgtgcttattagaattcacgagagaaaattttgaaccaaaatttaattttttcagggaattaattttgaaaaaaattaaaaataaaaagttatcaaattttctcactttgtcctgcgcaaatttggatgtcaacgcctttttgtcgggcaacaagaaaaagccgccctcgtacagcttcacagtgacatcacccatcggcaaatgcgactgatggtcatcatagtggaagaagcattgttggctggacgtggtgtgcttaatcggcgagaagaattaaaattgaaatggaaaattaaaaaaaaaattacgaaaaaattaattaacccgcaaaaataaatgcattaattatgattaataaataatgataaaggtgcaaaaataattgatgaattaattcaattaattaaggatatggcgaaaaataatgactttaatgaattaaaattgtttaaagaaattaagttaataaaatttaaatccaagggaaaaaaaattttaaaatgaaaatattcaaaaaagaaataaagaaaatttaaaatgaaaaaaaccaagattattttttatgtattaagatgataatttaggactctaaaagatttttcaaataaatatttttttaccaattgtgccattttcatcattttgaccaatgagaagctcatgccgccaagcagttcaggccttaataaatcaaccaaaatttttaaccagaaaaatttttttttggggaaaaatttttaaaaacaaaaaaattcgtttaagattgtaataatttatttccggtggcatctttcggcaccataggaaactctcggatttgagtttttagctaggccctaggtgattagatcaaatttcagcaaaactaaactgttatctttccttgtcatcccaaatgccattgatcaggcaagaaaaatcttggccctttgatcactcccaggaatactaattaccaaatatggcatggaaatcaaccgtgccatgactccgcccagctgtacccctctgatctgatcattcccaaatatgtcccactgatcagaacagtaatcatcccaaatatgccacggatcagattagaaaatcttgccacgggaaaccaattgtgccatgattcgtcctgctgtgcccatctg

SEQ ID NO: 13790 - DNA, 1183 bp, Heterodera glycines
  unsure (1)..(1183): unsure at all n locations
aaccgactccaacaatattggtataattcgataggcctgaggcgttctctattagctttacaaagatttggaaaaatttcgttaagcttcaaaaaagttatggtcagaagagttcaactaaccaaattttccaactttttttggctcgaactttttttatactgaacgaaatttttttggaattttgcaggctaatagtgcatctgaagggctatcgaatgataccaagaatgttgaatttggttggcaaagaaaaaagttatagtccaaaaactccgccccacgcgaaaacggcctggcccggaaaaacaaaaacccactgaattagagccacctttgaaaaaaccccttgaaaaaaagagcgcctctgggggcactaatccaataaatatggtaaatcgtgattcattttttacaacaaaatttgagttggcgaacgcgtataaaaaagggaaaaatcaatgggaggaaggattatcccgtcccccctaggacgttctgaggccccccgcaaaaaaaattccaaaaattttcaatgtttgatcccgaggttgccccaacagggaggtccaaggagtaaggaaggaattttgagctgaggtagggggaggggtataacaatgaaaattttttttttgcaaaatttggagaggggttccctacccactagaattgtctatggaccctcaaaaaaatttaaaatttttaaaatttttcataattggttggttgcccatagccgataattttgttttgttgaccttgacaaatgaagagattggcaaactcttcaggaaataggcgccgtttcggatctgcactttcagtacggagtcgccactgacgcacaattggaggaacaaaatgcctgtgtgagaattaatgaacaaaatcaaaaatttatttttaaataaaactttattaagaaaagctgaaatttaaaataaaatccatttttaaattaaaatattttttaatttattaaaaatacaaaattttttcttttaaataaaaaaaacatatttaaaactgaaaattanaataaaattttcttcattctttanattaataataanaaaaaagctgtttaaaatattcacttttcttttaaatcttcgattaaaggnntgtaacaattttttttttaatatctataaaaataatattttaataaaaaaaatta

SEQ ID NO: 13791 - DNA, 995 bp, Heterodera glycines
  unsure (1)..(995): unsure at all n locations
tttttaatgatgtataaaaatattaatttttcatataaatttaacaattaatttattatttttaattgtttattttttaaatttacatgttactttgtgctgtagatgaacaacttcatcagtgccttttacgacgctgtgttgctgtatgcgattgcactgaacgaaacactggcggaggggttggacccgcgcaacggacaaagtatcacaaggtgtaacaatttcaactttttattttttaataattaaataaataatgaataagattctctattttttgtaacattttccaatttcagcaaaatgtggaaccgcacatttgtgggcatcaccggcaatgttagcattgataacaacggggaccgctactcggactactcattgttggacctggacccggatcaggacaaatttgtggtccgtttaatataaaatgattacacaatgacaatgattcatcctctattaaagcggcccttgacctctaagcactgaaaatttttcaaaaactttattttctgtgatattttctcgaaatattgctaaaaatgtactttttaagaattggaaatttatgccaaaaataagtcaaataatgaaaaattgttttcctttttactcagttttcttcaaaatgaataaattttatctatactttgtattatttcttctaaatgatttttcataaacttatttagctattttcgcgatttttagctttaaatttaacgaacttgaagaatttttaaaagtttgcgctcaatttataaaaatttatgtgcatatatttttcactttttgtgcattttttgcaatttttaatgcatattttgcggttttatgtgcatgttttttgcagccctagctatgccctattaatttaaaaaacaacaatttcaattttgngcgccggaaactggtcattgaagattgatcactaagcaattgaacaaatctttctcccccctcagcatcggatccggatataattt

SEQ ID NO: 13792 - DNA, 2802 bp, Heterodera glycines
atattatggtaggctttaaattaaaaagaaccccgtccctacccagcccggcttgccattacgaacccgattccaaatatggaaaccggggaagggggggggggggggacagcggcagaaaaatgcgaaaatgaagatggataaaccaaatattccaactttatacctgtagcatgaaaatgtcttaaactttctttttttcaatttaatactacatacaagaccagcaaatgaaagaacttattaattaaaatttatggcgttaattataggttttttgataattagtattaaaaaaaactgaaaatacaatcaaaattgaaaaatttatgtgtagaacacataaatatttccccaatttattcaggaagttgcctattattcgggtgcatcgaacgagctgaaaaagatgaccgacttccactgggtgggcgggaagcctccaaaagacaaaccgtaattatattttaaataaatttatccaaaaaaattaaaatggttctcccctcagggtatgcggttgggaccgttcaaaatgctcggaaggttacccggcccatgtgtatgctttgatgggccttggcattgtggtggttatcatgatgatcggcttcatcatcttttacaggtcactcctctccgcacagctcattaaaaagaatttgttaaaaaattaaggcgttaccgtgccgaggcggagttggccaaaatgacatggaaggtaaatcttctgaaacaaaaacaaaaaaaattttctagtcatttctaaagaattctttcacatatttttccttttttacattttcaaagaaaaaatttttcaaaatctaaagctttatttattttttattttttgattttcctaaaaaacctaagaaattaggaagctaaaaatttcggtttattaaagaattttgtatatatattttaaaattatatataaatattttcaaaaatcattaaaataaaaaagatgcaaggtttacctaatcaaaaaggaacatttatatgaaaataaataaaacaaaataagaaataaataaaaaattaaaaaaaacttcactggcagatcaaatgggaagagcttgacggcgaagatgttcgacgggagaagaagaaaaagcgacaacagaacagctcgacaaagttggcccgcttcgatgccgcggaacagtccgaggcgttgctgcgctgcaacagtcgcatgtccgtcggctcggacaaggtacagtaccgtctcgcattggaacttacgataaaatgaaactgtatgcatactgacgaaacccaactcttactgcaccgactcatattttttaagacatttgtcaaagttgaccaaattaaaccttcttagtgtaattcaatagcccttaaggttctctctatttccttacgaaaaatttgatgtttttgaaaaaaaaaatagtgaaaaattttttttacaattttttgtcataaattttagaaaaagtttcttgttttttcatggagataaagaaccttaaaggctatttctcgaaacatctcgaactccactacatagtttaacttctatacttgtctgggtcctctacagtaactgatattctctagactattatgagcataaattatattattagcgcagctttttttccaactgctggcccactacagtatacataatacctaatcggattccttccttctaccataacccaatacttgcttgagctttcaaacccagtatacagtagctttacagtttgctgatgagttgttagacgagtttgctgtggtgcgattatcgcaaagggaccgcctggtgagaacacatacacacgcactcgcacaatttggcaatctgcttttttttaaatttttggtgtgctttttgtgcgtgtacattgccatctacggtatgggttactttggcgcgtcgccaatcttagaagccattagcttgcaaaatttaaaaagatttcttttgttccaaaaaagaaatggcgctcggcgccaaaaagctaaaaaagtcaattttttaactataacatttttggacagcaacgaaattttcgaaatgcaaactaatgaaaattggctggcgccaaaatgacctaccggcttgccgatcgcaccacaacacagaaaaccattgtaattttagcatttcctactctttttattgtaattgtcgccatgcactttttgctattatgcaactaacgctattttcccccagtttttttcagaatgtctaacaaacaaaattacttataaaaaaaatttcactgatttatcctcattttattgtttctgaaggggttaaagaggtttttttttgaaaatgctgttttgcgactttttgtgcaagaggaaccaagtgcagcttacatatgcatatgtcatacatatcttaaatgcaaaattaattcgcactcatttgtctgctttacctcattatcattcacttcttgttaaataaataaatatatcaaatattctctagtaagtaaatttatttaagccccccccccctctttccccgattataaaaattttcaaactgaaggttttcaaaaaaactttttatatgaaaaatcaagaaaaaacattttgaaatttttttagccattttatcaaaatttatgatgggttactgcattttccaaaatttctaaaaaaaaatcgctaaaaaatttcaaagtttttttgcaaactctttatgaaaatttttttttaatttcagggctgggaaacgattcgtgagggggaggtaaatatttgcaccccttttatcctatttctggttcttttgat

SEQ ID NO: 13793 - DNA, 2169 bp, Heterodera glycines
tgtaaaaatgaatttgttgtatttaatatttattcttattttctttatttttgtaattgactccgacaaaatgcgaccaaattttgatgaaatatttggcaacggatgggacaaaaaagaaagtgaacaaacagtgaaaattgaacaaaatgaacgaaatgagaattcacaatcagcagcagttgatcaaatgggtgaagaaatgggaaatgaccgaaatgatcaaatgaaaaatgatcacaaaaagagagaaataattcgaaaatttgaagcaattaaagaaaagttgaagcaaaaaggaaaatacgaaaacaaaaaccgaaccaaaattgagagaaaaattgcaaaattattaggagcaaagataacattaataagtaaatggaaaaatgaattaaatctaaataaaaataaaataaaaaaggaattttatgagatgaaaaagagtgaattcattgaacgatttgatgaatttaaagaattatatggccaaggcaaacagaaagaatttgcgaaggaattgggcatttctgaagacacatttcgaagatggaaaaaagaaatgctaccaaaataccataaaagtcaaagtaagaattattttagtgaaattaaattgtactttttctttaagaacaccataccaatgatgataaattgatgaagatgaagcaatattatgaaataaaagaagcaaacccaaaagtgactgacaaaataattgccaagaaattggggattggatggacaactctgaaaagatggaaaaaggaatgctctcatccaattgatcagtgatttttatttgatcatgattgttgatgaccatgaatagttttcgaaatttacaatatcatttagttgagactctaacctttttttagtttctttttatgtcatggtaaaaagattgtttttcaaaatgctggttcttacaaatgattaaacgatttgtgaaatcgaattaaaggaaaattattcttaaaattggttttcatttataaataaataaaaccattaaacttagtaatatatactaattctactttggtttatgaaattcctgaaaaaatttggcggaaattctgggcgaaattcttagaagggatgaaaattgaaataatttgacaaaatcgtttaaattattaattataatcactcttattgggtaattaatggaatgacgaaagcaatgatgaaaaaataactcttaattgaaaaaaaacagaactcacatgtcccccctcttttgatcaattattgaaaatgaaagatgatgaatgatggtaaaattaaataataaatcaaaaatagttacacaaattaaaatacgaaatgggcaacttaaattgttcaaaacttcaatatttaatatatttttaaaataaatttgtcaattatgtaaataaaacaaaaacctacaagtgtttttttttataaatctaatattagaaaaaattctgggattttggctatagccatttgatctgccatgttttaaaaagcttaatccctactcagaaatgaaattcagaatgactacgagagtaaagaatcttgatgatatgtgtgaagcagaagtggtcgttgaggtccaaaaattcgggaattctcgccccaacaaaaaaaactggaattcggggcaacccctgatacaataagcaacaagcagaaaaaattcgggaggtggcttatggaaaaaacactttttttagtcagggtattcttcattttacatcaatatttgtcactaaaatttttttattatggatttatcatagctattcttaattaaaaaaattaaaattaaaaattccttttaatttttcggaaccttccaaataaaaatagcccatttatctcttaaacaagtttccttttagcatctcggcgctatccccctgtgaattttaaagaaaaattttttaattcgggcaaaacgcgatactaatttgttttgtctctttttattccaaaaacaggggatgctcgggatggcatggcatttcgtccacatttgtcgtccagcagcaagcaaacacaaattgtggggggggggaggaggctttagtccgcttctccgtttgtcgagaagcggccttaggcataaaaaagcctcgggggataaatgtgcggcgaggagagggggggggggaatgtttttttttt

SEQ ID NO: 13794 - DNA, 1815 bp, Heterodera glycines
gacgaggaggaggagtaccaaaatcttgtggtggaccagcaggcacatatcccacacaagcccaccaccactctcatccaatcccaatttaatgccctcatcggaattgccaatcaatgggaggaaacggagaccgcggacgagcgtacgacggtcggaagatgtaccccgggggaggggcacaaggtcaatacagcccctgaaggggtgggaggacgaaaggggaagaaatccctcgggggggggggggggaatggggcaaaacagtgaaaggaggaggaggaagagggagaaattgaggtttcattcaatgtgggagctggggggagcggagggaatgatgggcattttgcccgagaggaatgaggggagagaggcagagaggggagagcagagacataaagtgttatttgtgtgagtatgtgtagaatggaaggaagcagagaaaacagaaaaaaaattgaaaggaaacagtggggacagagaagcgaaaagggagagagagagagagagagaaagacagagaatggaagagacaatttgcgagaagagaaaaacaagcagagaaattgaggagaagaaaatggcattaaagaagagagagaaaaaagcatatccaaaagagaagaaaaaaaaagcataagagatagattgagagagagggagataaatggagcgaaagagagagagagagagagaggagggaaagagagagggtagagaaaaaaacggagtgcagagaaaatgcattattaattgagaaagaagcttagcaacgaattttatgcttcaaaatcactctgatcaaagtaaaatcagtgatcaaatggataagcatttctttttccatctgatcagtgttgtaattccaattctcaattccttggcaattatttcgtcagtcacttttgggttggcttcttttatttcaaaataatgcttcatcttttctaattggtcctcattggaatatttattaggtgcttaaataataaaaatgattaaactaattaaaaatttaattattccttattcctttacttttgtggtaatttggcatcaattcttttttccatttaataaatgttttttcagaaatgcccaattccttcacaaattctttctgtttgccttggccatataatcttttaaattcatctaaacgttcattgaattcgctcttttttcatcataaaaactctttttcattctataggttttctttttgtttaaatttaattcctttttccatttgtaaattttttttgcgatttacgcctaataattttccaaattttctctcaattttgactctgtttttccattgataatttcttttttctcttaacttttctctaattgcatcaaatttttgaacaatttctctcttttgctgatcatttggttcttctataatattctgatcacttttcgaatggttctgatcggtataatttctcatttgatcaattggaccatttgccatttcttcacccaattgatcaacttcactgttttcattttgttcaatttttatcataatttcttttctctcttttttgttccatccgttgccaaatatttcttcgaaattcggtcggattttgccggattcaattacaaaaataaagaaaaatataataaataataaatgccacaaatttatttttacatataatggaaatatttgtttgaaatattctttaatattgcaatttcatttcatcaaatattgcccaatttttctcaatttattggcattaatttacaaatcgataattcactgatttttaaatattaaaaattgtttaattt

SEQ ID NO: 13795 - DNA, 2870 bp, Heterodera glycines
ttaaaaaactaaattttatttcaaaatttattcaaataacgaaaagccgtcgcaacaaaaaactcagtaaagaaatgcttttttaagggcatctttaaaatggcacatgaaagcttgtcttatcggaaaaagtgcttggttgttttgcttttttaatgatttcggatgaatgctcacatttcacagtatttagggctccatgggatcaaaatcaaacataaaaacatttaaaagttaaaattttcactaactccccaatggttaggaaggcccagtttttcaatgaaaaataaaatagttttattttttcaccgcttaatacgagacggattttcatatttttaattataaattaaaaatgatgaataagcaatatattttgaaatttaaattgaacaacgaaggaacgaaaatttctataggcatttgaaaaattttttaattaaaattaacgaatacaaaaatgattttttgaatattgaacaccggcaaatacaaagcaaaaaaaagaaaagtgcaaaatgggcaaagaaggaaaagtgaaaataatatttttttaaattaatttcatcggatttttataccatttttaaaattaaacgaataaaaaaattctctttttaaatatttaaatttaatattaattatgttaattaatttaaacaatcaatgcacaataaaactccgtttgtcaaaattttgcaataaatttttccataatttcaaattattaacatatttgtctaaatccgatgaattgacagaaacagtaaaatgattgatttagtaatcggcacaaaaccggtaattcatcaaaaaaattgacgacatcatcagagttcggcacagatatttatgcttaaacggagtctcaaattattatttcggtaatttattgaaaaaaattaacatgtgtgaaatataattaaggtatttttaccgaatcaaatattgcattttctcatttttattgataaataatttagtaattattcttcaatctccgcaattcgaagcctgtttatacagtagcaatttcgtaaaaaatttaggtttttgttttttaaataatggttacttgggccgggaaataaattgtggaagattttgccggtagatcaagtctataggctaaagaacgctgaaccctaaattatgaatgatcccgcgtgagaagtaaatgattaatgaatcatacagtaattttttaacttttatttttgtgttaagccttggaaaagctaaattgtaattaaataaaaattatagaaattaaacgaacaatttgctaaaattacaagtgaaatttgccgaggtaattagtggtaatactaattatttaattaaattagtaatttaattgttcctttccaccacttttcgaactcgaaatgacgatgagttgctccgccgtcttcaagcagaacaatttgatgttgtacttgccgaactttacaaccagtgtccctcggcacttttccatcggattggcgccaaaacaaaacttggcactttagcggtgccgttgtatcaaacggttgtccgtccctttggcatcccaacgctgagcagttacgtgacaaatgagtgaatgtgccaacaaagggggaaggcatttaattaattaatttaatcaatttggttaattataatttagaaaatagagaaggtctatttcgataatttcaatgttttcatatattcaattttaaaaatcataagaaaaaaaagtatttttatgaaattattaaaaaactaaaatacttttatttaaaaatatttcataaaaaaagtacaaaaaaaaacaaaacaaattttttgttttaaagcgatcgtggacaattccagggatggcacagtgatcgtttccttcggcacttttgccgatattaactcaatgaaaagggaaatgaaaatgaaaatggcatttttggaagcatttgcccgcttttcgtactatgaatttatatggaaagttaaattgtcttatgaagatgccaaagtgtttgccaagtacaaaaatgtgaacccggtcaaatggatggaccaaaaatcgttgctaagtgagttaaaaaacgaaaaagtttgaaaattcagttaatcattgatcacttagtaataagttcactaaaattaattacccttaatttcggaggctttaaattttttcatattcggtcaatgcccaaattcttggtatcaaacgaaagctcaaagtctacagaaattttttatttagcgaattgcggaataaatgtttaacagacaaaaataaattgtcttgaatatacacgaaaatggtgaattcctgatttctattgcatactttttcttaatattaacatgctattttcttgtattttcgaaattccagaaacattgcgctttcgttgttacgaagaattttttttttaattttaacaacaaaaagcactaaaatttcaaaaatgttacatgtcggctcctatcggcaccgacgggtcaccattttagctgtttttttttttttgaaatttagacctaaaaatggcaaaagcagtttttttttgacgataaacggctagaaattcttgtttttgttccccggcgctgaaatttttaaaataacactggacaatggacaagtaagaaaaaattatatgccaagaaatttaggatggtcacttaatggacacgtaattggactagagccaaatttgttaatatttatataaattagtaaaaagtgcactatattaattatcctcgtagaaattttctttttagccaattttttccattccgctgcttgccgaccaactgtacaatgccattatggcacgtgtgaaaggcgttgctgcccaattggatgttggacaactcaactggga

SEQ ID NO: 13796 - DNA, 1426 bp, Heterodera glycines
cgaaatttgaccaaaaaagatctattttaagtcaataccttccactaaatacaaatcaaagatgcatttttcgaggctacaatttttttttcttcttaaaatcagaattaccgaccataaattgataggaaatcggaattccgtgtcttcctgacccatatatcgcatataagtttgaatatttagaatttcttgtaatattttttcattttttcgtcccacatctgaagggtattcatgtatctttttaagacacataggatggaattccgaggccctaaaactttgaatgtcagcggaatctaggagacctccaaaaattttttggaaatttgatttcaaatttccatccctgtaactatgtatatatcagtatccgttttttaaacaagaaaattcactttccactgtgcaaacaatgcaaattctccaacaaaaaactgggcctgagcccgccaatgtcgagctggtgttgacggaagatctgagcaacggtgcggaaccgtgcaaagtgcgtgtgctcaaccaggtcaatgcggagcagccgaaaccgttcgagtacatcaccagcagggagaatgcttcggatttggtaaaaaaaaatgagtttattacagtaggattgggcaaattttaaactaaattttcctaaaaatttcaaattttaacatctgttcattcaaggaagacgattgtgcgcacaagctttccaacattgcacgtccagacagcttctttcaggtggtaaatcggacaagcgatgtcatcatttatcaaaaaattttcattaccattaatatgcaatcgtaaaataaattaaaataatttttcgataattaaataaccgtttcgccacaatttaaaaaaaagaaaataatcatttttttcaaataagcaaaaaaaatagaaataaatacacttggaatctcggcttaatcgaataatcaaatttttataaccccgaacgggagaaacgggcttttttctcgaactcaatatctctcaatgaaaaattttcgaaaaaataacacaaattttttcccgcatctcggccttacaatttaatttcgaattaaaacaaccgggtgggcaacggcaccgtcaagccccgtttttgccaaattcgaacgcccaacaggctttttcgtaataatttttctttcaaaaggatcaggttttaaccaagcattaacgtgaaccaaagagatattcgagaaatttattttttcgaattttttcattgagactttttcgagttaaataaaaagctcgttttaataccagtgagcccgttccgggctctacaaattttaattaaatctatatgtttaaatacataaaactggtataccagggatgcgatcgaaaatttttcaaaatcaggacattcgggcccaaaaaatcagattttgggggtcaaaaatca

SEQ ID NO: 13797 - DNA, 2267 bp, Heterodera glycines
  unsure (1)..(2267): unsure at all n locations
agagagtgtagagaacaaattaagagatttgagaacagacggttagagggacggacgcatgcattacgttgccgcccctcccccccaccctccttttaccaaaaatttttaaatgtaaaaatgtatttaattttttttttcttggcacttttatatggggatgatgcttttattcggggggggggggtgattaaaaaaaatcaatttttattttcttttttacaatattcaaattgataatctcatgttcggtgaattacaattttgccacagaatggcgaaaactatgtgctggacgcttttcgcaagggcaatttggcacgcttcatcaaccattgttgtcggcccaattgtcgcgcaatgttggccacaattagtaatggcggtgatgatcggcatgtgccgcgtgtgctgatctatgcactccgtgacatcagacctggcgaggaactgactatggattacggtacatacagtatattatgttccccagcagggaggcaattcggaggaacaaaaaatttttcgaactcggaattccaagacccgaaaaaatataggggattgagatttttttaaaatttttatttgcgccaaatcaataattctgggcttctgaaatttttctttttttatttctccagtttatgtatataacaatcatcttaatattggtgtgtgtgaattctgttaacaaattcaatatttgaaaattttaggaatcttcataacaagctgcattagaatttacaaaaaaaaaaaaaaaattttaccggcggcttcttacggcaccgcctgacctttattttaccatattttttgaaaaatttttacaaatttattcaaaaaaacaacaacaattctttaaagaaaaatgagcgtccgcgttcatgccgcctattggcgttgccgtgaaaatattctaaatttttgtgaaactaactcaatcaatttcaatattacttaatccaggtcaacagtggtggaatgccaaagcaggcacggttaaatgcacatgcaaaaacagaatgtgcaagtacggcgagcaattgagcaaccaaatgaatgagagcatccaattgctgaatggtgtgttgtgtgtttatcggatccattcactcccccctttttaaaaaaacaatttcttaaagcttttttctagtaaaaaaactggttttttttgaaaggttcaaaaatttttaaagttcttagcttttgaaattttttgaaaagaagggttttaatagttttttttaattaaaattttttttaactttatttgaaagaatctcaataaatgttagaaaataaaaaaatttaatttctttaaaaaattaatggagaaacgatacggggcgagagaaacagcggagggcgaagggaaacgggcatttcccatgtttattagtagagatcggtattttgaaaaaagcctggacctggacctggacctggattccatgttggacctggacctggatttcctggacaaaaatccaggaaaatccaggtccaggaaaaatccaggctcttcgagacctggatccaggcctggacctggattttttgaaactcatcttaaaaatcaaaaaaaggtttgaaaaaattaattaattgcttagaaacatctaaaaatatctacttaataataataatgtatttttaaattaatttaatctttttttgaaaattaaaaaaatcggtcacttgaaataataaattctaaaattttgtccaggaaaatccaggtttttcgtgttttgcctggacctggacctggattttttttcacattggacctggaacctggattaaggcgcaatgaaagtgaaggcttcttacggagctgatgtgtgatccctggcactgcggtgttggggcgcaacatagtcccgtctcgatcgcatgcgatggggcggagacagagcgtatgcgctgagacccgaaagatggtgaactattcctgagcaggatgaagccagaggaaactctggtggaagtccgaagcgattctgacgtgcaaatcgatcgtctgacttgggtataggggcgaaagactaatcgaaccatctagtagctggttccctccgaagtttcccccaggatagctggagctcgttaagcagttatactcggtaaagcgaatgattagaggacttgnggacgaaatgtccttaacctattctcaaactctaaatgggtatgaagccagggttgcttgactctgaaacccagcgttgaatgtttgagctccaagtgggccattt

SEQ ID NO: 13798 - DNA, 1316 bp, Heterodera glycines
gatcattatgatggcatgcgcgacatccaccccacaaatcgagcaatgcacaatttcgccaattcgtaacgacggatggacggcgaacaccacgcagggctgacgacactcgcgggaaaagggcccatggagagagtcgtagacacgaatgcgaccagtgcgggcgagctgacaaggggcaaacgggtgaataaaagatgtacaagcaatcgatggcaaatttaatcaaggggggctatattagggaggcgcagtgcgtaaatttggccaaatgattcactgccacggaaattgtctcgagtgttgccacctctgagtgaaagaagggttcttccggcttgtaaactctgctgcttttgtcttcggataaccattcgggaaaaatctgcgcaaattgcagcgaactttcggccacggtggagacgaagtaaatgggaatgttgcgggacacattttgctgttttaattaatgatagaattgccaaccaaaccccgaccatcgctcaccaattcgattgttttcagcacacattcgaacatgtcgtagaccaacccagtgggagtgaccggaatcagcacatttcctcccattttcaatgtttcaatcaccgcagaagagaacttgtacacctttaagcagaacggagccctaaaaggggtctcaaagtgatcaaaatacggtcaaatcgggcgtctgatcggccgtagacagggaagtgatcagcagagagtcgagctgtccgaaagcagtcaattccatcggtttggtgtgcgaatggcgcagagaggaaggcgccaaatagccgatgcggtggtgctccgtctgtaacagccaattgctggagccgatggcgtagccgctgctgaaggcggacacgcgcagctccccgttgaccacctcaacggagaattgggcaatatgtccaaatgtgcactaaacaaagccgcacaatttcttcgcggaagaacactctccgaatgcgtgccaaactcttctccatcgtttcgcgtgtgtaaaatgtcctccattcgtttgggtcactgagcggtgcgtttggaaacgatcggcacagcgtcttccacgcccatgaaacgtcttcagccggtcggtcgacgcgctcaaacatgtcgcacaagtcttccatgaccagtttgccaagttggtaggtggggtcggtggcgtaaactgtgccagtgaagccggtgccctcggtgtaaaaaggcagcgcgacgagagaggccgtgttggacaccaaaatggcatcgacggcggacaggtccaaatcacgcgactgacaacaaattggcacagtttt

SEQ ID NO: 13799 - DNA, 2059 bp, Heterodera glycines
  unsure (1)..(2059): unsure at all n locations
atccccttaatttaaantcccttctaaaaatataaaatctccactttaaataattattataaaatctttacatcacacaccctccaaaatcatcttttactcttctcattcgtcctctttcttctcgtcctcactgtaaaattgcgaaaaatcggttaaataaataattatttgaaaatcttacagaacatagggggctctttcttgtacagtttatgctccacaaaaattcgggtcaggggttcgaaattggtcgaaaaggatgcaggattcgtacttaatgaccccgaaaacctatattggtattggcatattttttgtttgttaaataaaaaatattgtaaaaaaaatttatgggaacctaaactgtacaagagcccacagctgacttctaccacacctttggtgtcaagacaactcgtacaaaaggtagtaagctaggccgaagcttacggtttaactttaacttatgcctaagctttattttgtaaattttttatcaaaattttcaaacctacgccccctctcacattttttcaaagtgccgaagagcaataaaaggataatttccggagaaaaactaggcgcaaatataattaaaaaatttggtcccaaaacaggtgcggttagccccccctgctgtcccatggttcttctcggtcgtatggcacaagggcgaccggaaaatgcgtcagtgataaaaaatattaagtttcctggtggttcggggtcgctgatcgtgaatccggcacccatttcggcatattccgcactgaacccgaatttgaacaaaattcaaaagtcaaatttttcgaatttagctattttggttaaaaatgcttaaatgatctcttatgaaggattgatggctttcagtttgtttccatgtatttaaaccgattttgaacccaaagatactaattgcgaaatttaggctttcgattttttgttcgaattcgggtccagggttcggaattcagaacgattttcttatgaattttactttaatactacaatacttaatgccagtgaactttatttaaaaatttgaatcactgacgcattttccggtcacgggcccaagacctcctttatgtatgcaagttgtgtatgtttanattttattgctcaattaatagtttaaatttgattgccaattaattgtccttacataaatgccctgatgaagtccgccaagaacaatgggtcatttgccttgtcactgttttttgtattcgtcgtaaatctttttcgccttgtcttcccccatcgaattccacactctctcgttgtacacgttctcgcacttttgcccaatcgcaaaacgtcgtgaaaactttgctgccccaggcctacaagacgcagcagcccttgagaaaaacaaaagttcaaatttagtgggtgtaaatttttggcgttatgtatagccccccccccccgcccttcaaaattttgaaaaaaaaataaaataataggagactcagaattttgaaaattttttataaaaactgatgacaagctaatgtgataaaacaggttaattcttttcctttcagtatccctgcaaagtttggggcgcttctgataagtttctgaaaaaaaagttaagcctaaactttttggcctgtttaaaaaggaattaaaaatttttaaaaattttattcatctcccttttcgatagaaaaagcatcagagtgcctaacataacatgtaaataaaatttggtgcgtttcagagcattttctgaaaaaatatttatgaattaattatgcaaaaataaataaaaatttaataaaaatttgatcgtgctataaataatcttgtaattgatcaggggctcgccaaattttgcagggatacgtatcggatcagtacaaatgttttataattttttctagattttttaaactcggtgaaaatttatagcagacaccacctcttttgcacttaaaaaaatttcaaaaaactttaacaattcatagaaaatttaaattcataggtactgctattaaatcaacgcagagacgcctttccttgacctatataggcccctgcaaaa

SEQ ID NO: 13800 - DNA, 1700 bp, Heterodera glycines
atattcttggcattgctcttgcttcctctcaaattgtttccatttttgtgcaattttcgtttcttcgtgccaaaaaaatttgaacaggatggcaatttggccatctcccaacgaaattctcgacttttttttcttcatgatggaatgccccattttaaacattctctagtctctcttcaatttgaggtcaccaaaactttatgaaactcggatttctgttaccatattataaaattttcatatttccctcattttccatgccattgtaaattttcctcaaagatatgtgtataaatgtgccattgaataagtgtgttgtgtgtgcataaaaaatagtgccaaatttatttatttccaaattctcaaaattgaaaaatacaatttaccattaaatctttaagattacgataaataatattataatttttgcgattttgaagtgatatatcttgggatatggaaatggtggggggggggggggggaatcagtcaaaattatattaatcggtcataatatctgacaggtttacataagatgatggaaggaaatccaacgcattctgacaccgtttgaaatgccatctttgcctcttcggagacatggacgcttattattattattattattgtttctgttggtatgagtacggcggtggtggtgcaccaccagctgctccttgtccgtatccgtagccgccgccgggtgccggccctcctgcagggaaatgtgccaaatatttttacaaaaaactttaattaaacaaaaccgatacaatggagacatcaaaattacgccattaatttttataggctataatttttgaaattgccttgctagagggaataacacatttaaaatttgccgagtgctctaccccaagacttaaatagttcatattattggattttttggatggattttcagttgaattttttttaaattgctagaaatggtgacaactcgccaagtcttcagtttcaccctattaacacacacaggaggaggaaagggtaattactgataattggcataattaattatttgttttacccgccgctgggtacgggggcgctccgctcgcgccgccgggaggcgcttgccatccgtagcctcctccgccgcccatcggcatctgctgctgcggttgctggtcgtatttgggtggcccagtcatgttcaagttacggacacgcaaaatgcgcacgtgcgtcccctggggcggcatgccgggcaacggttggtcaaaatcaccccacacatagacattgcctgaaacgggaggggggggggggggggtaacaaaagttgtgaaatttatttgataaattttttgaaagagttgttgctttttttaacgatttcaaatccggccacaaaaccgaaagtacccaccacgacatttctaaaccaaaaagtggcctaattattacggtttgttagtttttttcgactcgctttagcccttgattttcgaaatttttgagaaatgtaaagtgatagtgcagcacacccgtgttggtctgtcatcccgttctacctgagttggcggtggttagccggggttcgatcaatggcaccggcatttgggcggccacttggtgccacgtgaagttggtaaggtcgagcgtccattagtccaccaggcgtgccacgttgccgttgccgtaatcaatttcaccgccggccaacagaataaagc

SEQ ID NO: 13801 - DNA, 1481 bp, Heterodera glycines
  unsure (1)..(1481): unsure at all n locations
ggttcgatctatggcaccggcatttgggcgggcttacactaggacgtgaagttggtaaggtcgagcggcaatacttaccaggcgagccacgnagccgnagccgnaancaannncaccgccggccaacagaanaaagccnaaaccgaacgaaaaannggggcaccacaacccccccanaacgggaacgggacccggncgggnccccgancccggcnnnnagggaaaacnagngnccgcaaccggncgccnccccgcaaaacccgcacccgaaaccgagacgagagccgcccgccagcgcgcggcagggaagccacgcagagggncngggngcaaanagagcgnagcgancggaccacgagnatccaggttcagtgcatggatacggctgtggccaaaatggccgtccggtgaagcggacacaaagtaaatacttctgaacacaaagccgggtgatgaaagaattttttttaattaccctcggctgagaaatccgtcataaaaatgggacagctgcgatccgggcacactgaagcggtcaatcggttgttggggcccataggcatcggcatgcactcgcaccacattcagtccggggccatggacaacctcacaaaagtttgtttttttttagaaaattgaggtgggaggggtggttttcgacttttgggctctcggaattccgttccaaaaaaatttcagggaaaaataaagaaaaaaaatgcttcttttttttggctcaccaccaactcgggcgcgtcctcgcgcatcgtgcaaatccattcctcgtcaatgacaagcggtgcctgcagcagcgaggccggctcggacgccatttgcattccatccgcgctcaaattcaaccgccacacatgcatctgtgaattattgagaaatacggtattaaaatacaaaaaacaaaaaatttcgtttcgccccatgcacgaaaagaaattatgggagcgaccagaattttgcattttcatttttaagttttttggggcttgtttttgaccttatgacaagtatatgaagcataaataaaaaactcagaaattttaggaaagggttagtaattataaaaaaaatttaaaattttaggggaggagacaaagcgattaatttaccccggataaattatttttttatctagccacccaccacatattggccgtagtcctcggattgggagaccaatgcaaatgcggttccgccggcttggctctgcactttcaacgcgaacaaaaatttgacacgtcctacacaatggaaattcatttttaatgaaaatttgtgccttattgttaggtcaaaaatgggtactttttcactttacgccacataaaaaaaaattttttttttggggggggggggggtttcggggtcactgatcacgaatatgacattcatatcgaacaattccgaaaccgggacccgaattcgaacaaaaagttgaaaattcaattttcgaatttcgcattttt

SEQ ID NO: 13802 - DNA, 2018 bp, Heterodera glycines
  unsure (1)..(2018): unsure at all n locations
cgttccaccttactgtggctgatcggttgtacggtcttctcactgtattgggctgtgttcattcagcctgctgcgtacagtagttgtataatgcttggtttttctacccatttattggctaccgtaacgatgaccaacatgaggtgggagggaccaaaccattttaatgtcaaatggcaagaactgtccttgaaaagtgattattaatgaggcaaaatgtaaaataatggggtaaatagacaaaaacccagtctctgttttttaattacagttctcagctttggcgttttgttcaattttttgaaaaattttcaaggtttttgttcgctgaaaagttttctactcttgaaattctgtccaatttccaaaataaaaaatttagggcgtcaaaattcaactgaaactctcacttagaccaaaaatttccgaatttttcagtttgatgtttggcaacacaatgcacacaaccttttggtggccattctaagcccgggcatttatttgatcttcgctgtcacactttcgctgagaataagagaaagtccggctgtcatttcgcaattaaattcattgcagataaaggtcaattttttaattgcttttatgggtaataattaatctcgggtaattaattcaagaaaatcagccaaaaataagaaataaaatcaactcaaaatataactgaaatatgaaataataagattattgagttaaaaatcaatttttttttttttttggaaaaatctaaaacgaaattttattttcgtcaacctataagatcggtataacaattttgttgagtatttctcgttttttgtttaaatattggaacctattttctgtctaatttcacgataaaatgtattaaattgttttgctgatgagataacaaatttttttggctaagagaaaaatgaggcgccctggcctcaaaattaaaaattttttcagccttttggcctggtctcactatgcttttttcagacatttttgcaagtgttttttgtctcggcactgaacacattggccagctcaatttacgtttacctacagtacaacgagtcgcatcaatggctgatcactgtggcccaatttgcatggttcaaaaattatcgaaaatttaacttatactttttgtaattttacaggttacacgttcatggtaagacattttaattttcaattaataattaaacaatttttttgcctccttcaaaaggatttccacctgtcatttatttggcccttaacaaaacgatacgcgacgattgtcgcttactgtacatgaaactgttccagcggcaccgtatcgaaaagaagaatggtgttactgtacttgttaaagctgttcctacttgtccacaaaacattgcttcttcaccattgtagtatacaaattttgtttttcactggtcataaagtcggagagaagagatgggacaaatttcgagttcgaaaatttttggatctcctgagttccggtttctgaaattttttaagctaacttcgggattttttggaattcgatttggtttatttatttttttaatttaaaagcactgccaaattaaaaatgcttttcaatgtttcttgagcaaatgaatatttgttgccaattttattaaggaatataaaatcatttatcttttttttagtaaaattacttttccaaaaattgaattttaaattgttcttaaatttttcattgttttctttcatgatttcaaatttaagtttttatggaaagttcaatgtttttcctgtttatattaaaagggttgaaagcaactttcaataatgtctcaatattcattaatttaagccaaaaatttaaaccccaagtttctaaataattaaataattaatttaatatttgaaaaagcgaatttattatcttttttccctccctgctcccgcggcaatttattgcgtctccatatttcttatgcncgttaatggtccaccatttttgggcaagccattcattctaggcacgccaaacgctcatcatttctctc

SEQ ID NO: 13803 - DNA, 2084 bp, Heterodera glycines
ttattaagaaatataaaatcatttatctttttttttgccatattacttttccaaaaaattggaattttaaattgttctttaatttttcactattttaaacacaacattgaattagatgaacaaattttgaagcgaaagaaggaaatagaaaccggcgaaagcgattttagagcgatttggcctttaaggtggtgaaattaattttgaaaatattgtaaaattattaattagaaattagatttttttagttttttaaatattattaataaatatatgatataatgataaggaaaaaaatcaaataaactaaaatttattaatttaaacaaaattgatttttggactctccattttttaatgtttgaattttttttaattaatttccactttaattgatttttttgaaaaattttaggtatttagtgtttaatttttaattgttttttcaattcatttttagttcatcaccagtggtttcaaaactggcattgatagacgaatgaagcgtgcagatattctcgcatgcttactgattctcgtatgttattctatgcgaataaggccaaagattcggcattaatcgcatattttttcatattttattaggtttatgcccaacaagccttaatctaaatgaacaaaatattctcaacagaaaaaatatgtgaaatgatgtatgaaatgacaaaaaaaaacatttggagaccgagtgaaacctgggttggttttccattattttgttggcacaacattccaccgtttagacattcaaaaatatgcatattatatataatgaacggatttccatttacaaattttatatttttacatttttacgttttttctatttacattatctaattataaaatgctcttatctagaaaaaaattgtaaaagggtaaatgtaaaaaagtcaatcaataatttgctataatttgttattaatcatatgcttacactggccatttaattcacgagtaatgtatagcatttctagatattttttttatattaaattattttgaaggaattagacgtgccaaattggcatggcatcaacccttaatcagaaggggaaagattttacagccaaatttggcatggcacccaccttaaacagggggacgggggtggcatttgacgtgcaaaaatttggcttggcatcaatgatttggcatatcatgctattgattgaaatggttgtttaaatgtagcgaatgttcacaaaagcaaagcattaattttaggcaaatcaacgaaagacaccccaagaaatattcaaatctttaacaagtattttgcagggagctgagccgttaaaaccatcaaatgaaaaatttcaacaaaaaaatgcctataacttttgtcaaagtcaactaaattaaacattcttgatatcattcgatagctaaaagagttctctaatagccggaaaatttcaaaaaatttcgttaaggttcaaaaaagttatgaccaaaactgtctgaaaacctggttgttttagtacttttggccctaactttgtttcagaagaagaaaataaaatgtttttattccaattttcgccaatcatcatgatatttatgtttttgttgtgcccaagtgatcaaatgatgcaaggacgtaacggaataaacggtattgatattttaatgaatgcattgcaattaaaagaataaatttaaatatttattaaagatagttatgatacgggcccggatttatcttttttaaatgtttttttttgagaatattttatatgtatgaaaaactcataaatagcattgttaccagttttattttgaatcaaagcaagttattcgcaaaaaaataataatttttttttagacttttgtcttatactaaactattttgatgtattttttgcgatttttttttaattaggtcttttaaaaaaattggcactcaaatcttggaaaaatgaccaataattttcaaaatttttattttttgcattttttcccctttcataacttttccgcgttttaaggcaaaatttgaattttagctaagaaaattccgaaaaagaagttaatcttagaaagcgagaaaaagatttacg

SEQ ID NO: 13804 - DNA, 1275 bp, Heterodera glycines
  unsure (1)..(1275): unsure at all n locations
ttcaagaaatttcgtaaattaaaaatgctatggccaaaaacgtttgaaacccagattttttttatttctttggccatatctttttctaaagtttacaggaatntaaaaaaaatagggatatcgaataatatcaggaacaaaaaaaaagaataatttatacaagattttatgaataatttcactagcattgttttgatcaaatcgaaaaagaaaaaaaacgcaaacagacccacaaatccgaaaaatgcttgagttcagaatcgaaaccgggactttttctaatatttttagccccaataatattatccgactaatcataaaaattattattaataatcagtttaacattccaattgttcacaaacttggaatcgctagaggagttcaaaatattggcctatgtaaaattttaagaaaattaaacaataggaaaaatttttttacaagggcaaacatttcaataattttaattcttttttagccaagtccacaatttaaggccaaaccaaataaaatttacaatattctccagaattttcccttcaaaatgagcataaaatggttttatttgctctagtattcaccaagttataagctaaaaaaaattcataaaattgtcgatgttgtacgtaaccaacgctttttgaatatgattttttattgccacgaaaacttttattaatgaaaaaataattctgccttcttctttaaaagaagaaattgaaattaacacacaacatagggaggacttgaacctgggacgccccttttggtgactaactcacagaccactaagacgaaaaatccagcataattgtacttggagcccaaaattgggccgctgtgtataatgagaagaaaaaaaaattccaaataaattaaaatttattaattaaacaaaattaattttggactctccaataaagttagaatttttattagagatcggaccgggcggttttttcgatttttttcggtatattcgattttcggtttcggtttttgaccgaaaaaaccgaccgaagtttttaagtttcggtttttttggttatttaaccaaaaccgactgaccgaattaatcaaaaaccgaaataatcgaccgactttttataaaaaatcggaaaaaacctaatggcgaattggagcgactgttaaaacaatattttagtgctttttttgtcatttgaggaattttctaaaatattttcatctattttaaaaaaatttataaacaaaagtgcaaaaaaaaacaacaaaaaatgcacccctgagaat

SEQ ID NO: 13805 - DNA, 1953 bp, Heterodera glycines
cccccccccccctatgatacggtggaccaaattgggttaattgggataattaatacttacaacacacacaaattgggtgagtgaatgaaaatgcgaatttggcgggaaagaaaaggagaaaagaagtgcaaattgttgatactcattaggcacgtgcaaatgcgggatcaaaactgtcactccctccatttctcttctcttttgcgcctgattttcccgcatttgaatgagtggcgaaacgtttacaaattgagaaaataaaagagaaaacacaaaaggcccattgtttcccaagacaatgctaatttttggtggtcataaaacaatcaaacaaaagcccctcccaaaacattttccactcaattcaaacattccttttccatcttttgaaagcaaaacgataagaaaaagggcagaatttgttgtgttgtgagaggaaatggcagaagaaaatttattcactgttcagaggagacaaaatgttggcaagtgatgagctaaagaaaagaacaaaggttaaatactgggaaagaaaagaaaagaaacagcaattaatcaattcgaatgggaaatgacgaatgaaaagcacacgggtcaaaagcatttgatgctgctgtttgtttgtggtcagcctcactcctccaacttgaggtcgggctcgttgaagcattccgtcgccagccttttcagctccgctttgtgtctggacagcgtggacagcacgtgcggtgccttccccgagtgtttctccttctgatgggtgtccaccgtcgctttgtcgtgggtggaggtgaacaagcagtacttgcacttgtagatgggcttcttcagatgcttctccagcaaatgcagcagacgacgcttcttactgatagtctgagatgggcaaaagtttaatttggaaaaatgagtctcggggcgggggctttgaactcaaaagaatggatggaaacggaaatgccattttctcattccttggaaacgccccaatttccctttccccatcaaatggcaatttgtcccccctccctcactgtctctcacctgagcacatcctcggcactttgcccttctgctttcgtccgcaattgtaatgttggacaaccgttttggtctgcccgggaagcattggttgtgcaactccgagaattcggctctgtgcttctccacgttggcgatgggttccatgcccttaaatttcgtctgtccctttgtcttttttaccctttcgtctgtccgttctcttgcctcacattccttcagcgtgtgattgttgcgcatgtgtcgttgcacaagccgtgcctcggccgcgccgtactcgcacaatggacactggtgcagcgggatgttcaggtggtactccgcaatgtgccgcgatgtttgccgtacgtccaaaccgcagaggcggcaccggttgaagtcctccgtgacactggcgggcaggcgccgattgatccatccggggaagcatcgctcgttccattccgcgatttcgcgggagaaacgcagcaaattcgcccgcggcaacagcgtcggttggcttttgtgggctcggaggatgtgattacgcacgtcggaagagcaggcgtagtgagagaagtcgcagacggggcactcgtacagacgcggctcccgcaaatggtgacggtacacgtggatctgttgaggggcgaaggggtgtaaatggaaacatggggaggtcaatggacaaaatgtgccaaaaaagcgaaggaagtcccattatccatgcaaatggacgccttcctcacctgtctgtcctccgtcttcatctcttgcccacactctctgcacctcactctcgtctcgtcaatgttcgtctgtctcggcaccactgctgctgctgctgccgtggtttcttggctgccgcagcgatcgctgccgccggctttgaattccttgcgcggaaagcaacgtctgtatattatttcgatt

SEQ ID NO: 13806 - DNA, 2061 bp, Heterodera glycines
  unsure (1)..(2061): unsure at all n locations
cgtcattttgtcggtcgtccgtcgtcccatcctctgcccaattcgccgtccccgcgcatccctccgaacggcgttcgtccgatgttcgcagcgtcgacggcgattcgctcgtccgttccgtgccatcggccgcattcaaatggcgtttgcgctgccatcccgggaaacatttgtcgttcagtgcgtcaatttcgtcgcgataaatcgcctcgtgggaaatcggctccaaatgaacgccgcccgaggcgtccacaaagtctttgtggtcccatctgaacaaatggaaatgggcgaatcaaagaccaacactaaggcttaatcaactcacttaatgtgccatttgacccgatggatgtcgtaatttgaggaaaagtcgcaaagtgggcattcgaatatctgcaaactcagtgcccttctcgcaagtacaaacagtgccaaccccggttgcttctcacctttcccttgcgcaagtgtttgtggaacacgtgccgctgtctgtccgactgggccacgtccgcggcacacagtccgcactggtgtcgctcgcggggccgtgcctttgccggattattggcgggacggaccaatttcatttgtcggttggggaagcagcgaatctgtagaaagtgtcaagtgaatgggtgaggaaatggcatgccattaatttagtcagtgcctgcaattctctgatttcgtccgcgtatttctccaaattgcttattggcatcgcattcttcgcctccttcgggtgcactttgttgatgtgtttgctcactgtgcaactttcgtagctgccgaatttggcacaaattgggcattcgtagagcggtctcttcagatggcgctgggcaatgtgccgtcccgggtatttggactcttccctgcacaatttttcataattattcgatggttttcgctttgagtcatcgtaaattcctttcttccctttcccacgctttcaaaatgccatcccccattttggcgttttgtttcggtcggcaatttccatggcaccactcacatgcacaggtggcaaagtctgtcgttgcctgcagcgcattcgtcggccgccgttgtcggcgctttgtcacttggtgacgcgttgtcccgccattcgtcctcctccgtctgctcctccgttgttccgctttcctgctgctgttcgtcctcctcttctccctcctcctccgctattggtccgtgtttttcgcttcgttttgctgctgcaaaatgtgccncaacagttcgccaaatccctccaacaagtcgtccacttcagcgccgccttcgccctctctgcgccgtttcagcgctgtctcctcttccgtcgagtcgccgtgctcaattttccgtttctgtttccattcggggaaacaaagttggctccacatcttaagatgggacaccaaaacagcgattgaggcttgattcgcttcattgtcacctgaatttccaacttgtgcttctcctcctgactgatcggtcgcgcgtctttgccgtgctgcacgcggctgtgcttttgcacttcccacacggaattcgaatttgtgtattcgcagtgggggcatttgaacaaatctgtaaattgctattttcccaaaatccaaaaatgcttccaccccatggagcagttcagagttaacccttttccccacaacaaatccctcccgtgccacattcgccactttcccggcccacctttcttcttcagatggaccatataaacgtgtcgctgtcgtgcggttgaacaaatgtccaaattgcacaccttaactttgctgtctgtttgtccctttcgttttcattttgccgttttctccgtctctcacctgacagtgcgcctttcgaattgcttttgagtcgaccatcgaagcgcggcacgtcggcgtagggccattgggagaagaggaaccgtcgctgagaggcgactcgaccgagacggagaagagaagggactgcagggcattgccaaaggggtcccccaattgctgctgaaaagggcaaaatcacacggcgtttatactttggcggatccgccgctctttgcctcccttttctcat

SEQ ID NO: 13807 - DNA, 916 bp, Heterodera glycines
aaagtgtaaacaataaaagaatgcaagaataatggaaattgaaaatgtaggtgaaaagtatcctttcaacttaaataagtaccggatttaatgataatggtaattttattaaatatttatttattgtgcagaaaattggtcttgtaaaagttcggcaacacttcgaattgtttcacaaaagaatggcacggaggatttaattggaagaattggtgatcgcatttttaataaggaatggagcatttatggatttaattatttcattagttttgcggtgagtgggattcaaataaatttaataaacttcatattttaaaattaaaatttttaaaattttaaaaaagaaagtgacaaaaaattgaatagaattttttgaaattttttggttataactctttgtaaatttttttctagatcatcgtttaatttaatttaactaaatttaagctaagttatggtttcttattagcaataaattaaaactaataataaatttaaatgtttctatcattgacacttttgtaactttggctcaccatgattttatattacataattgatttaaaattaaagttataatcgtaaacattgctgattttcatgttaaaaaaaaataattacaatatttgtcaaatttttgcatctccaaataaatcactaaaaattaaggaattgttggatccgggcaaaggattttacgacaaagatgaggacaaagtcacattggccattgatgtcaacgatgcaacgccgatttggggttggaacgatttcatttcatttttggtgagtggaaattaattagtaaatttacattttaatattgtaatggcaaattaaggaattaatggacccaagcaaagggttgtacaacaaagacgaggacaacgtcaccttggcaattgattttacatgt

SEQ ID NO: 13808 - DNA, 2451 bp, Heterodera glycines
  unsure (1)..(2451): unsure at all n locations
ttgcccaaattacgacanaatgcataaaacgaaaaatacacctctagaatagacataaactttttcaaaaaatgcacnttagaatcgacccgaaaatttcaaaaatcatctccaaaattatttctttatttcttaacaagaatttttgatttaaaaattatttatctcaataatgatttggccttattttttacttttntgaatacattttgtcattttacacccctaaatttgaggatttttagagcctagtttctttttttagtgcctattttttggttttttagaacctggacttggacttttgatctacaattcttaaataataaaattcatttaaaaagtaggaatttttataatctttagctttactttaaaaagaaaaaaaatcaaaaataataaaattggttgtaatttcttgatatttgagttgccttttatattgatagtctgctacttctgaaataataaattttccacgcaaaaattttacatccctataaaaatttatatagcattagcaactatagctaatataaaatttataatttattatatctctcatccgtggaaattgcctattttgtaaatatattttattatacaacattacatcccatataaaaatagcaactatagctaatataaaatttataatttactttatctatcgtccattgacattgcctactttttatttacatttaaaatagataattcactaaatgataattattaatgatcactatttcccattgcgccaccagtaggattttatattgtaaatttgtaaaaaatcaatgtttaactaaaatgatcaaaattaatattatacatcattacatcccctgtaaaaattctctttatgtatacagcagattcacttctacgttcacttccctcggtttctcttgcaaattccgaaaatttccaatgaaaatgtgccgttggatttgttcggatcggaaataattttccccgtttttggttcgaacacaattaaatcaattgccaatttcactttatcctcctttttgttgtacaagccatttctcggaaatgaataaatgcagaatagacgcaaaaaccattaataaattggttaagtaagcatcgatttttttcttaatgataaagaataattcaaatcatttccatagttaaagatcgatttatttttatataatattaaataataaatatttttaatatcctttggttaaacattgatttaaaaatcagaataaaaggcaaagcaactactgtgaatgtagtattaatatcttcacaacttaaatttccatttattgtttttttttaattcttactttattattatctttaaaatattttattaattttattgcaaaaataataatcattaggcatttttggtgatccattttacgaattattcacttccgatcacccggaaacggacgcccatctgaaaagaaaagaaatcttttaaacaacaactcatcatttgttctatgcgctaccaattttaatgaaaatgctacaaaaatacgcaaattctaagattttaactaaaaataagatttttctaaaaaactagccaacgatattttttgtttttcacacagattttttgcatgcgtttattccaaaaagcttcttgggaacaggacgggtctgagggtaccgatgggcgatgccatggaagaagttgaaaactttgacatactttagctactgattttcatttgatttttttttgcggctattaaattactcaaaaaaatggaaatttagcattgaaggaagacaaaaagtttcagcacaggttatttacactttttccattgcatcattaaaagaatacactatatttatttattttttaaaaacataaatgtcaatcgcttatttgttagctgacggtgccagcggcgtcattcgctttgacctcaaagcacgcctcaaattagccaaatcatttttaatttttggcggatttccaaacatattttttgtgaaaattttaatctttagataagttttccaaatgattaggccaccactttgttggacaagccttttctttgtccatcattccttaattctgacaattttattcgtttttttcttattgttggcttttattgagcaaacaaatttatttaaatttccattcaccgtaaaactaaaataatgaaatccaaaaaatgtgatattatcgaaagctttaaatgagaattatttatctaggaactgtttaatattctgatttaagttgtcaaaatgaattacatattttattattttgctatattatcaatcttggccaatttatatttgaaaatagtaaatgcagctcctccaaaaaatgaaacaggtaattctgtaattaatttatttanattactgtaggtttnaaggtcattagggataggcaagatcaaagaaaacaaatcccataaagcaatt

SEQ ID NO: 13809 - DNA, 2176 bp, Heterodera glycines
ggatttggccaaaccatccatttttcgaatcccgaacccgaattcggacaaatttcttgactttttaatttttttatttcttgcggctagtattttctacaataatttgtcagtttggtcggatgtgcatcaaacggaaaaaataattaaaattttataaaaatataacaaaaaataacaaatttcagaacaaactaaggtcgcatttcatagtttcgggaaacaccagtgagaaaattgataatgttttcgggattcacattggcattggcataattgtgatcattttgagggaggtgaatgttattgatttcgttataacggtggacgagtcggagaatccgtgcgtcggcttcgcgatacttctttttcttttgtggagcggattctcccatgacacaacgtgaaatgtccgcgtcaattgccttctgctcacatctgatcgtgtcaatgaagcgccaaattgttggatgagtgcagctaaattgccgctgaagtttgcgatggaatgcctcggcgaagttgttggtacgatcagcaccatctaaggtgcgctgatgaacattccattcgtgcgggtggaacagaggcgccgccattggaacattgaaacgcattcggcccatgtagttgtccaaaaacctagaaaaataaaaaaatcataaaattcgccttcggacttaaccaattgaaaacgccgttaagttgtggtggaatttgtgctcgaagaacattaaggccattttgaaggtggtgcacaggcagaaaggccaatgaagtgatcatcttagacttctcggcgaaagcaggatcagtgttgtaagcctaaactactaagaaaaaaatttatcatctgaaaaattcaattgacatgtgtgaggccaaggattctgatctgcctcttcatgttgcggacaaggtgaaaaaaacagtagcggacactgcatgccggaagcactgtgcggaccgcaccgaccattgccaactcgaagtccatcgaaattgtctgcggcgcgaaattcggccatcgttccaaaagaagctgtaacatgcgcgtataaattgcggcacacttcgatgttaaaagacagtagcaaattggaaatacccaaccatctctcctaaaaagattgaacattgtgataacacaattaactttactttgccaacaacacataaatttggctgaaaagcggtggcgtcaatgaaaacgtgccgtccgcgtaaatgtcactcatctgatgggcccaatccgccgtagaaactcttccaaaaatgagaatccttaataccggttcaatgatcagcatttaatgtataaatgatgtctcaccgttgaggtccattttgtccttgaatttgaaaaacgccggtgtccgccaatagaaattgttcctcgtcaatttcagttcgcttgtaaatacgataggtatttggaatttccaactgctccaaattgagaggttcggtccgcggtgcattttcatcacggcgcaatcgtttgattacctaaaaaacaaaaaaataacaaaattgtttttggatataaacccacttttttgtggcgcttttgctcggaaaagctgctagcacaggtgtgcatgtgttttgcagcacttgagcacgaatagtcgcaggtgcctcgcacgtctcagcagcacgtcgcttgagtccagttacaagtcgctgacattccacatgcgcagcattcatgtcgctcgaatgaactccgaccaacttctgcacaacgttatttaaatccgtgtgcaaacgccctgaattttaaaagatttgcaaaattcaaaataatatattaacatacccttgcatttgtctgacgggccatgaaactcacatcgccaaaatttcttaagtccatctgcgctcaattggtcgaaaacatagagcgcgccgtcatgttccaacttaactttgtttcgttttgttttaatttgttgctgctggttcatattgtaataatttaaaaagtcttaataaatttatcaaattcacttaattataaaataaattaaaactcgaaagaaaataaaagtcgaacaaattttggtaaaatatagtgtgtgtctgtgtgtctgtgtgtgtgagttatgaattctcttttatatgcaaccacgcgaaaatggccacgcgaaaacggccacgcgaaaacgtcctg

SEQ ID NO: 13810 - DNA, 1382 bp, Heterodera glycines
aggaagaagcatttgccacaatgtccactttattgtgcttggcactcactttcatgccggtgtcttggccttgcgcatggaacgaaagttcgcccattgaaatgtcaatgagacagccgatctgaaagggaaggcaccgactgatcagacgtaattgtacaaatggtaattaatggatggccaaacggcggaatgcctttggcatttcatgcaaaaggcttttatcattgggctgattgcattcccactgatattcaatcacctgcagcccggacactttggtgttgctcacgtccgccaccgcattgagcagttccaccgcgttaagcatgtaacagttgcgatattcggtgctgaacagcaaaaatgttttgtttcccttttcatttttcttcttttggtcactcccaaaagtgccgaattaaaaaacactttgcccttcccccactaattgtgccatttttagacctttccgccgtgattccgtgctggtccaattccgcgtaccggcacttgcgcaccgatgcatttgcgtcgaataatttgtcataagcgtggaattggggcgtcacccaaccgacccaaacattggaaaggtcctggccagggaaaatccgcacgccgtagtaatactcgtcgatctgaaattgcaggaaatattggccccgccctttgttcggttgcttttccccattgttcccattttccatttccgatctgcctgtttcgtcacccccccccccctctttgtccatcagttccctcccttcccccgcccatttggcaccgccttccccttcgctttatcccttcctccgctgttgcctcctcctccttcgctttacctggtctcccatctcttgcatggcctgcacatcgtccagcaccggccccccctcctcccccgtgcccaatgaaagcctttggccaatgcctccgctgtcgctcatttgttgctgttccaactgctgcataaaagcgcttgagctcattggagcaagcactgattgagtgcgcgcaatttgggcggcggaaaggccggaattggccgattccaacgggtgacgcttctttgagctgataaaacgctttttgagaggcgacggaccgcgtttaatggtcggctgacggccggggccggaggagggcataacgggcactttaaacggcattttgggaagtgaaagtccgtcgggattgaccagtcccccggcgtaccctcaatgccttcgatttgtccctccgcccggctgatccctccgactgacgtcgagtcaaagcttctcattgctttcattgcgctaaaatccccatgaaagtcctccgtggtccgctgatgtcgtcgtccttcgtccctaatatattatgccaattgtctcatt

SEQ ID NO: 13811 - DNA, 2403 bp, Heterodera glycines
aagaaatagttactcacaagcagggattaattgttgaaattaattaattaaatgtaagtgcagcgcataaaggaaaaaattaattatctttttcaaagtgcgacgattagtgaattggtggagggacaaacgaaaacaaaacaatgaccgcaattaaatgatcaattagctggcaaatggacgacaaagcaacagaaagaaatgcacactttttatcacggacacacaaaagtaatgaacaaaaaaaagaacagaattcgtaaatgtgctcctatttattctttcgttcgttcgtttttctttttgcctgaaatggtcggcccaaaagttggcattgtccgattcaccggccgatagccacgcgagaatggaatcgttgaaagagcacaggccgaacttcatcagagtcagcactcgacggcgttggctaacacaaattttgatagcaaagaatggattttagcgaaggttaaacactgcagagaaggaaattagcaaaagcgaagggattggttagactggcggcggggtcaattagggggggggggggtaattaatgagtgtaattaacggtaaacataaaaatgccaaaagcgaattatcgagtgggggggcattattcagttggataggccattatttttaatggcttacgctaacgctgctgccgccccgtccggcatcagctcgtggcttgagtcgaaggacgacgttttgtgcgttcgttggtcgtcggccatcgaattgccaacggcggggaaaacggcgggggactgctgctgattgcgcatggacgacagaaaggtctttgatcttcgagactaaatgaatgaccaatgtgctggactttattctcacagagagaaacgaaaggggccaaaaaatgaggaaaaagagaggcattccttaggcagcctcccccgaaatgaggcacccctaatagaaacccattataaatgaggaatgctcctaaatgaggcacatccctaatggacacccctcaaaatgtggcacaattccatactcaaatcagcccccctcgccccggtcttcccaactttttccccgccctctgctgctaacgaaccctcggccgttcttcctccggctctttcccctttaaaattgaggacaaagatgcatttcggcgttgttggagttcctccatccgtgaacgcaatgcctccttctccctgaagtgatcaatcgattgaccaaccaattaatcactaattggttaagccatcaatgactaagcaattaatctctaatttgtcaatcaatcagtgagtgattaattgctttttagcctcgtatttcgctttctcaaattgcctttactcacttattcttcacaaacactctgttgcagttcaccggaagggacagccgaatgaattccatgcgcgtcttttcctgttgtccccccgtgccatcgttgctccccgtcttttggcacaattttaaacatggcggcatcgtcgccgttgccggcaatcgctgcacgtccaatttcgatcgttcatcgatttcctcgaagcgtggcaatcgtttggcgtaccaaaagggcatcgtgcggaacatgttcacgcaaaagggctcatagccctcctgaaggccgcacgtggtgaagaacttcagagagtttgagtcttggccaaaattgaatttgccgcgttggccggcggccaaagtcattgcggggacgtaactgaacagaaaaagacggattaagcataaaatgaataaataaaatgaaaagccaatccaaaagactgacttggcctaatcaatgaaaccacccacttaatgaccctgctattattggttttggccaattaattgcccacccattgattggttgcacattgtcaaaggccatttcactgccggaaggatccaacagaagctcgccgttcaacgagaaagagatggtccggtcgctcaagtccaaaaagcatcccaccacgtctcccacctgtccaatggatcagtgcgttcggatcagtctcgactttcacccggctaccttccattctcgaccgtaatgctccgacccctggtgccattttttcgacaaatgcccgtcaaatccgaagctgaattcgtccgaacccagatttgtgcccggcggtgccgacacgtccatccaaccgactttcatgaacccatcagtgagcaccttaagcattgtgccgttctcttttgtccgcaacacttgcctgctgttcacctcaaattcgtagtaccatttgccggccatcactttgtaagttgcctccgcgcgaagagtgcgcgtcaacgcccgcagcgacttcatctctttctctgccgctaaagtaacgaatgacttccatttttgtagtattaattgtccatttgctgtcattatgatactaatta

SEQ ID NO: 13812 - DNA, 2155 bp, Heterodera glycines
tgcttagtattagtcactcttttttgttgttgatcgttctgtctaaattgctccacctccgcttttcctctctatttaaacacgcacgtttttcgcttcaacacattcttttcatctgacatcttattatatttaccaaataaaacttcttttatttattcggtatttatccccccttattcaccccgccctctctccctcgcgccttcccatttttgcccccctttgccgcccgagtcaacacctttttttaaaaatacaccactaagaattggaaaattttttcaaaaattcttcccccaaattttttttcttgacaaaatttttgatttaaaaaatgtcaatatttgctaagagaattttataaaggaaatgcagctcatttgcaactgcaaccagtgaataaaaattattttttgctcaatttttggctaaaaattatgtcactattcatcactatttcggacttttttcactattttgtcacttttttggcactattttagttaactatttcgggatttttcgtcactaaaagtcgcgtccctagcagggctgcacgcaattacggattacggattgcggattacggaaattacggggttttgggagttacggattacgggttacggatttttgggatttttccgtaattttgatccgtaatttgacttttggattattttttcgagacgatttcttgtaagattatttttataaaaaacaaatttttctattttttatttaaagggctacccgtatttcgatttatttaagaattaaaatagatttataattttttatttgttgttgttaaggctatttgggtagttcgcctagaaaatagaggcatcacttttttgtcacacctatttttcacgcattttatgaaaattcataaaaccttagccaggtgaggggaggaattccccccttcccccgcccgaaatgaaaaattaaaaatttttacaggaaaaattgggacttttaaatttttttttgtcgatttttcttaataaaatcattaaaatttaaaaaatttgcccggcggcacctatcggcaccgccggaccacgatttactcgattttaccttatttttttaaattttgactacaaaatggcaaaaattagtctttttttggctaaaaatggttacaattcctgtttttgctgtccagcgctgaacttttttaaataacactaaataaattttaccaaaaaaaattcttcggattcccccccccccctccgtaatttttttctggctattaaaatgttgaaataattatatacataaatccgattataatgatcagactttcaaaaaattttcaaaaatcaacccataaattcaaaaagaatgatttaatcagacacaaaattataaattatttgtaaaatttaaataaaaaatgaagaaactccatcaagaaaatcagttttttgatttttattaatcactatttaaaaatttttttctaaaattctgacaaaaattgatttttaaaaattacggattacggattgcggattacgggaaattacggggtttttggacccccgtaattacggattacggagttccgtaactgagaaaatcgccgtaattacggattacggatttccgtaattgcaaatccagttgcgtgcagccctggtccctaggtattacctttttttgcacgaaagtttttaaaaatagaaaattgttcgtttactcttcaaattttgaaaatttggtacttatctagtttaggggacatttcgaagttcacataaatattcttaatgagtttaaataatcttttattgctgtttatatgattttaagatcactttatgtatttgaatttggttcgacccaaaaactcgaaatttgaaaaatttaaattttcgaatttttgttcgagtaatgtgtttaaaagttgaaccaatgactttagttggacaaaaattttttaaaagtttcagggggttttcggggtcactggtcacgagtccggtagccatttcgaccaatttcggacccagaaccggattcgaacaatttttgattttgcatatgctttatatatattatatatcaatcgattcctctaatttgtcagtagaaagtaattcatgatttgtgaaagacaaatttttttttggac

SEQ ID NO: 13813 - DNA, 2633 bp, Heterodera glycines
caaattatatggaaatccatattttttcctggattgtgggaggcctgaaacgcacgaaaaacatgttagcttgatcagaagcttctaggatggatttctagatccgtattttccatatttttccatatttcgcgatttatgtccatatttccatattttggcatgtttatccatattttatgtccatattttggcatttttccaaaaaatctctattagaacggccccagcagctaaattggcccttttgagcccaaaaaccggaaaatttttcaaaaaaatcattttttcgtcgaattttctcgagaatattgaataaatttaaattttctcaaaaatgcaagatgcccatgaggatagcatccatacaaattttcgaagttcacataaatattcttaatgagtttaaataatctttctgtttagatgattttaagatcactttatgtatttgaatttggttcgacccaaaaactcgaaatttgaaaaatttaaattttcgaatttttgttcgagtaatgtgtttaaaagttgaaccaatgactttagttggacaaaaatttttttaaagtttcagggggttttaggggtcactggtcacgagtccggtagccatttcgaccaatttcggacccagaaccggattcgaacaatttttgattttgcatatgctttatatatattatatatcaatcgattcctctaattgtcagttagaagttaaattcatgatttgtgaacagacaaatttttttttggacgacaacgtctcaacagacagacgaacccaaatgaaggcagcgaaccaaaaatggaagtgtgttgaaactacaaaatattcagccttttatacccttttgagactcataaagctatttttgcaaatttgtagtttttgcgggaaatgtatgtataaaagggcgtgcgtttttccttttgctgtcatttctcatccccattgtcttcctttccctctattttgcgctgcatattcatcgtcaaattgtgctgccgacattttctttgactcccaatggtgcatttttttgttcattttgtctgtgtattgtttttgtttgtttttcaattcgttttccccaattaattaagtctgatgatgttgctcttcccgctccttccggtgccgtcgatgactttgcgcagcgcatcagccaattcttcgacttcatccacggcggaaacatcgaccgattgcgtgcgctgatcgactcgctgagcgccgatgagctgaacaccttgctgcagatgaacgacccgcgcaacggacaacaatttgcactgctgatcgcaattatgaaaggacacacagaaattgctgcacttttggtgggcacaattttcgggaccaacaactcaacaataataaattttgcacatttttcagttggagaaaggcgcggacgtgcatcagaccaccgttcgccaagtgaaccatgtgaacatgggtgagaaatgcgttttgcggacccaattgttgctgatgcctaattcatccctttttcgccccattttcagccgttacgcccctgtgggttgctgtcaatatgcgccagttggagatgtgccgtgtgctgatcgctcatggtgccaacgtggacttgggaagtgacgcctccttgacgccgctactgctcgcatgtgacaaaggcagcacagaaatcggtgaatcaatcgtccggaataatttctcatcagcactttttcaccattttcagtcacccttctcgtggagaatggcgccgacgtcaatctcggggacagcgaaggaatgatgccgttaatggtcatttgccgtgccggaagggtgaaaaaaagcaaaacttggaaaaacttggcatttttcatttgttcagatcgaacttgcgcgcttcttactttctcacggtgcaaacgttgaacagatggataacagcggtgggtgcccgtttttaaataattattgcactaattaatatgtctttttcaatttcagggatgcgatttgctcttttgtacgccgcctctaagggccatttggaggtgtgccgtttactggtggaagaatgggcagctgacgtcaatcagcaagcgaccgacggcatcaccgctttgatgggcgcgtgcatccgcggacgcttggacattagtaagaagcaattggtacaaaagccgattcattctctctcccaattttcagccgtttttctcatcgaacatggcgcccacattgaccacgctgacatggacgggtacaacgcgttgatgtgggcagtgaagcaaaaaaagactgaagtggcgcgtcatttgctggcaatcggcgcgaacgcagaccaagtgggaattgacggtgggtgggcccaaaaagggcttaattgtgatgcttcaattgactgctctcccccgccccctttttaaggcaaaagagcgagggatttggcccgagaaagcagacgtgccgaattgattgacctttttcgcaccacagctaacaatgagcagcgggaggatggcaatgcgtaagaaaaaaaaggaatttctgttcaaaaattatttatgatttttcaggcagcaggacgagcaaccgcagcagcagaaagaaatgccatgtaattgagagggaatcgaatgcaaaa

SEQ ID NO: 13814 - DNA, 5895 bp, Heterodera glycines
  unsure (1)..(5895): unsure at all n locations
ttatggggtttaaataattaattaaaatttaaaaaacaaacaaattaatttagtaatagagataaaaaatgggaaaaagaaactgtttgaaaacaaaagaaagagaacagtgaaatatttaaagatcaatgacgtggacaaccccaaagagacaggtgcgaaaacggaaaattaagcaaatgtccaattaattaatttacataatttgaggtttttcttcattaaaaattgcagctccgttaattgccaataatcaaatgccaactcaatcaaagggaaagagttctttgttaaaacgttatttggagaacaaggaaaaatttccaagacgaactctgagaggacacgcgaaagatttgtgtgtgaaattgaaaacattgaaaaatgtgaggaataaattgaagaacaaaacgcactgtgagttaaaatatttgtcaaaaatcatttaattgtgctattaactgttttcactttcattaattagtcagggctcccattcgccaagaaattctaagtcgtcaagaaaaattgacctttttgctaaattcttcaaaatttctaggcagcatttgagtatcgcaggaaccaaaattttctgttttaataaatagatccaaaaatcctataataatcttttggccaaaatttcttagcaattgggcataaattttcaaaagtccggcggaacttgccggcaacgctctctgttcgcccttaaaacaaaaaaaaaagtgcggcaaaaatttaaaactctttgaaactaagaaaggttctaaatgcaaaatgtttgccacatatattttatganagcattacttcttctttaagcgactttttgagggtaaaaatgtttttattgggggccaaattcttagatttaaacccttttaatgcttatatatttttttaagaaacaacctttaattgttgcattattcagacacaaaagaagaaatttgcaaaaaagaggcatttgtgatagaggatttttgagagtgaaaaaggaatattttgaaaggaaaccgaatggcacaataaaaatagcggaccgagcaggtgccagaaaagtggggataaaagcggcaacgataaaacaatggataaaagagatggacaaaagagcagcagcagcagcagaagcagaaattgaaatgaaaagcgaaaatgataagcaaagtgaaaatggaaatgaggaaaatgaaatgatggacgataagtaaggacgaattaaataaatctttattattattacatttaaaaatataataattaataattattctaggaaaatgatgagcaaacgctaaaagaaaaggaaaagaatttgcgtaaataattaaggcgatatttattatttacttttttcactattttttgctgtcctggtgataatgtttcaagaatcttatctaggaaatttgttgtgtttttgagtgaacaataaatgtttgtatagaaaaagtgaaaacgatatatattttgacaaaaattatcatttaattcattattacttaaattataaatttcgtttatacaaattatatttaaatattaattcatatgtacagtaaattatatagaaaaaagaatttaaaactactgtcgaaaccaatcactgtcaaaatcaactactgtcgaaaacacctggtacgttaataaatgacccaaaaatttcagaaaatacaccccaagaattgaaaagaaaattccaaatatgattccctaaaatatttttttcttcataaaaatttgtccttattcaaaaaaacttttaaaatatttaataatttcatttacaattaaaatataacaaaaattaagatttttggaaaagaaatattgtacatcgtattacaaggaaattgggggttttttattagtgattttctgcctcaaaaactaaattttgaaaaagagcaataaatcacttactgttttattcaattcatcaaaaatacacatacgttagagagaactacgtaatataagcagtagagaccggaattttgaaattgccgggaccgggagcgggacttggaaaatggacccgtacgggacccccgggactcccggtcccggtggtttgcccaaaaaacccgggaccgggggtcccggaaaaatcccggcggggccccggtcccgtccggtctctaataagcacagtaacaaattgtacaaaatgatagattttttacgaaaaaataaaattcaaagaaatctctcagtcatgtgaacgatttgtttcgcaccacttggattgcttcaagccgtggtggtggcttgcgctgcattccgctgatcggccgatttacgcccaccgcgggcgaagcatcgctggtgccggcctttgaagtcccatttctttgatgattactcggcattttggactgttttgtgccattttgttgttgccaattctcttaaaaataaatgcatttttgggcgaaatgcaaatttaaaagaatttacatttttaatattttaatctttaaattttacataaataatttggcttatagcttaggtttcaagaaattaatcgtccattgacggtgagcaaaataagccgatttaataaaaaattataaaatattaaaataatatgtaaaaattatgacttttttgcaattaaagccttaattttttatgagtaggaaacaatctgttcctcttactaatttagcaaatgctttactatatttatttttttaccatttccgtagagtgcgtctgtgtaaacaactcccgacgcaaattgattccgctttttgaattcggcaactttcttcgcttctaaaatgctcgacaaaatattaaaatattttttatcggtgttgtgctctcttgcacatttttctttgttttaaaatttcttattaaaaaaaattagctttttattcaaaatgtaaaagttcagaaagatctataataatgggcgatattttatgaaacttattaaaaattgggattttacaaattttcgaaaactgtaaaaacagttgctaaaagaccaaatagatctccttattaatagtaattgatatttttattgcaattccttccacctaacatccggtgcttctccgggtcgtatttgtccaaaatgttttgtcggctgattggcttaaagtacctttgcacaaagtcattgtccatgctttcattcaatcgctaaatttaaagaaaaaatatttttcaaatttcttggttattttgtcaattttaccttctttagcctcgattcctcctcctctggttcgttctgaagttcactcttttccatttgtccatttttcagcccattttttgcattttgtgacactaaaataaaattttaattattttatgctccaaataattaatggcaaagaatgctgatatattgtgatgataagaaattgccgagattcaaaaccaaagtctaaatcccgagagtttcccgggctaagactcttgagaagaagcacaaagtcagccacccgcacccttttcgctgtgccaatgctttttcttccgttgttgtgccctcttccgtcccacctgcgcttgcgctcggcagcgcttggcgaaacgtcagctcgggcagtgtccattgctccgcctcgatgttccacgccgcttcgcgcttcacccgctcaatgttcgcgtagttgctgtccttgtgaatggcgggctgaattctctccaaaatctgatggaacagtttcagctgctggtcctgcttgcgaatggtctccaagtagtccagtctgttcagctcgaactcgctggataggtcgtgcatgtcgctttccaacgcttgcacctttttgagaaaggtaattaaccattttttgtataaggtacaaaataaatatcccgcctcctcctgaacttattttctcaaaaaccattcttgaaatctttgctactccttttttcattaaatgttttatggggcatctttagacgaaatttaggagtcctccgctattttgcttttgaataaatgttcataattttccatgtttattagtgtcttttcgtccgtttggcccaccttctgcttctcctggttgtattgctgcaccaatgcgtccagcttctcctgcgtggacgtgtacacgtgcagcaatgggtcctccttgtccttgtacatttcgagcgcttcttaataataattatcaaacaatacagaggaaatcattacaacttaattattgaaagtttaatcatcaaagctgggatttttatgtaaatattgtgtttgggaacaaaacttgggacttttatttgcatatttttggcttttctacatacatatgcgtacatatcttcataaaatttcgcattttttgtaaatattaatttatttttacatattttctaaagaattttttgtccaaaaattataaataaaatgtttttgtaattttttctatgataaaaatcccggctttattaattattatttggtaattgacggcagaatgacgacttttggcactatatatcaaattctttttaaatcccatccattttccaatattcttccacattttcacctgccagccgcttcatctttttctccgcttctttgattttccgtgccctcttttgtttcagcgcttcgttgcccgcttgttctccccccaccatttgctgctgtaattgttcaatgcggcgctttgcgctctccgcactttcctccgattgtttggcctgctcaatttcgttgttggccttttcgtactgttcacgcaatctgtgaaaaataccgttttaaattcactctccatgccattttcaacaaattaataaataattaatcataatttgacccctccctaaatatgggaaaagattctcgcggtttttgaaattgaaattcgtatgaacaaaattggtttgtgtaggtgagcaatttgtgccgtttcttatgttaatttgtctacattattttattattctctttgaaattaaaattaatggctaattaatattttaatgattttttttattttgcatttccaaatataattaaatcgttaaacttggccaagtcgctctgcagtttctccttgtttttctgttctcgctcgtagctcgtcttcagttccttcattgctagttcaaattcgacccgcaatttctgcttttcctgctcaaactcggacagtgcctgatgatgcacgtccgggtgaattccaactgaaccaagtgacgttaattaaatattattttttgaaaatatacatagaaatgaaattttaaggaaaaaattaataaataaaaaaaaagtatgcagaattaaaaaacttaattgccttttcgcacgatgagcgtgcaatttaacagtactgatttctgcatgcaaaaattaatgcttaaattaacagcaggagagaaaacccattgctacggtgttggaacttcgacagggcttctataggatagacaaatttcaattattgccgaggaacaccgtgacaataattcccgtaaaagggcatttaaacgctggcaaatcccggtatttcccaaatctcgatttttaatgatattgaaaatcattgaatttttggcctggtgctacctggtgctgttgttgaaactgctgctggctgttggacgagctgtttgagccgttcaatttcggcctggtactctctgagcagtgcgtccttgggatcctcgttgatgtgcggcttgttcttgatgttcttggcccggttcgcgtaccgaagcgtggacaatgtctcgtcataattgttgtcggacggagagacgcaggcaatctgttttcggcggttaaattacgagtcgaattaatttttaaattgcctttctaaattttatttattttaaatcagaataccttttctatttaaaagttacttttttattatcaaatat

SEQ ID NO: 13815 - DNA, 1428 bp, Heterodera glycines
ttaacaattcatccttaatgagataactctgtgttaattgcctataaaaaaaatttttttctaatatattatataaacataatcgcttgaattttgtgttttttaaataaatcaaaaataaattctgaattgtgaattgtttttttttaatatttttattaacaatacaaatgaaaaactgtcaaattgatcgttaatccaataattaaataactatttcaaataatttaaaataaaaatttaaaaaagctctccttacgataatggcatccacccacccatctcagcagcgttcgtatcatccgtaaaaatatgtgtgccgtcgttgacggcacatttgttcccaaggtccgtgtcaaacaaagcaaaaagcagggccgagggggtggtgggcggggggggggggacaacggcgacaatgatgccgctttgacgggacccacttccgtacatataagccatgccctactcctctttcaactccttttggccgatggaataataaaattggagtgccaccaccaccaccaccagcagcagctagctcctcgtggtgaaaaagacttttctttggtgccaatgttgggcttggttggtgcccaaaggggggttaggcaacaaaaattaataattcgtcccctccggcggggggcgaagggggtgagaaaattgttctcgttgcccttcgcccccgggggcgacaagggcgaggggggaaacaagcacaggtggttcgaaggtgagccatgatgcctaagcaggtgttgacgtggctgacaaatggcaaccaagaaaattctggcatttaatgtttataataaagttttcttgaaaataaatgtttttaaaaattttttatgaatttttcggaagggaggggaaatgccagtttttaagcaatgcgcacgccactattactagactaaaaagcctgtggcccgaggcacatttaccaggtaatattctgtcatacaaatagaacaagcaaaaaaaaactatcatgattaaatgtaataataataataagcatgcttttacttagctaggaatgcagaagtgtaaggaatgccgaaatttaaggtaaggtgctcgagagcgtgcctgagagaaaattagaatattctaaagaaacatttctggaattttactttcataaagaaaagttgcttgaaaaatattattcaaaaataacaaatttttgagaatttcacaaaattacatttcatagaaatttacgatcgtctaaattttaaatagtgaatcagtctcacaatttacgtaattattgcaaaaagtgaattgtgttagtaattaatggctttgtactatcattcgccatcatttgttgacatttacgaagcaaaagaacgcaaattaaataagaatgacttgttaagccgttaattaccgttgctttttgtgacagtt

SEQ ID NO: 13816 - DNA, 2550 bp, Heterodera glycines
tttaagtttttttatgcaaataccaaacttagttcatcttcctatgatcagttaaaaagggagatcattaaaataagaacattaagattataaattacaaagtgaagcataaaaaagcagttcaatgatcgatcataaatgttttggtctttcaattcaagcaaatgctttttattgatcactcttcgtctaatcattcaacgaccttaatgagcgaaaatctttttaaattgattaatttaataaataaaccaatctttaatatttttagagtcgggattttgaaaaaccgagtcaggtgggctatgtatgaaaaataaaaagggtctggttttcaatttttgtgacaattcaatgattgttattaattcttttttagttttctggggcgtccgaaaatggccatttatgtgtccatatttcaaaaactgtctttattttattttctagtgctgaaagtacttttttgtaaattttgtcaatttctcgaaaaaagttaattttataaaaaaaattttgatggtttttttaaattttgtgagcctttagccaccctaaaatttttttcctgactaaaaatctgcaaaactttgtcatatttcattttaaaaaactttgtaactcacccaacatctcgatctccgtagagggccacgttgatcatcccattttggtggtcctcccagccgcatttcaacaccacccgatcggaatcgcacgcactctccgcccgtcccattgggccacgctcaaacagccacaaatcctcgaaaaagcggcgcaataccaacacttcacgggtccaacggttttccagctcaaacggctcaatgtccaccagagtggcctccaaacggataatgtaactgatcggagaagagcgattgttgaggaatgcctataataataagtgaattcaggcacttgaatcaattactaattaatgcagtggatttattttttgaactattaaaatagtttaaataagtgatcacgattatgaatttgaccaatttcgaaatccaaaataaaagcagtaatttaaatttttcgaatatcgacttttgttccgaattctgggttgtggttgtcatttttttgttgtttaaatatgcattataatgtatcttctttaggcatttaggccttaaaaatacatttaaaaatatataaaattttgattaaaatttgttaaaacgcagtaaaaagccacaaaaagccatggttgtgccgattccgttatttttctaaatatgcctgacgacttcaaaagctaaaataagaagcggggaggaaatttcccgacaaaatttgtcgggaatggctgaataaaatgtaggggagcaagtccctcatcgagtaggaaatttttagaaaatatcaaatctaaaacaaaaaaaggtaagtaactcatttaaagaaattctcatccgatttggagtgcgacagacgaaattcacaattccccgcatcggaccggggcccaaccttatctaatacacctggcacttatgtgtcatatcaagaaaatcaattttggatcaaattggttcaaatgaggcgacctccttgagtggagccaagtcagccggggttacatgacccctttcgatatatttgagcagtttaggctgcccgtcctcgcgccccttgtgcaaccattggtacaatgcacggcacggccacaagggttcatcttcatccatctcgaccggctggtactgatcaacagccatgtgttcctgatcctcatgaccatcatcatcatttgcaattacgcccaatccattaatccaattttcggcaccaaatgcgccgccggaattgttgccgccaaaattggccataatgccaatgaattgctgatcaatttcctccgccaattcgtcgtcattattgtcttcaatcacataaatgtgttcaccaccacctccatcaccgtccatcatctcaatgtcgctgtcaaattcatccatgatttcgccgagataaggcaatctgtgaaattcgatgccgcgcaggttggcacagtcacgcaacactgtggttgaggtgacaaattgtagtccattaagttgctgattgttcagtgtcacgaaactgcaaaaagcgaaatgttgaaaaaaaagaatttccagaaaatgccactttccataaataatttttactctccccctaaatttcttttgaaattatgagaagtgcatgatgggcatttttcgaaaaattcagtattagaacggccctccaaataaaagccgccgggtgataaagtctgaaaaattaaaaaaatgcttttgggggatttctctagaaatcaataaaaaatataattttatatgagccaaaaataagtcaatctaactttattttgtatttttgaaagtgctacaaatttggcctaatcagcctgatttattagttaatcaatcataaatctgagcacctgatcgactggcccagcataggccaaatcactttcaaagcgtgccacccgcgtattctgctgaaattaaagagagttgataaaaatttacaatatacatattt

SEQ ID NO: 13817 - DNA, 2000 bp, Heterodera glycines
  unsure (1)..(2000): unsure at all n locations
gatggcagatagtacacacacaagtcaatcaatgaatgaattgtcaatttagcaattaattgatatgaatttcaaaaaataagcagcatgtggtgcattttatcggacaattttatttatatttgtcttgtaaggttttttttgttaattactcagtcaatttgtcgagattgcctttttgggtgcaaaagaggtaatttataagaatggaaataaagaagatgaaaagtggagggtgatggacgaaaagagagaaggaagaggacgaaaatagatgatgagagagagagtgggatagagaaagagggagagagaaagagcgatggaggttagagttgttgggcatggaaggaattgctcgcatctgactaatgatttgtgagcggcctgacaaaggaggggtcggcaagtgaccgtgggatttccaaatgaaatttggtgggtgggtaaatcacccctagtttctattatgaaattttaaccatttttgccaaatgagcatgagtgccgagatatgacgtgccaaagtttttacgcttttttaattagaaaagatataattcttttcggccaagaaagaagccattggtgtagaggtagtaggttagtcaaatcttttttatgtcacaggttcgaatcccatgcatgtatatattattttataatttttatttttaattttcatgcaaagttaactatctaaaaatttttagtaaaaacattttttattttaaatttttttccattagaaatcaaaaaattactacattaaacataaaggtgcaataaatatcctgtcgtattttttaaatattttattatcttatgtacatatcaaaatgaaagtaaaattaaaaatattttttattatcatatgtaccaaaataaaaagtaaaattaaaaataaagtctttttataaaactaatcttttgagaattgacttttcataaaaagcaaaaataaaaatttaaaaaaaaaaattgcatatagcggattctaacctggtgcgactgttactaacgcataacctctacaccatttgacaatgcgaatggttgcaaataattatttaatttgtttgttcattaaaaaagtttggcacgtcatatctcggcactcatgctcatttggcaaaaatggttaaaatttcacaatagaaactaggggtgatttacccacccaccaaatttcatttggaaatcccacggtcacttgccgacccctcctttgtaagaaataatattaactgtaaattcagtttcaaatcatgctgtatcaaaatctaagaaaaattgtgccatcagcagattctcaaccgttatcctccttcattcatgatttattacgacggaagttattaagctgcactcatcccgaatttccatacaaacaacagggtgtataatacattattgtgttctttaaacctttcatttttaaataccttacagatataactgcatattcttcgacattgccaaacgtgctttacgcgggtgttgatccaacagctgacagccttcaccttgggaatctcctcgtgctcaattccctgattagagcttccttttttggttgttctcctattttattaattggaaaagcaacagcttccgtcggagatccgagcgggcacaaaagaggtgccagacaaaacatctaatgaattattgataattttaattagacaggaaattgttattacatgaatttatctatgcgaattcaaaggcgttgcaaatacaggtggagaaaataaaggcgaatgtttcatcattgtatggggaagacatttctctcgaaattcgaaataatgcagaatggtataaagaggtgagtttggctcgtgggtctcttaattttcagctttttattagatgcggattttggactttttcgaatcacaaaaagatttcgcatgagtgacatgctgaagagtgngccgatcaagtctcgtttagacgactgtgaaacattgtcctacgctgaattttcctac

SEQ ID NO: 13818 - DNA, 914 bp, Heterodera glycines
acttcgaatgactcacttcaattaatgttatgctagatagtctcggggtcaatgctttctcgtccgggtcccaactcgatactttctttggctgttgcaatccgaaacgcaacattttttgtcccgaatcctaattgaattttttggccgtcctaacccgaaaccgaacaatttttatagtcccgaattccaccgaaattttcttttggccgccccaacactaatacagatatccgaacaactcgaacctacgaaaagttccaagttgtgtttgacatcattccatttttatcaataaataaaaaaaccttttaagttatccatatttattcatgtcaaataattcgaaataattcgtttttattgtaaatggcaaaaaatgttatacatatttatgaacaaataatcattttagtcacaattatatgtgccaaatttgtcatccaatgaatggtactgttttggtaatatcatgtacattcacctcttcgacacggtctttgactttttgaagtcgaactgcacgctttccaatccgtcatcttccagaaaacagacctattgttcatttagggatgattattattctttaaatttatttttaattacaatagctctgcggcaaggtgtgcaagtgtcaagtcgcactgcgccccacgcccatagaagctgccgaagaaggtgacctccgcgactaatgaaccttgtttaattatttattaatagggttataaattatatggaacatattttttctgcgcatatgctatgaagaaaggggtctaaaaatagcttctacgttaaaaattttttgatttgctgaaagtttttgtccatataaatccatatttcgggcgttttcgggaataaatccatatttcgacatttttgcatttctagtccatatttcggcc

SEQ ID NO: 13819 - DNA, 937 bp, Heterodera glycines
atgcgattttttgtttaatttgcggttcagaaattaatattcatttttgaacaaaagaaaaaaaagaaaaaattgaaccaatgcaacgaaagaaattagtgaattgtcatagaaacaaagaagaatgtttcttacatatcagaatctgtgtataaaaatgaaagctttgaaaaggaattttatttttcaaccgaaacttttaaaatttgccattttaattctttggataaatcttcccatttattcgcttttgaaatggataatgctgacaataatatttgcgactatttgaacatcagcacgacaacaaaaagtgatgttggtaatttgaccggaaaatttgccattttggacgcatcgaaaaatttgacagtttttgaatggcttttcagttcaatgattcatcaattaattgtcgcaaaatgcgcgtatcagttcaaagtggcacaagttgcggtaaaaaattattttatttcttaattttaaatttggcaatttaagtccgattggtaccataacactgtgctcatgttctttgacaagttgaattgcatttcgcctgttctcccttggattgtcttcccaaatattttcactccgatttcgattctgttcaatttgtctctcatttgggtcacatgcacaaaaatgtgaattaaattcataattttaaatttaatttaattttgctccaggactgatcacaaagtgtgcaattggctgatcgcctttgattcgctgtgccaactttttgtggtggcgccgttcggcgtcaatttgcttggcgtcattttccaatacagtaccattgactaccgttgctgcctggccacccttatggcagctaccgtagcatcgtacgcctcaatcatggcaatgtatctgatctcactcgaacgcctgttgatcataatgtacccaatcaagtgagttcctc

SEQ ID NO: 13820 - DNA, 1527 bp, Heterodera glycines
catccttttgttgtgcaccttaaattatgcagcaattttcggccttattttatggcgtcatcaaacaaacaaaggatcaactcagactcaacaatcaggccgcaaaatgtcctaattattcatttaaaattcaaattttaatttccacattttagcggcttctgatcgttcaatgcgcaaaatgttgcgctcggtgtttctgctgcttttggttttgctgatcggctggctgatcagttcggctgctcgcaatttgatcaccgtatttttcagagatagcatcactctgatcataaacagcctcttttctgatacggacactcagaaccgtcttattaccgatatcacttcgtgggtgatcggtattatcacttgtcttccaattttggcgtccgccagtggcgcgcccattcttttgctgaacaggcaaaaatgaaataaaaatgggcgaatttatttaaattatttttcagtaacgattatcggactgcgtacaaaaaagcgatgggccgaagaaacaattcgccgggagttgggccgctttttagcagcaaaattgttatgatttccaatgtgaaggaaggcaaagtgaaatagcgcagaacttttctgatttatttttatttaaactaagaacttttcaatctgtcccattatttaatttttacatcaattattcttagtttggcaaaatgagttttaacaatgatcattttcattcatttggattggataggaaggagtatcataagtagggcgtataattatggaaatccatatttttttcctggactgtggtgatcctgaaacgcacgaaaacatatttttagcttggtttgaagctttctatacccatatttttcataattttcaatattttgcgatttatgtccatatttatccatattttggcatttaagtccatattttatgtccatattttggcatttttccaaaaaccctctattagaacggccccttcagataacttggcctttttgaccccaaagaccggaaaattttccaaaaaataaataaatcatttttagcataattttctcgaaaattaaattaatttaatatgttcttattaattaatttagtttctctaattaaattaattgcaataacttattattattaaaataaaattaaaaaaacaaaaaccgtttaatgcagggctcgcagatctgaggctttagcctcattttgtagttttttgataggtcaatgaggctaaattttcaaaatgaggctttgaggctttttgtggttttttgagaaaaaccgcaaaataatgaattttttaaatgaaaatagggtcaaaattcttaatttttcccccggcggcgcctgtcggcaccgccggaccataaaaatttgctcaaaatcacaaaatttggtcatttttgtggacaaatctgttaacaaatcgcattaaaaattacaaaatttttcccggcgccgccggcctccaccttgttcccaaaagttttggaaaaagcgctgaaaaaaaaatcaatttcg

SEQ ID NO: 13821 - DNA, 3364 bp, Heterodera glycines
attggtgcagcaccaattgacggcgggggaatgcgcgtcgaacaaatggatacgaaaaatggtaaagaaattgacaacagtgggtacagagaatgccaatggaaaacggatgaaagaggacaaagaaaaagagagggaaaaagagcgaatggacgaggaacagagaggggaggacagagaagcagagggagggaaagagcggtgccaattctcggaacggtggctgaacaatttcaaaaggcggtatggtattcaaacaacgatggagggtactgtaaatgcggaaggagacgaagagacggaagacgacgaggcggagagagaacggcggggcggagacacaattttagtggaaggtacggaagagaaaaacagcgaaaatgagggaaagggaaaaggcgcccagtgatcacaacagtactgatcagaagcatacatgcacaaggggtgtctcagcccaagggccatacgacagacgattgggacagggggggaggtgtctcgggaccgattttccatacgaaggtccaaatttttctccggcgtcgacaccttttttttttttgctattcaaagtaccttttttgcgacgcgttttttccaaaaaaaaacttttaggaagggggtggggcgggcgggccgatagccgccgggaaaatttttgaattttgacaccccttgtacatgtatgcagctcatccctccccccgaatcagttctacctcccaaattttttaaaaaactaaaaaaaaatgatgaaaatcacaagaaaaaaagtgaaaaaaatttcaacaattttttgaaaaaaaactttttgttagcaattcatcacaaattttgcaaaaaaaaattgctatagaaaaaatttttcgaatttttttcttgtaaattttctcataaaaaaatttctggggggggggaaggcgtagtgcaccttcctcgaaaacaagttacaaagaaatgaattggtttcgtattctaaaccggaaaatcatggacagtttgtactgtactgtaccgtacatattggctggcatcgtagccccaggagaggaacagaacgcccgtgttgtacttctcccagtggctggcaatgaacacgagttggaccgcgatcagaacggagagcaaagtgagcggctcaacactgtggggaaaaatatagcatttttatacttagaaatgttgcagttatcaaaggcgtaggcagggggaggggctgagggggcttaagcctcctcccgaaatgaaaaatttaaatgaaaatgggaaactcctgaaaagcattttttaaattttacccaaaatcggcaatttttgaaaaaaccttaaaaagggcaaaattctaaaaaattttctggtggccttaccactctagaattaaaaaaaaaattattggaaatctggctaagaattttttttctatttcgtatcaaaacattccgttaacgatttcttgacagaaaaactctgggagaaaatgtttttgtgtttccaagttcatttaagatgcaaccatttttacttttcgaacttattgttaaaaatttttagggaaagaaattttctgattttttaaatcttttagatatttacaatttttttcctcgagattttcttataaaaagggcttgaatttttttttttttagtaccgtcggtcggcaatcagctaattagttgttacctgaattggccccgtccaaaaagtgagaaaatggtgatcgtaaatgggacggttgaccatgaatctgtggcgaggagagaccgaaaagtgcggggaacgcgttaaaaacaattggcaaaatgcgttttgttagcagacaaacgctcaccgaatccgtggtcaactcgaaatgttgggaaggcaaaaattaggtaaatctcagagaattaaataaatttatttagaaaatttcgtaaaaattccaggattttacgaaactccggtgaaaatcaattggatttttaagaaaaaatagatatttgtaaaaaaaagtgtcgggttaagccgccagagatttctgatctcgtggaatttcaaaaccgggccccctagccccatctgataccaatttggctttttcgagccgaatttttggcctcaatagcccggaaagtaattttaagtgccccgccggtctttggcattctataaatctctggcaaccacccaattttgtttcaggaagggcagcaattttaataaaaattcatggaatgaaaaattggggttcaatcctgggccgaaccggccacaatttaccaagccttgaaaaattcaatgagggaaaaataaaaccaaaaaaaaaaaaaaattaaaaaaattcgccttgagaccggaattttgacaattctggatgccccggacaggattttgaaattaaaacctgatttttgcgggaccccgatccgtttcatcatttaaaaacccgcccggattccggggttcgggatcttgtaacctgaccgggtaccgaccccgtccaccacagcacggcgtacttacatagttccccggtcggtccactggcacccacccgtcgtgcctgcttcccgtccgtgccgtccaacaagtgggccaagaaagtgccaaccccgcacaccagccacacccagcgcgggatgttcagctcggccggcccggtggccgaattggcgctcagcccggggtcaaagcacaccacgagcccatagcaacacatcacaatcagtgcaccggcaaatgtcagcacattgggggccaaccaacgggggtaaaactgaaaaaaaaaaaatttttttgaaaaattttgcaaattttgggcgcactgaaccgaccaaattaattggttttttcaaaattggactaaagcaccaaaattcggtcatgtaggcccttaggtctgttaattatttacggtagaaccggttttggtaatactgcggagcccccccccccccgtttttgttaaaagttgctttaaaagtcgtgaaaacatgtttatggttgttttcggggtcgctggtcatgaatctgatattcattttggcttattccaaattcccagacccgaattcgaacaaaaaatgccagaaattcaatttttaaaaattcgtgattcggaaagggcaaaaataaatgtcaaatccgtgaggcgctccaaaaatccccctaaacatgctttcacattttacaacaccctaaaaaaatttctaccaaaaaggagggaggggcaacggcagttttttttttgaaaatctttaaatttttgaaattaaggcctatctttaagcaaagaatgcatttttaaaccaattaaaattcgaatgaatttatcattcataagggtgagattattaagaataaacctcaaaaaccaact

SEQ ID NO: 13822 - DNA, 648 bp, Heterodera glycines
aaagttaaaaaattttcaaaattttttttattttataagaaaatcccaagaaaacaaaacatggacaaggggctggggtgagaaatttgcttttactaaatatgaaattggcatccccttgtccatctattgaaaaaaatgtttgaaaaatgcggagaaacacggattaagccatggttgaagcaaaatgccgttacgtcaaatgctccctccccctcccatttgtcttgtcagtatttcatcgtcgaagtgaacgcgcggctgtcccgctcctccgcgttggccagcaaagccaccggctacccacaggattacatcataggtcaatctcgggtgaattcctactttgattcactatagtgagctgcgataaaatattacgacatctttttttttgattatataaaactatttactttaccaacaaaaaataaaactaattttgaaatgatttaacattctgtgattatttaccagaaagccattgcacaacatatcaatcttggacacgtctcctcttggaaaaaatttaactgagctatttattaaaacaaatgtgcttatacaattctgataactctggtaaacaccagaatatttatgaaaattctggtaaacgccagaatggatctgaaattctggtaagcg

SEQ ID NO: 13823 - DNA, 3162 bp, Heterodera glycines
agtgtcatgtgctcgctcgggcgtttatcgcatcggatcatcggttcgagaaatttttttttaacttttttgaagataaacaagccatttaattgtgtggcatagttttaacaaaaaaaatggattttgacccagatacaagccgagacagcctacaatcaggccttaaattacataaaaattgaaataatttttttttttactaaaaatgtatttcaaatttgatacaaaccgagacagcttgggcctttaaacaaaactttgcttcattttttgaaattttaaatattaaagccatacagataaaaaaaagtcagtaatgggtgccaattatcctttaatgacactcaaaaatttccttttttgaaaaaaatttaaaaaaaaatattttttcgaggatttcaacttctaggtggagtttgatgcttgcgctgtcggttgtgtgcaggagttgaagcggttgggcttcaaaaccgtgatgatcaattgcaacccggagacggtgtccaccgactacgatatgtgtgacagactgtactttgaagtagggctgaggggggggggagggtgaaaaatcattccaaaattctaaaaaaaaaaattttccaggaaatttcgctcgaggttgtgtccggcatttacgaaaatgagcatcccaacggcatcattttggcattcggtggccaagcggccaacaacattgcgctgtcgcttcagttggcatcgccaaatctgacggtgccaatcaaagtgttcggcacaccgcccaaatttgtggacgaggcggaagaccgcttccagttcagtcgggcacttgacgagctggacatttcgcaggtgaatcatggcaatttaaaatagtcaaaatggtctaatatcagtgacatttctcgctttaactattcataattaagcccaaatggaaaaatgccaaatcggtggaggaagcggtcggccaatgcgctgccgaagtgggcggctatccgtgcctgattcggccttcctacgtgttgagcggagccgcgatgaaagtatgggtttgaaacgaaagaaaaaatggtcattggccacgagtcgagaaacatggcgggtcacattcggaacgagaaaattggcggattgtcgcgattcgttcaaaatggcaaaaaaagggaggtcacattgggcaacctagaaaaatgatgggtcgggattgtagggcggccaaacattttttgtttttaaaggtagcgcacaatgaggaggacttgagcaattttctctctgaagctgcgttggtggcacgtgacaagccggtcagtcgattaatatggcaaaatagaattaaaaatttttttttaaatttcatttatgtcggggacctttcttttttttaattttcaagaaattaatattttttgcgcttctgtttcgtttaggtggttgtgtccaaattcattgaaaatgccaaagaaattgatgtcgatgcggtggcaattgggggccgtgtgttggtcagtgccatctctgaacatgttgagaatgcgggtcggtggtcggcacatttttgaaaaaaacacctaattcaagcaaattttctaattggtttttaaaggcattcattcgggtgatgccacactgataacaccgccccaagacctgaacgccttcaccactcgaaaaattcacgaaattattcgtcacattgcgcgacgtttcaacgtcaccggaccgttcaatttgcaactgatcgcaaaggatgacaatttgttcgtcattgaatgcaatttgcggtgagcagtcatgatgaatgaatgagttgggtcaataacaaacaactcgtactttttgagaaatttttgcaaaacccgaaaaaattttcttgaaaaaggtacggggttgttcatgacacttcaaacttcagaaaaaaaattttatggatttttttttttaaatttattgacaaaataacccatccacccttcaaatttgtctgaaaaaattacattttatcaactaccaccataaaaatatcaaaaattccttactttatgattgcatgctcatggtttcagagtgtcacgcagtttcccgttcatctccaaaacgttggacatcgattttgtggcgttggcaactcgggcaatgatgtggacgcaagagccaaccaaattcatccaatccttcacccgtcctgaacagtccaacaacaaagtgggagtcaaagtgggtatttttttttgccaagttttttttttatgttttattttccatggttccaaatttatttttttaggtcccccaattttcattttctcgtctcaccggtgctgatgttgttatgggggtggaaatgctgtccaccggttggaacttttaatattattattttcaaattaatgaggccaagttttaattcaattttaggcgaggttgcttgtttcggccgcacacggagagaggtccaaaaattttatattttgggtttggtcatgcccccccctcctcatctgaatttttttctaaaattttttccaatgataattttaaacaatacgaaactcgctttaccgaatcccctaacatttgtttgcgtgaaacaacaaatcaaaattatagaattacatctaattttagcgcctaaattatgctagaaaaaaaacctagaaattttcaatgggaagcggagggtgggtgtaacgactttgaaacaccaaaatttttagtttttttaaatacaatgtatatattttttccccatttaaggcctatctgaaggcactcctatccaccgggttccaattgccaaaacgggtcatttttctctccattggctacaaacaacgggccgaaatgttggagagtgtgcgcatgttggaccgacttggcttcacactgtacggcagcaaaggcaccgccgattattacgcctccgaaaacaacattcgagtgaggggggggggtggaaatttttaaaaaatgtaaaatttttccccatttcttaaagattaagaatttggaatggccatttgaggagaaggacaattaccatgtgtacggtgccaaaatgaatacggtggacgaatttgtggagaagaaaatcatcgatttcatgatgggctgactggggcttgttatttataaaaaatttcaaaaatgattaaatcatttatgtgtagatca

SEQ ID NO: 13824 - DNA, 1705 bp, Heterodera glycines
taaaaataactaaaaaataccgtacacaattaaaccccccccggccctgaatcataaattattcgtgatgtaggttctttatcgacaacaaactcaaattcaacgaacatgtttcaataattctccaaaaagcttatctcaaaagcagaattctttttaaaaaaattaaaaccaagtcaaccaagacttggattacagtttataaaagttatattcgaccccttttagaatacgcaaccgaaatttggaatcctcgaaccaaaaaagaaataaaccgcctggaaaaatttcagaaaaactttacaaaaaatgttttcagaaaatgctgtctcccctacatctcataacagcgaaaggctaaaatttctaaaactttccaagcttgaaaccaggagaaaatagtcttgatataaaaaaagcctttaaaattatcaaaaatactactcacctcaacccaaaaaacctttataatttttcgaataggaaaaggtcaccttttcctattttgttaaccaaacggaaaattaccaaaacagaacactcctttactaacagaaccacaaaacatttacaagaaatttgtaaaaattcagatatttcaatatcaaattcattgcccaccttcaagaaaaaagtaaaaagtattttacaagattaatttcaagttggagatctgacaccatcatgtttcccggactatcattctcttccgaaagtataagcggcctttgtcccttcttttggacttttattacttgaataaataaacggcggtgtaagtgaagagaatgtgcacagcaattccaccagggaattgttaggctaaaaaatgaaatttcgaaaagacaaaaaaaaaagttttttaattaaacctgtcgaacaaatttggtaaattccgtggccccctgggcactgcacagttccaacagtcgacgacgttcagccggctcatgcgcatggtcggcaaagacacggagagcgagctgaaagcggggacaaattgttgatatttttgtcaccgccactgccatccatgttttttttgtgtgtttaaatcccgaaaatcgaccattttttggggaaaaacaaggttataaattagttgtaaatgaaataaatagggtctccgactcatcttcaaaaacttattttatgagcctgattgttagtggcagtggaattggaaatttaaatgaaaatttactcgagaaggcgccctgcgaatgtcgatgaactgggcgatcagttggcgaggcgaacaacgggccggaaaatgggcaaatcttccattggtttccggcactttgtgcagctccaaaatgtgttcagtgtccgctgtttcggcacagaaacccaacctaaaaacgaaaaaatatatatttatgggaaattttggattaatttactccattttagaatttgaaaaattcaaaaaaaaatcaccgccactgccatccatgtttttttttgtgtgtttaaatcccgaaaatcgaccatttttggggaaaaacaaggttataaattagcggaccgggtcggttgggcgccgccgattgggcgccgccgattgggcgccgccgtttgggcgccggtacaattgggcgccgccgattgggcgccatggggaaatttaaattcattaaccttgcctcaacttagggttaaggactttccaaggacgggtataataatttacaaggacgta

SEQ ID NO: 13825 - DNA, 3019 bp, Heterodera glycines
gttttccatagtgaacgggttcagtggatgatgacaaggacaagttctccaattttgccacgattttattgtcgggcctatttttggtaccgttctctcaaggacggtaaataatcagtgaaccattggtgccaaaaacgttctgtctgttgggaagcagtttcccatagattttgtaatgatttttgggtactttcgggcaattctgtctcggcatttatggggatgatcaaatgtgaaagagggttttggttgggattaagagggcgcaggaaatcgattggccttagggcgttaggatccatgggattcgcggaatgaaaagtgatgggacgtgagttgacaatcatttcaatttccgagagggaggtcattaactgagctaagggaactgctcgaggacgaaatgaggtaaatgcccttgtagatgatgtttgaccagtgagatcaaacgctcataatgtccaccacgccacggtgcgtgtggaacacgaaaattccattgagttggaaattggacagccaaaaattttgagagggcgacaaaagttggggcattatcacagtaaatcgtcgaagggatgccgtattttgaggaaaaacggcgaaaagcgagtgtaaagacgggcgccgactagtcttcgactaaatcgagagaaatggcacgcgtcggaaggcaaacccaaatgactatccaatgttttttcgacattttacgcttttttggtacgtgggggtttgtgacaacataaatgggaccagtaaagtctaagccaactttcgaaaaggggggcgaaggttttaccctatcttccggaagggggggaaaggggggaaggtcaaatggtcgggtgttaaaacgtcgacaggttagacaatatctcgaaatgatcggttttacaatttgtcgtccctttggaatccaataaattctgcgcaatagtgaaagggtcaacaatgggctcgaatggacattgtttaggtgtatttcgtgaacaattaaattggttaatggcgatttgggagggaggaaaattgggttttttgccgacggtggaagctggctttttccgagacgaccctttgcgcgaataattttctgcgggtctgagtaaaggcccaaaattttcgtgacctgatcagagggtggatttagggtttgctctcgtaaaattaattcctgtagagcctttctttgctcattaaaggaaatcggattcggtgctttatatttggaattttttcgggtgccatttgagaaacgaaacacataacttaacactctgagggcttttggtagcctagaaaaacgtgccaaatcaattaaatgtgttaattcgggtgtctgttcggtaaaaaacgtgaacaaagggggagggtttgcttgaaaaggggcgtttataggttctgattttccgtatgaatactcttttatttgtgggttatttggccaatggtttgccgggagagaaagccattgagggcctgaccaccaggcagagagagcggaaagggtaggtgcggaagaaattcctcgagtaccaatgtctgcggggttttccgggccaggcaaatgtcggacagttaaatgatcaacggatttaatggctttaagtaggttttgtacaaaaatttccgtgggcaatttgtgacaattaagccatgaaaggacgatcgcagaatctgtccaaagatttaaatttgggtctaaatttagagagggaaattgggcttgggtaaatttcagagcacgagttcccatttctacagcaattagttcgagtttggggatggttaatgggacgcctttgtgaattggtttaacttttgtttttgagaaaattaaaaaggtttccgcctgggaaaatttggggtgtgaaactcggaggaaaacggctgcgcacattgccaaggtgcttgcgtccgtaaagcaatgtaattggtattcacgagcagataaaggagacgaaatgggggaacgtgggatggttactttgtccgtccttttccaggattcaattgatttttgccaatttgtgattatttctgtgggaaatcgttcatcccaattgagtttaagttcaaaaagtgactgtaaaaataattttaaggggaggataagaggggaaattaggccaagagggtcaaaatgtgatgcaataaaggaaaggacagagcgtttggttgggacaaaatcaggcggagggaccgaaagttccaaaattaaaaaatccttttcagtgttccatttaagtccaagaaacttttgttcggtcccgggaagttttaattggcttgggagatgggaaatggcttccggataattgcaggcgaattcacgtaatggcattccggccttttgaaataaggaaatggcggaggttgatttcttctgtccctcggtagaatttgaggcagaaataaggatattgtcaacataaatattttgggaaatttcggtggacaaattggagggaaaagctgataaatggtggagaattgtggccgcaagcaaaaaaagggagcatgtgagcccaaaagaaacacgggtaaatcgaaggatttgagtatttgcttttgatgggggaagagaggtatttttcagccagggtacaatcacgatgtgccgggtgcacattgacttggaggaaggctttttcaatgtcagttgtaatgacaattgggggaatccgaaaacgtaacaagagaccgataagatcaggcaggattatgggaccgggaaaaagacactcatttagggatagttcttttccgacgtgtgcggaaccgtcgtagacaatacgcactttggttttaaggggtgaaataaccgggtgatgtgccaaataatgtaatggaggcgaaaattcgaagggatttttgacaatttcaacaatacccatatttttctgttcctgtataatggagtcgtacttttggaggaggtcgggtttagctgaaagtgtgttaaaaacagaacgaagtcggccaaaacaaagtccaaaattgaagggagggg

SEQ ID NO: 13826 - DNA, 2082 bp, Heterodera glycines
ccaaatcggttcttcaaaactgtggcgatccgttgctcttcaaacgtccgttcgcaatgatcacaattcggtcggccaaagtgtcagcctcctccatgtaatgcgttgtcagaagaatggttctgaaccaggacgcatacaattagctcaaaatcatgcaaatctcatttagaagcaaaactttaatttgccacaaattatattcaaaagaaattttgttttcggcccgaagagtaaaaaaagtcttcggattcgcccatcggaattttttttctggctatggacctgaccagccctttttaagagtatctcacaacattgcaattgtttgaatcaaataactgggccataaaatgccttgcctgtcctgcttaatgttcttcaacagatcgccaaggtcgcgccgtgctttagcatccatcccggcactgggctcgtccagcaacacaacactgctcttcccgatcaaagcgatcgcaacgcaaagctttcgcttctggccaccactcaaagcacgagctggctgcaaaaaaatgttaaaatttcttagataaccgaatttatcctgatttttgatcatttttcaattttttcaaaatttacaatttccttaacaatttaaccatttccagagctgcacctaacgagtacttacaatacccatgtgtaaaaaattgaacccaccatgtccagcagggcttcgatgtgcaattcattcgccaccgtatgaatctcctgaatcagtgccttcttgccatagggtccattgaaatggccagttttggtgccagcataaaattccaaatgctctctgacggtaaggtaatcgaacaacggattgtactgaggacagaagcctaaaagaagttatctgtggtaaattcttggatttcggggtttcattttaacaatttaaaatgtaaacactgaattttttttatacacaccgactctaaacattagagatgaaccaataaatagagaatggaggaaaaacagaatttactttctccatataacttttttttctattcaaacaatttcactatattttgcataaattttccgcgttttaatgattgtttatcctgtttcgtggaaaggaaccgaacctccagtgcagtcacagctcgaaatgtgtctgtttttgttttcagacccaatcacaaaatttgattgattaaaacaacaaataccgattttgttctgacattcgcgcatgtgcttcttctggtcgatgccacagatgagcactcgtcccgaattgtatttgagcagtcccgtcaaaatggaaaatgtcgtcgttttgccggccccattttggcccaaaagcacagtgatttggcctttgtatgccttgaagctgagccgggccagcgaaaattggctggacgaagaaaaaggctgtcgccatcgcttgcacaatttgtccacaacaatgtccgcttggtcctttgaactcgcccggtccgtttcaatgttttcatttggcggaagaccttctgaggttaatttatgagggacagcaagcagataaagcaagtgatatgggtgggacagaattagtgaattcatatgtatgatgttttatttgatcatttaaatttgttatttattgataaactaggtaaaataaaattatgtaagaaaaaatttgcaaaatatgtatgaaaaagtctaaaatatgtataaaaatatgaacatatataatatcgaaaaaaccccaaaataggtatataaataaaattcccaacttttgatcgcaaacacaaaattttttgccatttttgcgttttagagcacacattttagccattttttcacaagaaaaaaaaacagaagcaaaatatacccataagactttttgggaatttaaaaaaatacacacctatgaaatgaaaaattttcttctcttaaatttatttatttattttttggattatgaatgtttgattttaaaaattatttatctcactactaatttggctgttttgttacttttttttttaaataaattttccaaccattttacaccgccttgaatttgcgaatttttactgcctatttatttccattttttca

SEQ ID NO: 13827 - DNA, 1320 bp, Heterodera glycines
cggtccgtttcaatgttttcatttggcggaagtccgtcgcggcagttccctcaccgtcggagtccgtcccatcgtctgactctgagccatccgagatattttttaatgccgcaaatctgaataaatgagtaaatttacatggccagaccccttccgcatgtttaccgccgacccacccttattcgcaaaaatttctgtcgaccctccccctttattttcctgtatgtatccgatcacccctggatttaagttcgtacgaagttgggtcgaccccctccccctccccgacttttaatgtatgatgtccaagttctgttgtatgcttggaagacccctatttttgttgcagtattcaaaaccttgagaaagaacagcggatgttgtttgggtgatcctttcggtgggaaaaccgaggcaaagtaaatggaaagcaaaatgaagagaagcaaatcgaacagaagcatcagaaaggccaatccaaaggagaatttggagatgccacttccgagtaacgcagaccatccaatggttttcactaaacgaggaggggaattccattacatggccaagtggcctatattatgaaatttttcaaaaaaaaaaaaatcttagaaaaaagataatttcgattaagtgcacaaacgaagcctttccttttagctcctactcacaatgagtattggttcgaattgtgttatttttatggcctccgaaataatggcacgcaaagaactaactatttttggcactaacaataagttgcaaaaaagacgcgtgattatgtgccattaaagattgcatttgcaagtttattgtaaattacttttttgctcggtaagcgcaataatatacatggcacttccgaaggcgaaaaagggattaagcgataagagcagacacaacggcacatttgcgagatccggcttataaaagagaggaggcgcgcaaaaagaaagcgctgccatcagagaaatgggcccaagttgggggaatttcttgcacagaatgctgaggaaaagcgcaaatgccaacatcgaaatgccaaagaggacgaacaatacgatgaagaggaaggagtcagactgaaacaaaaagttggatcaaataagggatgaatttatgttttgaaaattttatttgagtgttttgtcgaaggtttggctatgccctcgtcgtaaagcaaatagcaaacctcaatgagtcgataaataacacaaagtgaagcgaatatcagagcaaaaggcaacattttgagcacagcaatcaaaagatgtgagccgtagaaagcgaactgattcaagcccatgacagacatgtaag

SEQ ID NO: 13828 - DNA, 3895 bp, Heterodera glycines
gttcatctgcagctgtagaaaccattcctctcaacctaaagtccagaaatgtccccttggcggcagcgaatgatcagtccataaccatgatggctccgaaaaagacacgccgcacctttttgtcggcttgcgacgaatccaacggaatggcaatcgaaagggtaaacgaattgaaaattcaaatgaaaataattccataaataatactgaacctgttcagcccatctcagcgcaatcctccgaccaacagcaaatcgtattggacaacccaacggcaaattcattaaaagtgcgggaagcgatgggcactgacactgcggggaatgcaacggcagatgtggggagtgtcggaaacgggacggtggacgaagcgatgagcacgacatcgacctacaccgcaaggcaaaggcagaacttcaacaaaaaacaacggaaacaaaatgtgggttatatttaaaatttatagaattcgtgcacaaaaaaagcaaattcttagggccaaatgttcgtggacgcaccggcagaaaaatttgggcctaaggttcgcaagaaccctaagcagggaaaatatgaggtgcaggccattttggccacgacaacgtacaaaaaggatgggcaattacgacggatcttctatgttcagtgttaggtaaattaatttttaacaattttatacaattgttaataaaatgtattcaggctatagtcaaaaagactatagttgggtcttgaacgagtggatggacacgcaggagcttgtcacagagttcactgttaactctgtgatcagctgggtcttcaaggcaattcgtggcgaggaagtgccggaagaaattgccgaaaaactcaggacaaatcctgagtatatctcgcgtagtttttatggggaaattgatgaaataattaataaatttaattgtttgatgaatgagttgaggcgcaatgtcgacattaggacgacgccaattgggttctcgtcaaccctggcgggcgatgtgagacagcaaagaattgtaagttttgaaaattaaaaatcatcattttcatcttctctctcattttatttgtgtgtttgttaagcctactttcttagaattgtgggccccaaattcaccgtctttaggggaccaatagagtaaaccgcacagtctcgaatgtgtggcctctattgttcttctatttcttttttaattcctactataaatatttgtttttaaccttggaaaattattgaaaaaattttttttcaggctgcggagaggctgaaggaattcttaaaaaagaaaaaatcgtgatggatgcataaaaatttttaaaaaaaatgaaaccaaaaatattaataattaaaacccaaaaaaatctttaaaattaaaaaatcaaaaaaaaattttaaactaaaattcaaaaattttaaatattaaaatccaaaaaaactttaatactaaaaaattccacacacattgttcttcgtataataaaatgttttgccgataagtttttctattcataattttttgcaaagaaagattggttcttagatcaaatgtgagataaacatttggcaacgggcggcacttaaagcaatgaatggaaattttcatttgatcattctcactctaatcatctccaaacattagttgcttttctagaaattcgtccacaatttttattcgtttttaagccatggaatatccatcaaacttttcctggattcaactttccgactgtgcttgtgatttcggtatttgcattaggccatcgtcctacaaaaagccaattatttgtgttcccaaatacatggctgagaattttccctccctcctccctcattgaaccattggaacggcatgcgcaccagtcgcaccttggagcttgctttttgctctttttctcctgcttctcaccctccaggtccaaatattggcctgattttccaaattcctaaccttcagtttttgaatatttgtttgaccctttttcgctctcgctctcgttcgcgttctcgcccttctgttgcgcactctgaaccggcaatcgagatggtaagaaatgtctttttttattgtgatttttctttaattcctaggttaaactttcaaccaatagcaacagtgctgctcgccatcgtcacaattttccggtaagataataacatttggttttctgatttaaaattttaaacagccattgccaattcctcaatttccaccggcaactcggcctgcatccgatgctgagaatgtaaatgcacagggcttcattgaggactcttggattggtcaaatgatcaaaacatatgagcagcttgctgcaattcgtgaggtaaatcactaaataaaattaaatagttttactaaaaatttaaactcgagaccgaggccagtgcaaccatgcgtctatgtacagcttcccaaaatgtttgactttttgtagagactcgatctgctcctgttgcatgctttccatctcctttttatggaattgttgctgctgctgaagcaaaattaattgccgatgctgttggtgatttttgacaaaaaaggcccgagagcctgttcgttggtgggctaagataattgtgataagaaaagaataaaggtgaccaaattgattgaccttgacgctattccttacctgcggaccaatgcgcaactccaatctggtgtcttttctttggtatagctttgaaccgacggttattctgtcgcattttttaaaaaataatttaataactaaataaacagcaaattaaataaattgaggaaccaaaatgttgagtaaatgaggaaagtgggttatggattcatctgcgcagagaactgctaccaaatcgccattgcgtgacttaagtctttcaccacttcccgccttcatcactcagttggagcaaagatttgtttgaatatttaaaaataatttaatgggcaatattccttggatggatcaattttggcatcaatccttccttcgttttcttgtcatcgtttcatttgtgatacagttaattcttgcacactcttcgcacatctcgaacccaaccgccactcttccattatccagccggcgtaccttctctttgttgtgaaataatttgttcctttggatgcacttaattaagcactttattcattcatgagaattattcttagactaattttgttaaacattttggcaatttcccattttagcacttattttggcagtttttagcacctaaaaatataagccctaataatgaggacttcaccataatcattatcatattcaaagaattaaataggctaattataagaaacttttggtgtgtaataaattttttatgagcattgggctctgtctgaaaaattttcctctttttctctaggctgaatgattatactattttaaataataaaatattacaaatgccactttatacattggtgtgtgccaattttgcacatgtcataaacatggaaaatgccaataaattggtgggtgccacctatgcatatgataaagtgcataattttttacttttgcaattataaaattttccttttttttactattttaaataataaaatattacaaatgccagcttagacattgatgagtgccaattttgcacataccgtatttgctctaattatagcccatgggggattactcctcagaatagaggggataattagagactgcgaaattaataaagactgggggattatttttcggctgatttatttagtgaaaaatttttgaatttttttgaacatgtcgccagaaacgttatcgcgacaaaaaataataaatttttattgcattttttgttacagaatttctgaattttttatgaaaatttgaaaaattaacatatatttagcaatgaaattctttttgctgcgttgtaaagcaa

SEQ ID NO: 13829 - DNA, 4418 bp, Heterodera glycines
gtatttatcatatatttgatgacatggaaaagccaattcaattaatgtatggaaacggggggagggacttgaaaagttgcaaatcaaaccgaggtaaagccattcaatgacaaattgggataatgaaaacacctgctgatgtttaaaaataaatgaaaatttttttttaattttccggagaaaaaaaagacatttttccatcaaaaaaatttgttttcccgataaaaccccatagagggggggggggggggggtcggataattgatctgtagcaaacaaaaaaacgcacccgccgacgaggtcgctgaactccgattcctggctgaggttgaccacatgcaatgggacccgcaacaggcgggccatgtgctgcacggtggccgtcttgccaacgcccgtgtcaccggtgagcagcacgggctcgggcggcgagcgggacacacatgcggccacccgttccaacagctgggcagcgtcccgggtgagcacaaacggtgccacagcaccagcgcaactacaattgtcagtattttattaaaattaatttttttttttgtaatcacacggaaaaccactaaaaacggcaaggaaagattcaaaaaatcccatttttcattcatttttacgaaaatttgaacctttttccactcctgttgtcgttgttgctttgctgttgttcctgttgcgccgcatccgtccgctgttccaacaccacccgaccaaattggaattggacccgtttctgttggtgctgcgcctgtttaggaatcctccgactgctgcggatgttctcattgttgttgttctccagaatggacacatccggaaaccgtacgtcgatgtggcactgctgctgttcaggcgacaatgacaacgcttcaccaatgacggcttaaaaaagaggaaaatttgtccatttaaaaaaatgcaaaaattgtggcccgaaaattcacgaaatcagcaatgtttacagtaaaactgtaacatattgacataatcagactcgttattaagcaaattaagctataaactagggaaatattgaatgtcaatgtttttagaaatttttcgtaccaatgtaatgcagttgtcaattaaccaaaaaaaaaaaaatttttaaataatttccatttccgacataattcttttttaaacctgcaacacaacggcgaagttcatcgccgctcaaatgggcggcccacgcgtcaaacagttcgccaaacaatgcattccgatcagaaacgagagaattcgggctatgctgctgatcagttgaattcacgagatggctgatcactcggaacaaatccttggcattcagtgcccggtccatggaggccttccgatggttgatcagtgcagaaacggtgacaaatgtttgcaaaagtttggaccgaatgttgaacaattctgaaattgcaaacaaagacgtacaattaaattaattctttaaaaaaaaaaaaatttttttaatttttcgagtgggatggaactttcgtctgttttaatcattttcaaacacaaaccatgatgcgatttggtcatttgtgccaaaattgagtccatctgtgccggttggatcggtgccattcggacagtgaatgggtagtctcgccaaatctagaaacaaaatgtttcattccgctctgtgaacgttcagccaccccctcaaaaaaaaaaatttttttagttttttaaataaaactgactgacagtaccaaaatgcaacaaaaaattgttttgaattcgtaaacacctcttaaagactaaccattgccgtatggtgttggtgctcttcccgtgaaattgtgcccaaaatacggcattgcgagcccatcggaatgtgccgtccgttggccaacacggcatggccacgctcggccaagccaacgattgccgaggccaaatccgacccaccatggtcccaattctcccacaaaatcacacagtcccgttgcaaaaactaaaaaatatttgaaaaaatgcatggcgctatttaaaaagagtgggtttttgaattttataaaaacaaacctgagcaaatttggaaggctgccaaaaaaattcgccgggaacttcagaacaactgtaactgccgtataacacctaaaaattaattaatttagagtgtcgggccaatccccaaacaccgaagaaaaaatttttttgaaaaatttgtgtgaaaaatttgaacctaccattttcgtctaaatcggactaaagagacgaggcttggacgtaaaaacaccaatttgatgggaaagatacaattttttccccagtattttcggatagaatatcgccaaggtctccctttttattttggattgtgccacaaatgcaaaagtatgcactaccagaaaaaattccaaaaaatttactcactgccaaaaaggcaataaaatcattgttcagtaaaaacctttgagtcgtattgttcgttgatctgcaacactttgagcggtacgttccgttgttttgcaacgcaatttgctgtgtgcgttttaccacatccatgaggcccctgaaaacgaaaatttagcaacgaaaatagcaaagatttgggttcgattttttcaaaatttgttaaaaattgatgtaaatgtactatttttccatagataacctgtaaaatgacgagttttttcgttgtaaaaagtgccacaattcgctcaacgtcagcggatgttgtcggttcttcaatttgtgccacaatttgctgaacgtcggtggctgttgttggttcttcaatttcaacaatttcaatcgttttgcatcgcttctcaatcaaatggattgcgtcctccgttttcgggtggctttgtctgtaccttttgcctgctcttctccttggcattattttatatatctaaaaattaaataaatgagtttttatatgaataaaatgggtggtctctattagaaagcaatttttgggatggggttgggttggagatttacatgaaagggggtggtgggttgacgaagctttttcgaagggatccgaggcgatacttacgtacacggcgattcaattttgggctcccagtgcaaataagtttattatttatttatttattaatcagaacgccaaaactttgcaaaactttaaattttcttaacccttaaaaatcaattttgagcaatgaacgtgaattttggtgaaaacaaattttcgactttttttcgaattttgttcgaatccaggttcggggttcgaattggtcaaaagatgccagaatcggttttcccgaccccgaaaacctataaaacaagtttattttcaaaaaaaatttttttgaaaatctgtacacagataacatataagtaccaaaaaacggcataaatgatctcttattgaaggattgatggctttcagtttgtttccgtgtattttaaacaatttttaagaaaaaccctaatttcgaaaattttgattattcggctttttgttcgaattcggttccggggtcaggaattcagaacgatgttcttatagaagtttacttctatattacaatactaatgccatagaattttattttcaaatagttgtatcaccgacgcattttctattgacgcattttccactgacgcattcactgacgcattttccgatcatgaatatcgaacatttattttctgccacgtaagcataatacatattagtagggttcggaattatatgcacatgcatattttttttcctggactgtgggaggcttgaaacgcacgaaaaacatgtttttagcttgttttgaagcttctaggatgactttccatatgtatattgtgcatatttggcgatttatttgcatatttgtgcataatttggcatttttccaaaaaatctctaatagaacggcccccaacagacaaattggcctttttgacctcaaaaaccggaaaattttccaaaaaaataattttttagcaaaattttcacgaaaaatattgaataaataaattttctcaaaaaatggttaatttatgtcaaaaataagcaaaaaaagcaaaatttcgctttttggttgatttttcgcaaataacaaatttgaagaaattttgagaaattacaccctcaattggaaaattttatgtgcatatttttcactttttatgcgcatatttcgcgttttttggtgcatattttatgcgcatattttacgattttatgtgcatataattccgaaccctacatattagagatcggaaattttaaatttgtgtatcccgctgcggggattgaaactcaaaattttctgcgggacgggatcccgtgggattaatcccgcaaatcccgcatttaaaatttgcggaatggatggtaaaaacagatcttgaatcaaatctgttaatggtccataaatttgactattttgttgcttttcaaaaccgcgtttttgcggcgcactttt

SEQ ID NO: 13830 - DNA, 3222 bp, Heterodera glycines
cttagaaaccaaaaaattgatataatttatttagatccccacccagcctttgatcaagtcccgcatgatcttttaatatacaaactcaaaaaaaccggaataacgggcaacttattaaattggcttcgggattttcttcttggaagaacctttaaagtaagaataaatcaaattaaactttttgcagatgatacaaaaatttatcattgctattcaaatgaatcccaacgtaaagttttagaaacagctctaatttcagtctttaattgggctgaaacatggggcttaaatttttcagtaaaaaatcttccgtcttatatctaggtaaaaataacaaaaaaataccgtacacaattaaaaattcaactttccctgaatcaaaaattattcgtgatctaggtattttaatcgacaacaaactcaaattcaacgaacaggtttcaataattctccaaaaagcttatctcaaaagcagaattctttttaaaaaaattaaaaccaagtcaaccaagacttggattacagtttataaaagttatattcgaccccttttagaatacgcaaccgaaatttggaatcctcgaaacaaaagaaataaaccgcctggaaaaatttcagaaaaactttacaaaaaatgttttcagaaaatgctgtctcccctacatctcatacagcgaaaggctaaaatttctaaaactttccaagcttgaaaccaggagaaaatatcttgatatcataacagcctttaaaattatcaaaaatactattcaccttaacccaaaaaacctttataatttttcagataggaaaagatcaccttttcctattttggtaaatccttaattttatatagtaaaaatttgcccttgcccatggactgaatttggtccaatctgtggaaaacaatcaccggcgagttcactcactggctaaatcccactggcgaaatcacctgccatcagcaaaatatttgctggagtttgaaaattaatcattaaaacccggatcagctcataggagtgaaatgaatggagttcattcatttatttagcaccttttacaggcggaatgcaaagcgatgggagcggaatggaaattgttcccccgtccccttttcctagtcattcccttccccaaaaattgaattgttcccccttttaggctcattttgttatctttttgtacatatatttcactgttggttttatggatgatattcattcactgaataaatgcgggataaaacaaataatctgctaagtttatttctgtctttcctccacgattgtgtctccttttgcattatttgcatgccgcgagtgcttcgtcgcgctcggccaacaattcctgcggggaaaagggcaatttgggttccccctcgtatttttttctggctaatgcatggattgaacgggtgatacattcggtccagatatcctcttttacaattcccaatttgttattatcccagttcattcaatcacacttttttggtgatgtcaatcttctgtttggcaaagtcgtcgaggtcaagaccctgcacaattttccactctttctgtgcatcgatggtgacggggaaggaaaacaccaatccctcggggatgccgtaagacccatccgatggcacagccatggacacccaacgaccgtcggacggagtgccgaaaaaccaatcgcgcatgtggtcactgtcagaaagacggtttaaaaaatcagagagaaatacagaaagatttgcttaccatgcggcttttgatgcggacattgcgctggacaatttgcgcttttcgatgatcacagcgccacgtttttgcacggtctttttggggagaaaatggattgaaatggtttaaattcacaataaccttgatgaattggtcctgaatccacgcggtgtctttgaccgcatcataggccaaagtttcggaaccacctgtaatttggattatttgattgtatttttgctgttccgattgaatagctcaaacctttgacaattttggcatgtcgaatatccgggaactgagtgctcgaatgattgccccaaatgatcacatttttcaccatcccaacggtggttccatctgcgcacttttgcgccacctgagccatggcacggttgtggtcaaggcgcgtcatggcactagaattgaaaccaaattacaaacgaaccataaaaaaagactaacctaaaattattagccggaattttgttggccgcgtatttggcgcaaatgaatgcgcttgtgttggccggatttcccaccacgagcacctaaaagtttatttttaaggatgataaatgatcggtaaccaacaaatgcacactttgactgttggcttggaaaatttggccaaagcttcgccctgcgatttgaaaattttgacattggccgcgagaaggtccttccgctccatcccttctttgcggggcatcgctccgaccagaaaagcgtagtcaatgtcttggaaggccgcctcttcagtggtcactgtctcaacgccttaaaaaaagaaaaaatgagcgaaaaaacgcaaaaagtgacacccattcagaaaagcagaaacaaatgaatgaaagaaagattagccaacgtacgtaccgacgaggttgggaagcgcacagtcaaccaattcgtaatggacgccggtgagcactgcagcaagaggagggacgtcgagaaggacgaggacaatgggcgaaaagggaaaacatttacagccgaagagaccaaaaggaacacacctggtctttgccaaaaacatcccctttggcgatttgcagaacctaaaggtcaaaaaacggacaaaacaaaatggatagcagttacaaaatacaaaactaaccagggaatagccaatttgtccggcagcaccagtgaccaacacgcgaatgggttgtgaggtctttacaacgtcagcacctatggacatataatcaccgtaaagtgccaagtgtgcaatggaagggttcttcttcaaaagtaatccgagcggttggccgatgcctccacttgcgccgattaaagttaccttaaaaacgatttaaatccacttaaaccggtaggtttttaattaatgccttaatagaactgcttttcatcctgacactcattaagcgagaacattgctgcataaaggcaacggcgtttctgggaaaagcagccaacatggccattttgattaaagctttttaaattgtaagctgaaaaggaagac

SEQ ID NO: 13831 - DNA, 3499 bp, Heterodera glycines
  unsure (1)..(3499): unsure at all n locations
tgtcccgcctcacggtggggacttaaaaacatagttaatctcctaggagaattatttgttctaaaaattacaggttaattccttagagtgaaaagattngaaagagaagnattatataaaatnagaaataattttattaaattttttaattttagtttcaaaaaaacaaacaaaaaatgttcccaattttgaaaatgaaatagtgcacaaaaaggggggatggttagacgaaaagagaaatttttaggaagggacgcaccccatctgatattcccatttttccgttccacaactggccaaaggcgactgtgctcattgacacgtagttgtccaataaggtacttggactttccacagtaaaatgtggcacaaattttggaactgtcccgcctcacggtgggacttaaaaacattgaaaagtgagttcaaaacttcagagcattcttcgtatcacttaatagtcctaaagattctctatccaaaagttacaaaaaatctgattcaagtttgtcatcgtagttttgcaaggtgctaggtcgttccacaaaaaagctcagtgtgggcgttgcacgaaaaactcacagtaatcgataaaattaaacaaataaatttaattattcaattcacaaaacacggtgccgtccggttaaacttgtttcatcaaaacacaaaagactaaaggaactctgatattctttgccacacatcgacccatttttgggctaattagaattgttcaagggggggggggtggcacccaagaaaagcaaaatcctctaaacataatgaccacttagttccttgcctaactcttttcttaattgccaaaacataatttttggtaccaaacgagtgttaaagtctcgaaaatttgtaaatgtaagaaaagagatacggtgagaaaaggcaaaattccgttttgtcccgagtatatttagaaataatggtactttggctttatttgccacaaatttcaaattaattaatttattttttataacttttttgtttacaagcaaaaatagttgaatacagttttgtttaaatttcacaagccaaagtagtgttaaaaatttcattccggtttctttttgaaaaaattccatattttagacatggtcaatttggcgataaaattcatttggttggtcgatcaaaaatcagtagggattctttttttaggcacaaaaaatcgcgaaatagcacctaaaaaggcagaaaaaaatcgcaaaataggcattaaatcggcacaaaaatcctcaataggcacaaaataagcaaataaaaattttttattaacacttttaggtagcaaaaaatataaaattttaaaaattcacaagtaaatgaaattattaaatattttaaagcttttttcgaataaagacaatttttgaaccaaaaatttttatcaagaaaaatgtattaaattagtggaataaaagttttggaaaatttttacaattcttaggggtgtattttccgttttaatgcatttttgtcgaggattttttcaaaaatcctaaaataggcacttaggcacgaaaaccccgaaataggcaaagttaggtattataaaagtcatcgtagacatcccaaaacaagcggaaagagcttttttcgtgctaatctttgcgcattaagtgcgcaaaaattttaggtttttgcctaaaaagaatccttaataatcagtatattatgtaaaattttattacaaataaaaaatcaaataaaaaggttattttgtggcaggttttccaagaaacaattttgggaccggcgggagggtccggcgatgccgccgtcgggaaaattttaaaatttgaatgcaatttgttaacagatttacaccaaatatgactcgaggaagaagagaaagagaattattatgggttttttcgcgtaaatttaaatatttttctgactgctcaaaagttcaatctttagggggtgcattttcacttctcgtcccaaaaaagaggtgagaggcgtgtcccacccctgctggtattcacgtatttagttggatttgttatgatgtttggatttgcaattttacaatgcgcacggacaatgaccaaattggaaactacctgctgctgattggatcgatttcgattattttaaatttaaaccgcagggctttccgacttgcgacattttttggggtttgatttccgaaaaatttttgggcctcggaatgccatcactggtttacacacaaaacatcataacaattcaagtaataaagtaaatttaatcaaacttggccatattattcccttattttaacccctacttttgaccaattgattagggtttttactttggcatcacaaaattatggccccgtgaattggccaagttcttccaaaaaaccctcacatggaggacactacttttttgtaaggccataatttttcaattgtctaaaataaatgtttttctgaaatagcaaagttagaagaataattttgaacgaaaaaatttcataaacaaacttcttcattctttgggaaaaatgatttttgaattggcacatggggagtttttgagaaaaggttacatattttttgaaaaactttcaaaatttgggtagtggaagaagcggatcggataactcgcgtatataataatcacattatttttgggaattcgtctcttatttcgagaattatccttctcaacattttttggaccttgctgaaaatagtttatgatttttttaaacaaaaataaatgtgccatgggataattaacaaataaatagcccttacaatatatgcataaaggtacgatttttgctgtgaggcgtaaatatcacaccacggaaaaatgaaggggtctctttaaaaataaaaaagagaatattggttaaaatagttatggagaattcgttcattcaaaaagatatttgattaatatcttgaatattgaggataaaaggacaaaattgagaacttatgaattaattataaatgaataagtatcattaaataaattaaaaagtttgggacttacttaatctctaataaaaattttaataaaatttcattaataatattatattttggggtgaaaagtatttttatattcccttaatttatacaataacaaacttatgaaaactaattttattaaattgaatcaaaatattaagaaaaaaaattcgacgttaaaactcgaaaatcagctttttcgagtatattcaaaaataattttttgtaagaagttaggacttaagaaactgaggatggtcattgcttgaagcgtaaactgcagtaggcccaaaaaccagaaaataaacatttaaaattataaatttttaattaaccttcttaagtacttttatttacatatttatatttctgattttttttacaataataaattacttattttccgaattttggatttttcatacttttcttaatttttagcatttattgagggttttgaagaaatttgtgtaaaatggctgaaaaaatcgaatttttgt

SEQ ID NO: 13832 - DNA, 2765 bp, Heterodera glycines
  unsure (1)..(2765): unsure at all n locations
acgaaaaaaagagttccttgatttagtaaaaaaaaaccctacctagatttacaattttaaacttttaaaatagaacaaccctttatttgtacgnagttaaatttttatctgnaaaaaaaggatctacctatattcacaaattattgaaaaaaccgatttaaaagaatgtcttattaatcaaataaaattaaaagattcttttttgaaaacccattataaaaaatgagtaatggtaataaaaaagctattcaactaaaggacaatgtaccgcttaaacaaaaactaataatcaataaattattacatgctttaaatattgttagaccaagaagttccaaatacaaggattatagtgttttcgctactaaaaaaacagaatcggattatttagttaaaacattaatcaaaaatttgtcgtgagaaacagaacaaattttttaaagcaatatttgtaaaaaaatttacgtatttttttttactttttttacaaatattttatttaaggatttttctgcttgtaattatgtagtgaatttttcgaatcatccattactttttaaatgatcattgaatagttagtacttagtaaagcattattttataataagtacttatatttttcgtttatgttttcagatataaaaaaataatttaatacatatttaacaaggtcaaaacaaagcattggtagttaaaagatttttaataatcattttttaatgaatttcaatccatttattttattgttatttatcaatgaaataaagattaaaaatttattattgtggatttacctcataatatttatctttttaaatgttttatctgatacaaacttccctattaagtagcttctataaataattgttcaaatttattagttattttaaattatctttgatacaaccaaatatatatatatatttattttataaaataaaacttttttttaataattatttattcaaaagttgtattaattattaaattttacaatttagtgaagtattatttagatattattttatttttcttgtttaattaagtataccaaatggtttattgttaaggatttgaattattttaatattcctaaatgcgaagtgccaccgtatagattaagttatgattccgaggtgccattaatattggtgttttattaattaaagtctgtcatatgatttaaataattatattaattttatcattaaaactaaaactttatttgatggtttggtttatttctctctatttttcaaaaatttaattcgagcttttttattcggataaattttttacttaatttgtatttattttcttgtataaataacaatataactttcttccatttccaaatgttcacacctatatctttatcattgtgatataaataaaattcattgttgtttatatttttttattaaaatttacatttaaatcattattgctttattttattgccttttcttgtcttgttaatcctttttttctttatgagtgcatctgatttagaattcgtagtttattttatatcatattttccaattcattaaatttttttgttttaatattatatttcgctctctcaccgcataaaaaactattgggtgggtatttgttccattcaaatcgaaaaattgtcgtctatactttatttttgattagggcatttataagttcaactacgtcatcattatcactgtgtattaattttattaattgatttagtttatcgttttaattaatatcagtaatttatttttacgtcgtgttccaatatttgcgttaatataaattgattttaattcagttttataagccaactgaataagcataaaatatacgttccattatccaaagtatcatagctattccagatgcaattttgttttggaatctgatcaaataatctattttgatttctttttattgttataaatttaaatggaaaaggtcagttttggcactaatcaaatcgggcaattctcatttgcttttttattttaaaatatctttttggtttcgcgcattctcccttgatttcttgtttgagctatttactaactctagtgcaagcggactggctaccaaaatttgctaagcggcaggtaaggcactcaattaaaaaaatgattttataaaattatagccgtgccaacatcttgctatgagctttttttaaaatttaattggaaataatgaattatttaagtattataatgcggctcgcggcatgacttacgaaggtgacgttgcgagatttggtctaagtcaagagggcctacttaccccgtgaggtgcactgcgatgcgcataaattttagtaatttaataaatcttaaatatcagaataaaaactaaattgaaagttcacattttttattttaaataaaaattaatatataaatatataaaaaattaccgtgacaaatgtgattatattggtaaaatatattaaaaacaaaattaatcaaaaaattaatttcttttctttaaaatgatttaaaatttcaaaattgcattgttttcaaaagcttttaatacaaacccgagcattgagtagactcttcagaaattctaattttaaaaataaaagtcaaaaaacatttttattcaataagataagtttatgtgtatttaaaaaagagctaaaagaatgtttcaaaataaagactcctaaaaattaatgggaaaagtaaaataataaaaaaatttgcttaaacccagcgacgaatacaaatttaaaaaaaaagttccattaaaaa

SEQ ID NO: 13833 - DNA, 1597 bp, Heterodera glycines
  unsure (1)..(1597): unsure at all n locations
caattccgacgccgcgtctctgccgacataatgggcgttttggagcatgaacacacttggcaatttgacgttatccaattggaacgcgtgacggaccatcacccgttggccaacctcggggcgaaggcacgcgaaaaaccaaagaatggggggagggcataatgcacaaaaacatagaaatgacaaacggacactttcgggggagggggggggggggggtccggacgaggccagcagcagggccccgccgggactttaccgggacccacggcccagttttatagacaaaccaccgggagtcatggaaccggggtcccgtcccggcctattttccaagtcccggtccttggccatttcaaaattccgcttctaataaaacaccaaaaacggacgggaatttctggcagaagtgcacaaggccaaacaaattcccaaataatccaaactcgaattgctcctctgttttctgcaggtgtttgagcgttggaatgtctgcgaagcactccaatgtccgtcccaagtgatcgtccgatggttgacggtgatcgaagcgaattatcaggcggggaatgcctatcacaacgccacccacgcggcggtaaatggccaaaggaattgcaaaattaaaaagtataatgacagtaaggggataaatggcatttatactgtagcttcgaaatgatttgttgtcctaatgggccaaagtttattccattcatttttaggatgtgctgcaggcgacttccttctttctcaattcggattcggtagtccattttcaatttttaattgtttatttattaatttttaattgtttatcgcaggtcggccaaatgatccaagaccaacacgcgtcggccgcactgatcgccgccactgtgcacgacttggaccacccgggcagagggaacgcctttctgatgaacacgcgccaacggctggcactgctgtacaatgatcagtccattttggagaaccatcacgtgagaaagggggggaaggagggaaatagagaggggcgggggagggagagaggagagaaaaagagggacagatagacgagagagagggcggaagaatgcgagagagggacgagcgagagaaaagaaatgaaagaagagaaaactaaatgagaaaagtgattaatagagaccggacgggcccggcgagcttttaccgggcggcccggggcgcctggtaaaacgggctttttttgaacgggcgtcccggaccactgtaaatgtactttttgtaccttgtggttgctcgataaataaatatattcaaactcactttgcttttcccattttccttttctctcctcaggtggcactcgcctttcagctgaccctctcccagtcgggcgtcaacattttcgccaaaatgccgcgcgaagagttcacccaaatgcgtcaggcgatcatcgacatggttttggccacggacatgagccgtcactttgagcacttggncaagttccaacagctgatggccataatgccggacaacacggaggaggagcgngacgccaattcgttgatcatttgccgaatggtcgnncgnagggattgggcacgcataaacagggccaaggaaa

SEQ ID NO: 13834 - DNA, 3608 bp, Heterodera glycines
  unsure (1)..(3608): unsure at all n locations
gggagagagagaggagagaaaaagagggacagatagacgagagagagggcggaagaatgcgagagagaaagaaatgaaagaagagaaaactaaatgagaaaagtgattaatagagaccggacgggcccggcgagcttttaccgggcggcccggggcgcctggtaaaacgggctttttttgaacgggcgtcccggaccactgtaaatgtactttttgtaccttgtggttgctcgataaataaatatattcaaactcactttgcttttcccattttccttttctctcctcaggtggcactcgcctttcagctgaccctctcccagtcgggcgtcaacattttcgccaaaatgccgcgcgaagagttcacccaaatgcgtcaggcgatcatcgacatggttttggccacggacatgagccgtcactttgagcacttggccaagttccaacagctgatggccataatgccggacaacacggaggaggagcgggacgccaattcgttgatcatttgccgaatggtcggcggagggattgggcacgcataaacagggccaaggaaaagacggcatttcttcagatggtcaaatgcgcggacattgccaatccgacgagggagtggcgcttgtgccacgagtgggccatgcgaattgtgcaggaatactttgaccagacggcggaggaaacggagcgcaagttgcccgtcacaatgaagggctttgaccgcgagacgtgcaatgtgccgttgacgcaggtcattcattcattcatttaatcgacgtgcttttggcatttcgttttggttttgatcacccaattttgctcccatatgatcagccaatcatttggccaattgtgcctttgtccgatcattcattcgtccatttcccctttcagtgcactttcgtcgacatgttcgcccgcgaggcgttcacactttggtgcgaatttgccgacctgccccatctgccggttcagttggaggagaactacgcccagtggaagacgagatccgccgaatgggacccgaaaaaggacaacgacaatttgttgaagcggacggaacggtgagagcggacaaagcacagaaaggaggggaagcggcgccgtttgtgccgtggcaatggacccaccacccaattggacggcactttggctgtcgcggcgactcgtccaattcctttcccaaaattaaattctcaacaccaataattattatttatctgctgttcttctgtcttcgttttcatgtgcaattgtctttttgttgctttttgcctctttttcgtcccaattttcaatttgtttttccttttcctttctttagcgtcgctcattttgaatcttttaagttatatttcgcatttttctgtcatttaaataaaggttatacataaaacccgttacttttccatttgtttgcttaggtaattaattaattatgcatcctttggcaaaatgagcgcattggttgtggtaattaatgttttatttcccctcccttttcccttctgtcaatccttccgccgatatcatttttattcttctacattcgctttaccaccttttgtttgatttcgttatactattttgtcccatatttccactcaaatattccaattaaaagagaaaataatgcataaatttttctcattgttgggcaaagcttaggtattttaaaaagggacaaatttaagccgctgaaaatttgacattcatttttagaaacaattttcgcttttgcggaaaatcccttcaaatggaatcctnntaatcccgagctgtcggaaggaataatttagacaaaattctcaaattatttgcgaatttaatccggctaaagggatggatggtacatagatcacgccgattgatttattttatgccaatggataggcaagagttaaaaagacaacgatttattctaagtaataacaaaaccgatttacgaacccacaacggcaaaccaacaaaatgtcgtgtcaacatgccaatgattacaaaaaaaaaattgcaaaaagtgaaattgacaaatagaaaggtcttctttccgcttttctccttccatccgctgcttttcaataacggtaatggcctggtttgaatggtccctcttggggaatgcccaaatatctgagagaagcaatgccaatcagtattcgttcaacccccaacccctcctcactcggcttggtccttgctcaatttggtcagcttggcgcccaacttgtccaggtgcagccgtgccacctcctcgtccaactgtttcggcaaaaggtacagtcccgttttgtaagcgtccggagtgccgtatttcgtgtacaattctaaacgaggaaaagcagaaaatgagaaaaagggagataaacgggcagaccgagctgggcgatcacttggttggtgaaactagcggacatgacgaaggacgaatgtccggtggcacagcccaaattgaccagtcggccctcggccaacagaatgacgtgccgaccgctgcgcatcaaatagcggtccacctggggcttcacctgctccatggacacgcaattctcgttcatataggtaacgttaatttcgcagtcgaaatgcccaacctcaaaaaagggggcaatgaaatggaagaataaatggtggcaattaggagtaattagcaaatatgagagccctaaagtgccattccaaccaccaccgctcacattgcaaacgatggcatcctccggaagccgttcgatgtgttcacccctcacaatgttcttgcagccggtggtggtgaccacgagttgagcaatgtcagcaacttcgtccagcgtactcacttggtaacctgaaaagcggcgtggagggacaagtgacaaatgagtgccgacggaacataaacggacgatacctacccgaattattaaaatatccaaaaatttcatttttttcaaatattttgccttaccctccatggccgcctgaagggcgttgattgggtcgatttctgaaacgtttggcgttttgtacatcggtgtcaaggacagagcgcacctgtgacgatcactcgcgcgccaaaattgcgcagccccgcggccgaaccttttcccacgtcgccgtagccgcagacgacggcgactttgcccgccaacatcacctgaggggaaaggcaatttgagaaacgatcaaccggaattaaaggggggggaatgactcacatcggtcgcccttttgattccgtccggcaacgattcgcggatgccgtacatattgtcaaacttggacttggtcaccgagtcattcacgttgatggccgccgttttcagcagtccggccgccaacattttggccaaattgtgcacccccgtcgtggtctcctcggacagtccgatgatgccgggcagaagttcggcgtgttggtggtgcacaaggttggtcaggtcgcctggggagggggtgcttttccagtccaatgcagcagaagtgactcacctccgtcgtccaaaatcatattcagcggctttccgtccgggaaaatcagcgtctgtttgggggtgaattcggatttaccgcaattttggtgtcccatttctggcacctgctcaatgcaccattcgtactcctcgtccgtctcg

SEQ ID NO: 13835 - DNA, 4062 bp, Heterodera glycines
cggatttaattcctcttaaaacgcaactgaatgagttaccatctatagattaatattttattaccgtaataaattaagtgacattaaatttatttatttttttgaagagagtaaaggcaatgtcgtctcctccaccttttccctccttttgttcacatggtttgtgtcaattgtttgtccataaagcgtcgttttgcgaaacaaagccaccacttacaattagtgaaggttgattttttttaatgctactactcactttcgaaggtggcatttccgggtcggggaatacgcggtcgacaagtcgaacgcccaactcatggcgcaactgttgaagataggcacgcattgtatctgaacaaaagacggaaaattaaaaaataaaagtgaaatgccatggcatttactatattagtcaatgacaataggtaagtctgtttttcttaccttcttcttgagtatttgcgggcggtttgaaaagtccggggaaaggaaaggacggctcgccggggatgggaaagttccgctgactgtccaatgccaaagtcagcaaatctttgcccgcctgcaatttccttggactcttaataaatgttttgttttatgtttcttttttttttttgcttaaaattggcactttttgcaattttttgaggcattcggtgatgtacaaaaacaaataaatcaaagtcctatcggccgggcctttgatttcaaagtttctggaaaaacacattcgccttgaagagagtcaatgcttcatctgtagaacagagggacaattcaataaaatttaaacaaagtttttaaaaaagtgccttccccttaccgtaccgattacgtcctcctcggaagtgtcatctgtaaacaatgaactgcaactcattcaaacaaaaccaaccaatccgcggcgccggccctctgacgcccgttttgatcggaagaacggccatgttgccgacgagcgaaacaccgctggtgaatttcgaatggtacggctgaaagagaaaattgcgactaatggcacttctataggaaaagaacgaaccggcataacgaatgaagggacgaaaatgacaaagcaaaaagcaattgaaaacgaaaaaaaacaattacaataaaatgtcggtaaaaattaccagctttggttaagtatttgcaatttaactttttctttgtgcaaatttatacaacacgtaaagaaattaggaaaaaattacaatttaattttaagcacagatgtgccaatgttgtgatcagtcatttttctctgtcccgcccttttccgtgctctcttcgctcttctccccttccttttcttctttttccgtacccttttcctctacactctctagcgactgtcgtgtcgcctccataaactcaaatgagcacgaagtcaaaacagaaatccaattctgcaaagcgtcataatcggtggccgccattatgtaattgtggccggtgctgaaaaaaatgagaatttaaaagaggaaattccaatgattatttgtgccccttctccaaattacgtgttgaatttgatggagaacgaattttgccttcccatcgtattgtcatcggccaattcgaccacaaagtcttccattacaattaacagcacggggatttcaaggcgttcggacgactcaaataaaaataacaaattggccttcaaaacggcgtataatctgcgccatcgctcgtcctaattaaaaagggaataaaatttaatggtaaaccgaccacaaaacgcacctgaagaacactgacatagccgtggattctccgctcataatttttatccgaaattaatgagacaagcgaactgctgttcaaaagcattgcttacaaaatgcagacaaaaactaacggacgaatacaaaaggccagttccaaaatcttcttatgttttttaaaaagcaaatatttgtgtataattttctgtttgtaaaataattaaacgctttatcaaattcattttcgccaaatcacaaaaaaaaacaattatatttcgccatttagggcaggttcggacaaaggatcaggcataataattcagactcgttttcttcttggcttgcacctaaattttttctggtaccaatcaaaatttaagcggcaattaacctcaaggatagcgtccataaaatcttcgtgcagaatgatgtgagattcacgacgaagcgcgatcataccctgataatcgaagcagtaaaaggtcttaaaaaaaattggtcccaccgcctccacacaaacagctttgcattgagcaccattaaaatcgtcggtacaacgtgccaactcatcgaaattaacatccttactgcaaaaatggcattcgattggttccgagtcgtaacaacttactcaacgttcatattccgggagtgaatgcggacgatgtgcgcccgggccttctcgtttggcgctggcagttcaattttgcggtccaatctgccggaacggagcagagccgggtcgagcacatcgacacggtttgtcgcagcaataacctgaaaaatcaaatcgaaatcgacaaattctcctcattattcgccacccacttttatgtcgtcatttggctggaagccgtcgagttggttaagcaattccaacatcgttcgctgcacttccctatcgccggccttctccgaactgaatcgttttgtccctgaatagaaaaatgcccaagttagataattgtcaaaatgcactaccaattgcgtccaattcgtcaatgaaaataatggacggtgctttctctttggccagtgcaaaagcatctcgaaccaatttggcgccgtctccgatgaacatttggacaagttgcggaccagccagcttcagaaaagtggacttggtttgagcggcaacggcacgtgccaacatcgttttacccgtaccttggaaattggctttaaatttcgaacaacaaatagacaacacctggtggtccatacataagaacgcccttaggcggctgaatgccaatgtttatgaagagatcttttttagtcatcggaagaaccttaaaaagtaattgtgttgatacggcatgtgaaattcggcttacaattgcttcaaccaattctctgatttgactatcgcatccgccaatgtctgagtacgtttctttcggacgctcgtccacttccatggccttcacgcgtgagtcgtactcgggtggcagtttttccaggatgagataagagtccttgttaacgccaaccaaatcggacggtttcatttcttccgggtccacaagaccaacaacgggcagaaagtaagtggcacgcgtggatgttttgatgacggcacactttggttttgtgggcatcaaggtcaatgtttgctccttcctcttcctgttgctcttcaagatccaaaagttcaatgacatttgagaccaaatagggaagagttttgttgatcttaacaattttatggaaaaatgcagaaaaaaattgatttgccctgaaaagtaacatatccattaatagtaattcttagttcggttttaatcggattataagcgcagagctataataaggtacaccctttttctggattgataactcaattattcgaatatttcgaatgaaactaactttgatcctttcgttgttttcctttgtcttctctttgagtgtttgcatactgtgactaatgcgctgaatttcactgcgcattatgcgaatttcgttgtcgagcaacagcgaccgctcccgaatttggtccgtagacatttgcaaaatttcagcatcgatctaaatttaagaaaaattaaatataataaagtaacggtctctgcataatcttgtgcacctcatcttcggcggtttccatcttctcgtcttcctttttagcaggttgttccgctgtctcaaccattcaaattccacaccttaattaaaacattagcactgataaaataaatgtacggaaatgaaaatatatttgaagaacagaaaaataagcgattgttaaagcataggcttaagctaaagagaaaaattaagtcagcaaaagagacaaaacgccaatttaaaaaaaaaccgacacaga

SEQ ID NO: 13836 - DNA, 2785 bp, Heterodera glycines
ttgcgcgccgtctccgatcggattcacttgtcgctcgccagccgccggctgcgctttgatcacgggccacagaacggagcggctaatttgatgacttttaccgcgcgcgaaaatttggcggcccgcttcgccttggggcgaaaaataggccaccaaatgacgactgacgaggatacggaccggttccgcgtcaaaagcggcgcaggcgcagcgcggatttcccctcgggccgattaacgggcacccgcgcgccggtggagaggcaattgcactgtgaagcatcagcagcagctgcagcaattcatcatcattatcgtcgtcatttttgggcataatgcttcttcttttgctgctgctgttgcgctttagggtagtgccaactcagcgccgggccagggcttggtactgagatggagtgacataagtgccaagccagcgacactcggggtttggcactgatttggcgggcattgtttggccaagcatttggcataatacattgcgcttaaatgggacaatagctgtcacttgagcactgtcatccatcagcgtatgactttgtgttggcacccccacgctcaattggctgtctcccattcgcgctaataacattaatgtgctgcaactttttttggcttcatcatcattagcaactattatcataataatatgattattcatcgcattgcttaccgccaaattgttttcatttttggaggtggaacggtgaaggattatgttgggaaaggggtaattttcatataagaaaaattgggttttcagttaggtcgcaatttatttttttgtttttctgtatttttcaaaaaaaaaatttttcaactcatgctgcctttaacaatggttggtatcctcaggaaattttggcttttttaatttttatattttttgtatttgattttggtatacagtaagccatcaattttatttatttttattttttaccacttttttaaaattttctgtgttcaaaatttattaattacgggcagaaaacatttttttttctgcagacgacccgctgcaaattacaaaattttctcacctttccattacataaataaaaagtggagttggttgttaattggtcacacacaaattttttgtggaaaaaattcgcaattttttttttgcaaaaaaataatcaaaattgccctcccctcgccccacctttgtgcatttacaaatttgcaatgtcgtttcattaatgatcacctccaatcctttgttgtgtcagcattgttcatttgtataaaaaatatttccctataatgaaatgcgctggagtctgctgctgatcagtcaaaatgataaataacaacaaaatgtataaaatggatcaaattgatcgtaccaaagtgatcattggcaccaaataatcatcaatttcagtctaatcagtaagaccctggcggcaaaacactgatttattttgacccgtatctgaccaatcttccaaaatgattattactaattaatctatccaactttcaatctgatcagactcatcagatttgcaaacaaaatgaccattgcaaattgtttgaccagtccaatctttcgaattgagacttttcgataattttaaaagaaacttataatgcgatcaaaaacttgatcacacacaatacttatggcccaatattaataccataatttatgatttttattaattacggaagcataataatcacccagattccaccgtaatccctctatccggcttttccgcctaccgtaatccggcacaccaatgccggacaattcagtcccgcaaaagcggagcatcatctgcctgctgtcggtgaagtgcaagacgccgatggtgatgatgatggaggacaacatgccgaaactatatttgtccgtgcgctgaaccggctgttccacgccagtggaagagttagtaatttttcccgaaaaattcaagcctaagtaatttctagggccttccttttttggcaaatgcctaaaatttctgcgcattttaaaatgcgttttcaacttagtttggggtgtctatgatgacttttatagtgcctatttttgcttatttcggagtttttgtcttaactcagctgttaccctgcaaaatttggtgcatttctgaacagaacgcgaaaaactatgagtgtttgaattttcactaaaaaagctaagcctaaagtttttcgctcgtttaaaaagcaattaaaaattttagaatttttattcatcgccctttttgatagtaaaagcatcagagtgccttaattaacctgtaaataaagtttggtgtgtttcagagcactctctgaaaaaatattaatgaatttattatttcaaaaattcgaaagatacgcaaaataggaataccgaaaaaatttcaaattccacaaaatgggaaggaaattcaaacctaattacctcttcttctcagctgttatcctgcaaaatttggtgcatttctgatcagaacgcgaaaaactatgagtgattgaattttcactaaaaaagctaagctaaagtttttcgctcgtttaaaaagcaagtaaaaatttttagaatttttattcatcgccctttttgatagtaaaagcatcagagggctttgttaacttgaaaataaaatttggtgcgtttcagatcactctctgaaaaaatattaatgaatttattttttcaaaaattcgaaatgtacgcaaaataagaataccgaaaaaatttcaaattccacaaaatgggaaggagatttaaacctaattaccctcttcttctcagctgttac

SEQ ID NO: 13837 - DNA, 2772 bp, Heterodera glycines
  unsure (1)..(2772): unsure at all n locations
caagagccgtcataacatcatgaatttcggcatcgttgttgtatgttgcatccgccaaaattctcatgatgactgcgtcctgcagcacgtagcgtttgtgtcgtttgtgtatgaacttccttgctgacctcgctgcgtcaacttgtctgtcgatgcttccgctgacttcagaaatgaaatcggaaagggctgggtgatgacaaagacccttctaaaattattttatttggggttttataagtaataaatacagagaaatgaagatgggttgcttcgaggccattgttggtccgagcgagggcagaagccgcatgcaagtgcacgttccaatatggaattgggaacagtgcgcgacgaacgacgggttcttcccaaggacgggcttaaaattttttaaatcaacaattttgggaatttcggcaacaatggcaaagataggacatttctaaaaaaattatgaagtcaggtcaatttttgaattgttttacctgaaagagtgtcggaccgcttcaccacgcacagactgttccccatacatttgcaccagtttaagccccttcatttttcggaagaggttttgcccgtagtggaacatgcaacagaggatgtttgttgcagggaaaacagcagatacggcgttcatttcggctttctcaaaatcgcaaatgactaaaagaaaactagattttcacataaatttatgtgttagttttcaccttttctcggtgcgaccggtgaaattcggttacgtagaaagttcagcacttcctcgtagtagcgtcgatgtttcccgggcagaagaccccagactccaatgcacattcggtggttgacagacgcgcccacaacaaagcactgctcccacatgtttggtgctgccttgaatgtcccgtccaaatgccaagttgcactgtttttgctcaaaatgtccaaagtctaaaaaatttaaatttaaattctgttttcgcccctgatgattacccgttcgctcccaaaaacaagcacaacgtccttttctccaattctgaccgtgcgactgtcgtagagcactatgtcctcgccatccttcagccgcaatttgtccggaattgtgaatgccaatgggtctgcacagtccgttgcccaaaatttttttcttctgccgtcgcatcatgcagctgagcgcattgtcagatcccatagccacataagtttcatcggcggctgaacgcctcatctccgccaaaagccgtgtcggcttgactcggggtttgtctctcacgcgctcgagtatttgttgtcgtcgtttttcggcctgaatttctttggctgattcaatattaaccatccaaacttgttgtttttgcggctccggcaagtgactgtgatctttttgcatttggtaaccggacattccgttgtcacttttgctgacaatttttacgcgtgcagggcagtcacgcacactgcatctccacaactcattttgtttgtgcgtaaatcggaacccttaaaaacgaaaatatttcttgaaaaaatttttctcaccattaaaccaaatgcagacacctcctcttttcgtttctccaagttcgaagtttacgatggcgtgttcttcaaaatcatcgtcgcggtcgttgttgttctcattttgttcacggtgatcagcagatagcgtttcgttttcactgtcattgttatccaaaaacttgcgcttacgacatttttgaagattttcaatttttttacgattcatcatacgtctaaattcgtaaatttatgatttgtttaactaaacccagaaaaatttttagtggtaacactttaaaaactaaatattttataaataaaaagaaatttggggacgaaatgactcattttggcttggggggcgaaacgacgcgggacgaaatgacagcgcgccttcactaaaacacccgaaaaaatagatcaaacaaaaacacaagcaaagatacattagtttaatgttattgtaattttcacttccattttaatgaccatttgccatgggatcggatccgctcgacaaatgatgaatttattttgatttttttcaaagtattttacacttataaattggcacctttattgtgcctacccctctctattcacacaattttgagtcctttctcccgttaatcgctaatgaataaaatttaagtcgtaactcaaaaatggattaataaaataaatgtcagattcgttttctgcgcctaaaattaccatagaaaattttgaaaaaaaccgagagggttcagttttttttctcgaaatttaaccaatttttaacccactaaaaacaattttgttgccatatagccaaataaaaattattgtgccattgtaagtacaaacaaaaccaaactttatgttttcatccatctccatatttaaatcaatttaacaaaagttgttgttgtgatcaattaagataatttttcgaaagcgatacaatcaatcaatcaattaaaaaaaataatcgtaggaaatttcaatcagtataatttggcaaatgccttccatttaagtaacaaaatgaggccaaaatggttgggacaatttgggtgttagataatgaataataataatgaactattagaaagggttcacatacaaaattcgaatgaaaaaaatgaagtcaataatggtagttgaatattttgagtaaataatgccatacactcattaaaaaaaataggacataatctagagaaaaaaaaatttttttagagtgtattttaccgctntaaatgtcttaagaattttaaaatt

SEQ ID NO: 13838 - DNA, 1292 bp, Heterodera glycines
caaaaaagcaaagcatatatggaatatgtgagagaacgaccattttctgaatttactaaaaaaagttccaataaatctctaaaataataaaaaaaattgtataattaaaaaatgatatagtggcagcagtggcgataggcgccttgaaaagttcgaaatttttatcatttttaaagagttataccaaatttcgtggatttttggaaaatttgtatgcaagaaaaatttcgcttttttgaccccctccccttttcagttgcttgtcactcatcacaaattccatataaaacaaataaaatgccaaaatctgtcatctatctgcccattcgttgccgttcagtttcctcatttttcaacaaattcagtccccatcctctccacgcgccccttcatcttttgtttggcactttttttgccactacactattgctgcatttgttgttggtgttgtgccggtggcgcgcccgtcgccgccgccgccgcttggtaatggcgttgcgtgccgaaacggttgttgctgtggtagtggtttcggtgttgcggttgttggtagtaataatgttgctgttggttgtgaaggtgataattgttgtagccaacgccaccgccgcgatatgacgcggggaatgcccatggaccaccagcaccaccgccacctcgtccaccaccaccccgttgatagtgatggtgattgtgatgatgcatcattgtgcggacagcctttggttttttgttgaaataaatttttaggtatgtgtttcatcaggaagaaaaacaaaacaaaaatcaacggttataggacatttgcgacccgacaaatgcggtcggacttttgcggtccggacatttgcggcccgtttcttaagggccattttcggacatttgcggcccaagggaaaatcggacatttgcggccaacgaaacgccaaattgtcattcctttttcaaattaattataccaaatatttttatttaacacatttcaccaattattttgttcaatgacttataataattttcaactaatttttcgaaatatttttaactttttttcacaatttgattatttaatttaaaagagcttgctgaaggcttcaaccagcacatttatttttctcaatgaataaccaaagtgcacacaaactaccaatcttcaaagccagcattggcgagacgatactgaagagcatttaaatgtcgcaataatatttaatcaaaaatttattcgagattgtcataccgttgaattattcttttataaaggtggtcaattttcaaatatattttttcaa

SEQ ID NO: 13839 - DNA, 1572 bp, Heterodera glycines
  unsure (1)..(1572): unsure at all n locations
attttatttttgttcgagttcgggtcaggggttcgatattggcaaaaatgggtgctatattcgtgatcagcgaccttgaaaaccccttaaaacttattttcattaatttctaaaacacatttataggaatctgaaaatgtatgtttaaaataccctgtaaacttaaaaagtacccatttttctcatacaaatcccaaattggggcattttctcatccaaatccatagtttcgacatttttctcctccgattcctgcatttttcacatccaaatcccgaattcctgcatttttcacatccaaatcccgaattcctgcatttttcacatccaaatcccgaattttttttgtctcttcccttgcggcaacactgttgttttggcacccatcgcaggtgttgcgcaaagggtccggcacactgtgcgaggcgttgctgatggtgcaggcgcagcgcagcaacatcattttccccaacaaacagacggccaaggagcagcggatgaccgacgccggacacttgattctcagcgatacatacgtggtgagagttgacaaatgatgagcaaaacgagccgaggaatgggaggggggacctgaaaagcgaaaaactaaattaaaaattttcgtcccattcggtgcttggacattactcaaaaaccatcaaaaagggcattgttcagaaaaccatcaaatggaaaatttttgacaaaaaactcttcattaccttgcttaagggtaaccaaatttttaaaaactcttggtatcattcgatagctttaagtgttctttattagcctgcaaattttcaaaaatgttcgttaactttcaaaaagttatggctagaggaaccaaaaaaaaacaaaacaggtttttcgaacatttttgggaacttacaattagctaaattttttgaaatttggcgaacaattgaaaatattaataacaccgaaacatccttcgggcagtgcataaaattgaaaattgctttccttaaaagggtggccatgtggaggcggtggagtcgggcgtgttccgagcggacatcccatgccgattcaagctggacgtggaggcattggcccaactcgtggtgggcaaatttctggatttttattttcatcaacaacaaaataaattcatttttgcacaattaatttttttgaaacttatattttatttttaataaacccacatttttaatagacacatttttacaattaaatatgttttttcacactttttaatatggtttacaatttcaaatgcaatttgttccttgttaatttatcttattttgccatactttgcccttttttcttttttttctgtattaatccattcttaaatacccaaacccaagtccgatcatttttcatcaacaacaaaaaaaatcatttttgaacaattaatttttttttaagttatatttgtttttaataaatccacatttttaatagacacatttttacaattaaatatgttttttcacactttattaaaatttttaattggattttccaaaattgtattattaatcacactgtttacctttgtnnctaagaatcattttttaa

SEQ ID NO: 13840 - DNA, 1747 bp, Heterodera glycines
gtggtcaccgaggaggtgtgcatggcgtgcattcacaacgcgccggaagcgaagtgcaaacgcccgctgcagtggatgtggcgaggcgaaattggtcagtatctcatcacaattaacccgttaattaccccctttgatttttaattacactttcctctcattagcgctttaattactcctccctttgagttttaattattaattaactaaatgcccgaaatcgctttgactttgacagtgccggccagccgtggcgagtacgagatgatgatgctgcagttggagaaggaacggtttggcaaggagcgcaagccgtacaacgctctggcgcaggaggagcgggagaaaattgccaaggagcggattaagggtgggcatgatggcgaaacaatttggcgcaaattattgtatactgtaatcaagggttacggttgtccgtccatttttgatggtttcaaattttaaaggcattagggactgtcccagagttttgaaaatgacttttccgaatttgttttccccattcattttttgtttgctttgccattttgcaaaattcatttgtttgacatgccattatttttgccacagaatattgtcggaatgcgtacaaacggttgcacgacacgcaagaagttcagcggacaaccaccgtttgccaacgggagaaccccttttacgtgaacactgtgcgcgcatttcgcgaccgtcgctacgagtacaaacaaatgctgaaggtggttgtgttgcaacgggtgcaaaatcaatctagcgattttttcaaaattttatgatgtattcactcattattttatttttttatgaagaatttcctaagttttcagcgttttttggagaaattttcgagaaataacccaaaaaattttggaaaatcgccagaaactttttcaaattttttttcctttgaagttttcttataaaaaattcgaagattttttgaatttttttttttcatttttcggggggcggagaaaacttattgttagtgtacccccctcgatgtgtactgtatttattctactgtattttgtctgtagaaagccaagtcggcgctggaggcggtgccgtcggacgatttggccacccggaaacaggcccagcaacgcgtggtgctctacgactcgctgcagttggcgcacaagtgcattctgaactccttctacggctacgtgatgcgcaagggctcccgctggttctccatggaaatggtcgaattttttaatttaatttaaattttagtgattttttagttttattgtttcaaaatttaatttttatttatttttgctcaataatttagaatacttaaacttaaatttatttttattttactatagcaaattgttattttttagttattctaatagaaaatcattcggttaattaaatttttgttttccttttttttattttaatcgtccatttctttgtttatactttttatattatacctatttaattttatttgaaattggtattgtacatttttactatttttcagttaactaaaaatatcagaaaatcgaaaacttcactaatcacacagaaattttaaaaaaaaatatttttaattctttttaaacatgtttttacacaataataaatgaccaattcttttaattcccgaatttctaaggctaacaaaactaaaaattcgtgataatggaaaaattgaattaactgtaatcattaccaatttacaaattttcatcatgcaaaattttgt

SEQ ID NO: 13841 - DNA, 2611 bp, Heterodera glycines
tcgaaacatcattgttgtagaaattccgattacattctccacaatgtatcacctcacaaacatccaaacaagggaacccaaaccccatccggcaacactttttgcagcgctccctacattccattcggtgacggtcgggtcgatcgaatgtcacctcacagcttacacaaaaatttttgactgcgaaaaattgagtaacagattttaaaccatcccaatgttcgccctctcttatcacacaaacttcgttttttcttactcccttccctttgaaaattggtctaagtccggttttctaaataaagatatcacaggcagtttaggaaatcttcgtttaccatatcaaacgcaacgatacgaaatatatctgggaattccttgtcccaaaagttttgcacaaattcgaggtgtttaagcccaaaagctttctcctgggtgtttatcccagccttttccatcaaaaccaatgctaattcgtgttgttttttccctgtttgcatgatatggcggaatttattacgagaaatttcacgtccaatcgtttgataaagcttagcgaactcaagtgcataaaatatacctaaatattttcataaattgagtttcatttttcttctcactaaattttccctttggtgttggaatacgccctagttctttgacatcagcaaaaaaaggatgagttgaacatttttcaaaacttagatatttgaaatggaaattttaaagcagaaaaaatgtacatggcttaaaccaagttttttcatgacacatttcaacaaaaaaattatttcattaataaggcggtgggtattctggaaaatcatcaaattcttctggttgttcttcttttgtccaataattccatgctgcacaaagaacaaagagcaccagcgaaaccagcaaacacaacatgagaagcatggcaaaagagaaacccaaaaggaaaatgagaaattctgacatttttgctgcaaaaactaattaaaaacgcattgagatttaacaataaaatggcataaaaccacgaaaaactaaaaaccaattattgtacatttaatccattgtgactttcaaaaaccaaacgagatatttttaacagatttctccattcttgtttctgtgacatcagcgaattgaaagtccctctgatacgctttttagcccatgttgacatgagatgattgctcaagaagactgtagacaattttgaggaaggaagggcttcaacaatttcaaacaatagctcaggtggcagtggcattgttagctaaaaaagacacggtggcattctcttactatagcggcacagaaacaaaaaaactaaaacgaaaaatgactaaaatcaaaacgaatccaattattttttcgatattttctttctggttaatttctgtgtgcgcggcactaacaagatttggtttgtgttcgcccccttcaaccgtcgtctcgaggtcataagccacaattcggtatgctttcttctgtcggagtttgatttttttaatgaaacattgccgacccggatgatagactttgcaaattctacagaatttctccccgcacgtgtgtttgtttcgcgtattgtgtgtttccccacatttgttgcatttcttgtactccctacaagctgtctttttgtgagactcgaaacaatcattgttgtagaaattccgattgcattctccacagtgtatcgcctcacaaacatccaaacaggggaacccgaaccccatccggcaacactttttgcagcgctccctacattccatttggtgacggtctttggtcaaaatgtcacctcacagcttacacaaaaatttttgacggcgaaaaattgagtaacagattttaaaccatcccaattcgtgttgtttttccctgttttcataatatgtcggttttcacgtcaaaccgtttgataaagcttagcgaactcaagtgcataaaatatacctaaatattttgataaattgtgtttcatttttcttctcactaaatttcccctttggtgctggaatacgccctagttctttcacatcagcaaaaaaggatgagtcgaacacttttcaatgttaaaagctttgatatttgaaatggaaatgttaaagctgaaaaaatgtgcatgaattaaacaaagtttttcatgacacatttcaacaaaaaatttatttcattaataaggcggtgggtattctggaaaatcatcaaattcgtcttgttgttcttcttttgtccaataattccatgctgcaaaaagaataaagagcaccagcgaaaccagcaaacacaacatgagaagcatggcaaaagagaaacccaaaaggaaaatgagaaattctgacatttttgctgcaaaaactaattaaaaacgcattgagatttaacaataaaatggcataaaaccacgaaaaactaaaaaccaattattgtacatttaatccattgtgactttcaaaaaccaaacgagatatttttaacagatttctccattcttgtttctgtgacatcagcgaattgaaagtccctctgatacgctttttagcccatgttgacatgagatgattgctcaagaagactgtagacaattttgaggaaggaagggcttcaa

SEQ ID NO: 13842 - DNA, 743 bp, Heterodera glycines
cgtcccgagaaaaatcctcgctctcagatttttcgttgaaatctcagttccggcaccaaatttcggacctaatctcgatctcgaaaaatgttcgatctcgagcatcaccaaattgcaacacccacttgaacactcgttgacgtgtcaatgatgaacatcaggtcgaccgggtctttatcacaatttccacctgctgctgttgcagctgtttgttgcggtgtaactgtcgtcatgtttgtcaacaatgccgtcaatgttgtgccgttggtttcgtcttggcgtacattgcgtgacaatgacggcacacttggcgatttgcactccaccagtgacatttccgcttcgtccaagaactggcgaatacgcgcatcgatgtacacaaaccatttgttgcccgcatacaactccaactccctgacaaattaatgaatgttacaaaaatggaggaaaatgtgagaatatttcaaaaaatgctttctttgtgtttttttattttttattttagggggggagtcaatttttcaacccccttcctttcaatgggcgtggggcgtgggggggggggatgggtgaaaatccaacgcataattaaagtacaggctatagggaagctattccggaaggattcggtctccccataaatctgggcgcatcggttcggggggactgccccgaaaacaaaaaaatcgattttttcaagtgctcgtttgtggtactcaaacaattatggggagcaaaaatcc

SEQ ID NO: 13843 - DNA, 2837 bp, Heterodera glycines
ttcaaattaaattcaatttattatttatttcatagtcccttttaattaatgctaataatgcgcaactttcagttcttcgtctgccatgcgttgaagagactgaacaaaacacaatacataatatacgattttcatgaatgctgatcaaagaaagtgtggtggtcatcggcaaaaaataatttgtcaagccatggatttttaattttaaagcacttgaaaatttataaaaattaaaaactcaaaattttaatttggaccaatattcagtgcaaaattagtaaagtaaaatattttctccgcgttaaattttatgccggaactgctgatcactttccctctctaagcatgttgctcattccgatccgtgctggcgcgtttgttaaaactgccaatgggtttgaaaacaaaaaatgggtaaaataattaaattaatagcctggctccaatttatccaaattaatatttcgtggtatcattcaatagctttaattgttctctttcagaatataattttcctaaatttttaacttaagtataaaaaaagttatggtcacaaaattgcaaaaaatcttaagtcagcattttttgttcagaacttttttgaaactcaatgaaattttctaaaattttaaatataaatagagaattcttagggctatcgaaatataaattaattttggttaaatttcattttaaagactttaaaattttaaatgtttattattatatatgcattaccattgcaaaaaacatagcctgttcaatgctttataacttcttttatacttaagttaaaaatttaggaaaattatattctgaaagagaacaattaaagctattgaatgataccacgaaatattaatttggttgaatttgagccaagctattaatttaattattttacccattttttgttttcaaacccattggcaggtttaacaaacgcgctggcagtttttaacaaacgcgccagcacgaaaaaattttatgttataaaaactatccaaaaattaaaatataaataatccaaataataaaaaaattttatagacagacacctgaagaaatagtcatggctgacagtaactgcgtaaacatccgcttcagctgctcgaagtcggaccgcagaacgtatcacatctgcccatggatcttgactggtgcctatgaaaataaacaaagatattttcgataaatttctgcgcaattagctaggaaattaataaaaattcaacaaaaattttctatcccttggcgatgcttggacaaatcattcaaaaaaagaaattaccgtccgagattagcacaaccatcaatcgggtgccttttcgtcgatgtttggccacctggtccattgccaaattcacaccactgacaacctgtaatttttaaaattttaatttttaatttattactaggtcgttttgaagcaaattcacccactgctgtttctcttttctttttttttatagtagcatacaaaaaaataattaatgtaaatatgtattgaatataccaattacaagctctgactattcgctttaaaatgagctataaaatcattccaaatcattttttaaattattaatggcgctgtttgttgagagattttttataaaatgaatttatattaattaaaaaatatttaatataaatatttcattcttttaccgaagtgccgccgcctgtgtgattaatgtgcaataatgcgtcaaggatgaccggcttttctttcaattggcccatcgtgaattgcagttgggcttttttgttgaacgatactgctccaacttggacacgttgtgcaaaatcttggtccggcaagcgtttgacctattattaaattggaaaaaatcattttttaaagatatttgcatattttttaaagcccaccaaatccacggcaaattggagctgttgttcaaatgcttcctgcacactttgggaagtgtcgatgatgaacatcaaatccacctgtgatgacatttttttaaaagaaaattcggaaaaatttggccaactttttcgagttattattttttatgtatattttatttatttattttttaaatttatttatcgagcaaccacaaggtactaaaaagtacatttacagtggtgcaaattaaaaaattaatgctaaaggaacccaatgtttaaggaaacaacaatagcattaagaatttagtgtttctaggagatagtttctgaaaatcttatatttctgaatttgcattgcctctttaggcagcttattccaaaagatacggttctattaaaaaagttattttttgttttagaaatatatttcttttgctgaagcaaaaggggttttctattgtttcggtttgttattataaaatagttcatttgcttaaggtgtgtataccctcttagaattttttggaccatgactaagtctgtagcagttctccttatttctaactttttaagtcaatttctaatctgtgttcataagattttgggactaatccacatcttttaaaggcaatccttgtaaaatatttttggattctttcaattctacatataagatctttcttctgaggattccaaatttcatactctaaatgtggccgtatatagcttttatatgcttcacttctgagcatttttagaacttttttggggtataatcaaaattttgtttttaataatcccaaagataattggttacaaaaagcaataaaaattcaaaggtattcttaggagaaaaacaattcaaaaacaatgaataaagtataatttagggtactttttgctgcgataagcataaaaaattgatttaaaaacatttgaaaaacctatgaaagctt

SEQ ID NO: 13844 - DNA, 479 bp, Heterodera glycines
  unsure (1)..(479): unsure at all n locations
ttttaaaaactccaaatatcgtattttccaacatcaactcttttaaaaaaatctcacatattttctttaaacaactcattttaatttttcttttccattttttataaatttctcaataccaccacttccttccactacaaaattcaatttattattcatccattatcaactcaaattataacattttaattatccaactaactaaccaaacaaaatctaacacttatcaaaacaatccaaaatcatcattactaccaatcaataataaaacaatcccaaaatacataaacatctactccaattcaataataatttattaatttaacaatttcaacactctcccctttatattttaccctaatattttatccattacttaaacaacacaaaaatcataaaggttttttctaaatcataattaatttncncttaccctcaggaggtgtctgcgccagaagaagaagaagtaggacaaagca

SEQ ID NO: 13845 - DNA, 5661 bp, Heterodera glycines
  unsure (1)..(5661): unsure at all n locations
taaaaagcagaagtaataaattgttttttacgctatatatttaacaattcaatttaaataaataattttctattaattcaatgtaaaaatagttacgacataacttttcaaatatatgtagcatttttatgctagtattattaaatttattatttaattgataattagcatataaacaattatttattctattttcacgtttccaaaccgagtacttcgctattcttttgagagtgtttctatattaataaatgcatttttatgttagttattttttgaactcttaagataaaatataatttaattgaataatgaacgatttgggatgtgctttggcagatcaaattttcttatttcatatctcttatcgtaaatgttaaaaaaattgtttttaataaatgttcctcaacattaccttttcaaatttttattttagctattgaatttttagtttttgtattataatttattttattttatattgatgtttcattatttttgaagtgttatttattaattgtagaaaaaatcattaaacattagtttgtcttttttttgaaaaattaagaaattgtttcttttattgtcacttttttattttattaaatttatttttaatttgtaactttacactaataataatgctaataacatagctagctgttaaattttacataaatcagttaaattttattactgaaaattatgattattaaaaaaataaatgttttcttgttcaaacattgcctaaacttttcgggtcagttcacgataagctcaaatgtgggacacatttagctcaaatatcaacaataataaggctaacattttaatatcaagcaataaaattaatgaaaatcaagttagaatattttaatatttattaaatttctatagaaagacaataaatatcatttattttcttaatctcaaaatgaaaaaattaactaattacataataagtgttttatatattttttatgatgaataagaaatttcaaatttaagaaaaaaccaagaaaattatcatactttaaattctaatcaaaagcttaattaattaatccttatgcattttcaaaaaaaaaaaaattaataatataactaattaaaaatctcttatttgttttcttgttttttgacctcattgttggcactcgtttaaaactttctatgataataacaaaagaaaaattactatagtattattatttttttacaatttacacaattaaattcgagctaacaatctaaaagaaataataaaaaaatgtaaggcaaaataagcattttaataataataaaaccctagcaaataaagattctttaattaaaaaatataatttgaatcaaaataaataatataatataaattattattataataatccatcgaaaagcttttaaacagttaatgaaagttccaattttgtccccacgttaaagcaacaaatggaatggcttccactcggttatacacaagcgctatgacattccatgagatttattaaatgataataattttattttaattataataataataataatataaaaatatttaaaaaaggatgtgatattatcatgttagataaataaataaatacaagaaataaaaataattgtgcaatttcttattttgaaacattctaacttttattaaaattaatttatttaattatttattgaaaaatttataaagttaattttcaatacaatatttatgaaccaccaaaaaaaaatcataaaattttttatttacatattggtacatatttttaacttttttggtagtactgtatttcagaatcacatttaattttgaattaactttaaaaagggttctaaattttaaaatgctttttattaccattaatttttaatgcaattttcacgctcaaaacccataagttcaatgtcgtatttatttaaaatgaaaaacttgggatttttataaaatttttcccggcggcacctatcggctccatgccacaaatcctttaagatttcaaaacttggacctaaaatttcccatttattagtgaaatcaaatgaaaaatattcaaaattcttttttttctaacgcggcgcctatcgcggtaggggcgaactcgtcgagccaattccgtctcagcaaagttaaaaaatctatctttttctttttgataaaacagcaaaatagaatcattccgtgctgagacgaacctaaaaaagtatcagttataatgaaaataattaaatttaaatgttataaagtgagtaaatcttataaaaataatattatgtaataagcaatttcaattacatactcattttatgtcacataaataaataatgatttagcaatttatgaaccgaataaatgtaattttttgaagaaaaattcgttgatgatagataatatttaaaatgataaacacttgtttattattttttttacatatattcattcattttttaagtttctagctagctaatactttctgataaaaattgatatcgatgtttgaattgaaatacgagaagaaatgttgcgtaaacataatgctaaaatggctgcaaaaaacgctaaaaattagaattttataggatttactcactttataacatttaaatttatttatttttattatacactgatacttttttaggtttgacctagcaccgtatcattcaacttatatttttctataaaaaagcctttttgtctaaaatcagttattacgcacaaaaaaacccaatttttaccgctggcgcctgtcggcgccgcctgtgaattttcttaaaactggcttaaaaaccaaattttgtcttttttataatttcctattgaagtatgaattaaatttgttttatcattaaattaatattttattaattattttttaattaacacttttttagttactcatggacgaacaaaaagatttttgttgtttccatatattaatttgaatttactttgattactaatgaactctttactaaacaataagtttaattagtctaaatacttttggcaattaaattaatgattttaaaaataattttacattttttattgatatttcctttttatcacttttgttttattttaaaatttttaatttcacaagaaaacttgaaaaatacatcatagcttaattctgataaattaaattttttttcaaaattggggtggatgcttaactactccaaaacagtcctcaaaacgcaaaatttggtcattttttgaaaaatctgttaagcgattaaagtttttctcacccccacccattcctcaaaagtttttttttttttgaaaaaatgcggcgcaaaaagtgtcgtgaaaagaataaaaaaatttcataatggtcgacatgctaattacttcaccaataatgtaatgaattggccgatgaattgggacgggccaatgatcagaaaattcagcagaaggcacaggatgaaaggatttgagaagagcattttgccagtgtgcagcaacagttgctgttaatgaccgttaattaattaattaattagcaaccgggcacagcgcctaatctgtttggcgtgtcacagctatagccctaggaattggacggaaaacaattgccgtgagttatatttggttcctcaccatgccataaacgcaaaaatttaatcattaaggataagaggaaaattaattttaaaaaagtttggcaaaaaataaattaatttaaattgactggaaaactatatggttataaaaagtggtttcgatcacttattactcaaactcatagctaaattttggtacattaaaaagaaaataaaaatattttttaaatcattaaaaaatgaatgagtcaagcatattgtatttataatttatttattttaacttaaaattttaatatgaatattaagtattttgaccaattttaagtaatcaatttttaaaagaatttgttttttaatctttaacaatattccatactgtactttagctggctggccattttcctgtgacttgtcgctaattaattaattaattaaaggtaaacatatccaagggatctgcccttcacttttctctaacattttcagaacaaatttgtaatctttttttttctccggaggtcatttggtctttatatcccactcattaatgagtcattcattaatggtcgaccgttgtacaaattcgacatggccactttcaatgtggcccatctcatcactttaattggcgttggggtacaaaaatttaaattaaattttattcctattttttataatatttgattttgttttagtcaattgcttcatcggttgttgctgatgagcaacaaaatcaaaacaaaactcaaaatggagcaggaggcttaaagcatttgtttggatcagatggtaaaaatgatatttttttatttgaaatttatttaaatttaattaaataaatgttgaacaatattttaagggttaatttttgcttttagttttcactgagcttcgggacaaacaaaatgcgatggccgagaaaatgtcgggaactgaggccaaattggaaaagcaaaatgaaaatggtaagaatttttttaattgaatttttatattttattntaggaatgcgcgaaacccaaactttgttgtccaccaaattggaaaaacaaattgaaaatggtaagtatttttatttaaacataaattaatttatttaattaataaaataatttaaaaattttgtttagtatttactgaactgcgcaacaatcaccaggggctgaccaccaaaatagaaaacggtagaaaatattatttattttcttattttggaaatgcgctttaggaatgcgcgacagccaaaatttgttgtccaacaaattggaaaaccaaattgaaaatggcaagttttattctttatttgcctatataaattttggttttgatttaaaattaaataattttttatttaaaaaaattatattttttatattctatttgaatttgttttttatatttttttttacaaatttataccgttcaattcctaaataatttccaattaattgccagtattcacatataattggagctttttagagaatatggtgtggtatttctattcatttgtatttaggaatacgagagaatcaaaatgcattggccgagaaagtgtcggaaactgaggccaaattggaaaatggtggaaaattaatattttttctaaatttaatatttttattttaatcatctgcaggaattcaaaacaaccaaaaggcgttgtctctgatgaagaatatggcaacattagcggtttttacaatttaaaaaaattaaaaataaatgccaaattttatttttataaattaatctataatttatttagttgttatttaaaaattaatatgaatttgattttacagttctttcacttccctcttccaatttatcatcgatggaatgcctcggattgtcacccaaaaattgtgatcaatgaaagcacaaatgccattcagcgcaacggaacagaaagtgaccagaaatcattgaaattgaatgcataatttttactaattgaataattttttttaatttgtttaggacatattggcttttcgtgccgagcaggaccaattcatatgccatctgctgttggtcgcattggcattatttatgcggaatatcggattc

SEQ ID NO: 13846 - DNA, 2573 bp, Heterodera glycines
gttgccacgacacaaaataggcgcggctcatcatccacattcacgacacacccgtgagtggcctgagttcaaggagaacatttacaaaaacggtcaaatgttcactgaccgttttgacatgtggatgcgtgtatggtgcagcaaaattgctgttttccaccaggagctctatgaaaagagtttcttcggaacaatccttggctcaggcgagtcaatggagttccaagggcgtggtggcccacacgcacacattgtagcccagactgacctggacgcagtcccagaagtcatccaggaatacatatgggctcatattccacctttgccagacaaagatgatgactccccaattgcacaaatgcatcgcgaagtacgagattatatgcatatgcaactgcacagatgcagtgatagttggtgcggtccacgtgaccccaactttgggcggtgtaaaaaaggcttcccagccccgtactcgaaatgtacgattctgcacccggacaggcccgcgttgtattaccggcctagcccaaccgatggtggtgccaaaattgaggtgaacggcttaatatacgacaactcacaggtcgtgccgtacaacccatacattttgctgcgttaccgagtgcactacaatgtgttattcgcttatggtaacaaagcgaacatcaaatatgcactcaaataccctttcaaagggcctggacattgttatgtcgagtgcaaagaggagtccggcagcaaaatcggtatcgatgagccggctcaatatgccaaaatgaacttccgtggtgctacggaagcttttgcagttgtgcattcaatgcaatttgcaaaactctcacatcacgttgttcagttgtccattcatttgccaaaccagcagcccgttgtatacagggccttccaactggtgagcaaagctgaggaaattcagcgaggcgagctcccagagacgccatgctctgcctattggaagcaatggcaaaacgaatggcagcatgttccttcgctcaaggacatgctttttgaaaaagtcccagagcaatttagatgggcaaaagatcgatgggtcccatataaaaggaagcctaccaagaggcccccaatcggtcgtgttgtacctgtcgctccaaaggacattgaaagatttgcactttatgtgctgatgcgtcactttcctggtgatcccgaccacttaaaactggtcaatgggcagcagtacagcaccttccaggaggctgctttacagcatggtcttcttgaagatgaccaaatttggcacaaaacgctcggcgaggcagccttgcatcgctggccggatcagatgagatggctcttcgtgagcatcctcgtttttgggcagccaagcaattccctggaactgtggaacaagtacaaagaccaaatgtacaatccgcagggcattatcagtgcggctatacgccaagcacgggagcaggaagcgctagccgacattgattggcgattgcacttctttaactcaagctgcatgcactgtggcctcccagatccaccaaattcaaaagccaaaaatatcaatttggcaattgaagaatatttctatggtgatgatggtctgaatatgccgcctggccagccaaaacaaaggccacaacaaaacaccccacctccactcaacagcgaccagcaaaaggtctttgatgctgttgtgagggcaatacagtcggacccgaaggaccagactgtgcctcgccgtttcttcattttcggcgatggaggtacaggaaaaacattcctgtttggccaaattatcaagcgcttgcgcaagcccccatacacctataaagtgcttgctacggcatccactggctgtgcggctattttgctgccatatgggaaaacagctcattccacgttccgtctcggcagagaagtctcgctagacaagcttccaagcattccgcttgaaagcttctttgcccgacggatacgtgaggcccaactcatcatcattgatgagatcaccatgcttcataacacggtgattgcggtaatcgaccgagtgtgcaaagaaatggcaattcgccagcacaaggacctcctcttcggaggaaaaacggtcatttttagcggtgacttcaaacagtcactgccggtcgtgcctcatgaaggcttaaccgctcaggtgacagcctgttttcaaacatctccgttgtttgggcagttcagcacgatgaaattgaccatcaaccagagattgggccaaggtcagcaagcgtacttgcaaatgtgccgccaaatcggcctcggagagaccggagaacacttctggattcctccgcagttcctcgtaaagagcagggaagagttgatagactttgtctattccgacttccaaaaactccttggaaatgacatggaactgctcaatcgtctgatcctcgcacctcacattgacacgtgcgatgagatcaacgaaatcatgatggcgaatgtgcctggtcaagtgcgcgaatatttgtcttcggacagccgcttgacgagcgtcactggacatcgatgaaattgagtcggaagtggcagcgttg

SEQ ID NO: 13847 - DNA, 712 bp, Heterodera glycines
catttttaatcattagggatgtccaaaatatgtacaaaaagtggtcaaaatatgtacataaatatgtaaaaaaaaatcccgaaatatgtaagaaaaacccaaaatatgtaccaaatatgtaaataaaatttttaaaattgttattttttggaaaaaaaaagtcttcggatagggtgaaataggcacaaaatgccataaaatgacctaaacaggcctagaatcacattttaatattttaaaaattagtttggttaatttttatttttcacaagaaattttataaattttcaaaaattttcaaaatatgtaataaaaatatgaaaatatgtacgaaaaatttgccgaaattttggatttttttttgagaatttccggaaatttcttaaaaagtcctcaaaatatgtaaaaagtataaaaaagtcagaaaaagtccaaaatatgttaaaatatgtataaaatcccgaaatatgtaaaatatatataaaaccccgaaatatgtaaaaatatgtaaataaaagtcccaactgacatccctagttatcattatttaattaattattttgtgattttttgtgaccaaaaatccgctccctaattatcacatccatctcaattgttcctctttttgccaaccggtgcctctggcgaaccggcccgctccccctcccaccaattgtccctctcttcctattgcccaattgatcctcccgtc

SEQ ID NO: 13848 - DNA, 1945 bp, Heterodera glycines
aacttaagtccgcgatttgcgagaaagcaaatagcaattatcagggatgccaaaaatatgcaaatgcattttttcccctggattctacgtagtctaattagtaggaaaaacatcttcttttatatatttgcgtataaaagtcgggacttttatttgcatattttggctttttctgcaaatttcatgcatattttgtttttttgtgcatgtttggtgcatattttgcgatttttgtgcatatttgttgcatatttcacgattttatttgcatatttatacgcgtatattggctatttttcgtgcatatccctggcaattatgtaaaaattataaaacaaaaaattttcaatattaaactaatattttttaaaaattatttctcagtgacgaaatgatcggccaccttatttattgtatgtaaatagttaaagcagaaagatttttgcttttgataagtttttcccaaattttaactctttttgaaaattttaacggcgccaaatacacatgccaaatttaccacgacaccatttttgggattttcgtctttaccaatccattctttagtcataaaattattaatttttctattttttttaatgtacaattcttgatcaaatttcattaattatacatatagtctatttagctatttacccaaccgcgcacaacactgttttttaggtgctggctctaagtaaattaacccctgcaaattgggtgttttcaacataaatttgccatttaaaaaaattattttctttcaaataaagttgtgacaaattttatatgttaattaaaataagccaaccagcaggcggtttttgcgaaacgaccaagcacaaaatttggacccaattgtgaaacaagcgtacttaaaaatgtccttttttcagtacaccatgaacaccaaattaatactccttctaatttttgtcctcctcaccaattctgttgcaaaaatacaagacgacgttaattctgtcgctcttatctccacattgaacccggtgctaagctttctaatgacctctaatcatcattaaaaataattacgaagtgcgaaaaacaaaaaataaaacaaatgttaagaaaatggcaaagtgcatgcaatttaattaaaccgaattttatcaaaatgtttaatctcctcctcctttttaaataatcaaaaagaataggatgagtggttgggaatttacgagatactccaaaaattggaccaaatttcccttaaatttattttaaaggctgcggccatggcagcaggaaaagcacgacaaggaggagcaacagcagaagaaagtgaagccgaaggtgcccaagcatgtgagaaaggcgaagggcgcccggtaaatgcgtcagtgaaaattttattgtcataaaaataaattcattgggttttcttggtcattgatcacgtattcggtattcatttcggccagttccaaacccggacccaaattcgaacaaaaagtcgaaagtccaaattttcgaatttggtatttttttattttaaaaaggcataaatgatctcttatggaaggatttatggcttcagtatttaaaatgattttgaatcaaaaatgctaatttcgaaaatttgaactttcggacttttgttcgaattcgagtccggggttcggaattcagaaggatgtctacttttatattacaatatttaatgctacagaaccttattttaaaatatttgtatcactggcgcattttccggtcacgaggcggaaggagaacggcggacagcaatgaagctgctgtctgtgattcgttgcttggcaatcgaatttttgataaatcaaattttgaataattgttgaaaaaaatattttatataatttttcaaattgaaggtaaattttctgagaacttcataatgaaaattgatagataaggcatgcaattatttcagagaaaaacataaaat

SEQ ID NO: 13849 - DNA, 1671 bp, Heterodera glycines
tttatgccaaaaataaatccaaataaatccaaaacgaaatttcagttttctattttttcaaaataaatacttttaattttattttctattttttcttataaaagtttttcatactatttatctattttaaagatttttagcttaaatctaacgaatttcaagaaattttgagttaccctcaattttggaaaatttaggcgctatatgaaaagttaccacttttgaaaattttttcacttttttttgaaaatttttttttgtttgtttttttaatgcagaatttctattttaccagatggtacgcatttcacgttatttaataattgaaaaaagtgaaattttggaacagcaaaattgggtcaattttcgtgaaaaaaactcaacatttttttctacacaaattttgttgcttaatatttatggggaaggtatgttttatatttttgaaattacttggggctatcgaatggtaccaaatatttcgaaagacacagatggtcaacagacaaatctcatacacactgatactgtacaaatgatacggtataattttgcctcacccggccaactcagtcccttctccccaccccaattattagtcagtttgcccacccctttctcctcccctccgttgtgactgtttgccgtgcccattgggtatggcacgtcctttgccttcggtgccatcattccgttgggttggcttcgttctgccgtttgtgccgtgtcacccatcgccaacatggccttcttccgctgacactttctcgaattttgaaaggaaatctaatgggaaaagcaaaagaacaactgaaatattcctgtgaaagaaatgaaaatattattttacaaacgaaaaaaagacatcgtaaattaattcaaaatcaaaaatcgattagaggcaattaattcacttatcaatgatcattcagacgggcaattaagaaaagtccctcccttctgttgcttctgttttatgaattcgtacacaaattgaaagaaaaaagaatttcaattcattggccattttcactttttttagcgtcgttatgaatgactcttcctttgacttttgtcgtggcaataagtgcactttttcatttgtcctcagcacataattagggggagtgcggtggggtcggactgcttctgctgctcactttggtgccatttgcacatggaatggccaagggttgtcgtgtcatggcccacccctcccctttccctctgtccatgtgtaaatcaatacaacccaacaatggtggccgattatgtacctccagggttggattgcctgatcagaaaatccagttccaatcattatcttgtcaatgatcaaccgcggtaatgagagaagaagaatgaccgttgacaaatggggggatgcttttgcatcgttcggtctctctctctctctgttcaatgattgcccttccgtcactttgtgcttttgcctccccgtgcttccgttggactttatgcccatcttttggctcggttatttgttgtcctttctcattccccccccccctccccaattctgttctttttctccattcgcatttgtcgtcgttttgctctaacgccgcttgcgtttgaaactttcttcctcaccaccgccctatccatccccgacactcactcatacataaataaataaaggagtgaata

SEQ ID NO: 13850 - DNA, 2490 bp, Heterodera glycines
  unsure (1)..(2490): unsure at all n locations
taaaattatcagagtgccgaaaatcgcatgtgatctaagcctagcaaaaaatggtataagtaaaaatcgtaatacgctcaaaaagcttctcaatcaatttttagcgcttccaataccttctacaatcgcctttatacatcccattaagagcgctaaaattatcagagtgccgaaaatctcatgtgatataagcctagaaaaaatggtctaagtacaaatcgtaattgcgctcaaaaagcttctcaaacaattctagcgcaggggggaaaccggcccgggggaccgtccnccaattattcgaagggaatttaatttgatagtcatccgccaagacgactttcactgaatcactactcttggctgaccaccaccattccttcattgcttaatgctttgacttttcgccttacattgtgccgttgtgcgacttcgtcgcattgtatcgtttagacaaacacgaccatttgctctttttcaaaagacacttttgccaattttaattggaaatgtcatttcagccaaaattttaaatttcgattaaatattaaaaaagcatttgcttttgctctgaattgcattcgaatgcattgaatttgctgagaagtgcctcttctctcttctctcctcccatctttgatgttcgctttcgttatttggcgatttcacttccgttttttgccgttttttatttcttttctcaatttgctcattcctttttctgcgcaccaacgttttcaacgaactgcgaaattattagtcaaggacaacgaaggcataagaaacaacaatttgattttggtaaaagcgaacagaaacaatgaccacgcaactaaaggtaattgattggattcaaaaagatggaaaattaactttttacatagattttgaaaagattatgctggataattcctcacaaacagcggaacgcattaatagccatattaacaaacatttaacttctcatgaaaatgaagaaagtgacacttcggaggacgaagaggaggaggaggaggaccaaggggacagcgatgtcagtgaagaaaggtgggattggacatatttcaggaagggacttagggattttggaaaatgcaatttatgggttaaattcggatatttaagcctgtgaaatataggaaccctgaagatctgatcaactctgagctttctgcggttaaattgcccgactctgagcagcagcgaccggacgacgccgtgtcgattataaacagtgcattcagcaacagaaaatcgttcagctgtccaaaaactaaaagcgaccttctaaccggtataaaaattaaaatatttgtccaaaaattcattcaataaaatgacttcaaatgaaggcacttcgacggcaaatttaagtcccgaggacattggcattatcgcatcaatgggcgactcattggccaccggtgccgggctttggccgcggacggacatcgaattccgcggtgccgcctttcccattgggggtgatgcgacaattggtgggaaagaaaacaaatattgaatcattcattgttgccctaaggaagatacaaataaatataaattattagcccattaaaaaacgatttggtcaagaattggtagattttgggcaataagaaaattattttttacttaatcctgtaaaaaataataaaatttcacaaacttgccaaattaatgttcaaaatgggctgaatgataatactttttcggattgtttggctaattataaggtagttgcttcttttttaaagcttcgcttgcattatttcctaatatatttcattcataaaagatggtctcgtcaccgtccccaacattctgcgcgagttcatcgactccaatttgctcttcggagtttctcacggaatgggccaacgcgaccaattgcccgaaaaccaactgaatgtggcagtcagtggggcgagcagttcttcgatgcctggacaggtccaagttgacgacgcaccgtgttttatatggaattcttccgtgtttaggccgtcgaattggtgagacggatgaagcgacttcgggaattggatgtgttcaacacttgggctttgattattgtcaccattggaaccgaagaggtgggtaaaattagccatttttgcaaaaaaaaaaaagaattagattttcaaaaggtctgcaaaaattgcacgggtccaaatacaaaggcactcgtccaggcattggacattttgaaccgtgggattcacaaagcactggtgattttgttgggtattagtgccattcactgcaatttagacattttgaaaatgactttcaggcccaattcacgtcacttcgctgtaccaacaaaagttcaatttgctcaagtccgtttaaatattttattgtcttttttgaatttttccaaggttttttaaggacgcgttgtttatgctctcagaataaagacgacaaatttatgagtgcactgagcgaagaatgggtaaaggcatttgaggagattcagacgcacat

SEQ ID NO: 13851 - DNA, 2645 bp, Heterodera glycines
  unsure (1)..(2645): unsure at all n locations
acaatttataanaagcataatttcaaagaatataaataatacaaaacnagcgaaagtatcaattaaagatgcatgttgattttgatcctctacaagtggattggtccacattctcgtccgagtgtgtgcaatttggtggatacaacatttatcgggggttgccctatcagcgtggagcgggagttggcgcagtgttcagaagtcttatgagatatttgctgccgattggaaagcaaattggctccgcaattggacgtcagggaatggaaagcggaaatcgagtactcaccaatgtgctggagggaaaagacctcagagagtctctcgttagtgagagtaaggcaggactaaagaatcttctcgaaaaagcagccaacaacataaacactcagaagggtcaaggttttgattttaagcgatacaaaaaagactcggctccaaaaattgtaaaaataaggcgaaaaaatataaataaacttcaatcgtcaatcggtccaccaatggttgatgagaccaaaaataaacgtctgcgtgttgactcattaggaacctattaaaaaatgacttgcctacaaaaaatcagcgacagcagtcctctagcaattaacagtggcctaaacattttctcagttccaccgaccaatgtgtccgttgttcgctcattctttcgtcaggtgcttccactcgcaacaatcacgcaagaatcgccttacctatttcggctttacagtgacaatttgtggactgatttatctcggatatatctttatctcgaactgtccattgaaaaaccgggagcaaacgataaatgggttgcgatagaggacgcggatactagtgtctctgccattcaagggattggtcaaacatttgtccagcaactaaaagttacggttggcaacacggaagtatacgatagcggaaacctatacccattcaaggcctatatcaccaatgagttaagctttccaataaatgccaagaaaaattttcttggttcaacagggtattatcacaccgtaaaccaagatgactcaacagacgaggggttcaaagagcgttgtaaaattttttaagggtggaaaaaatgcgcaatttttctcccgtctcgactttgatttgggaaaccaagagctttatctcttaaataatttggacttgctcttcacaatttacaaggccaaagatgtctttcttttgcaaacattaaaagcaaatgattccaccaaatatcgtttgacagttcacgatgtcaagatttatgccaaacgaatttgagtacaatgtattcagcgcaaccattcctcgacgtgtgacaatagcgttggttggcaattcagcatttcatggtgactacaaactgagtcccttcatgtttgaaccgtttgatttgcgtgagatttcggtacatgctggtggcgtagtttacccagctgttccttataaactaaatttttcaaatgatcactttgtcacagcctttgttgacatgtatgaggcactcggaatggctaactctgaacgttcatttgacatttcaatggcccagttcaaaaaagggtggaccttttttgtcattcgaatgacatccacgcttgacgacagctgtggatttgagctgttgagaagcggtacgacaaacgtacgagcaacattcaattcaccaattccgcttggtggtgtagagatgattgtcttgggtgaattcgaccaaatgattatggttgattataaccggcacattgttaccgattcaaagcttggataaattataaataaataaaaatattattatgtaatgttaaaatgaataacaccaacacaacaaaacacgacatacaaattttgaattccccagaagagcctaatgaaactcttttgcatgtactgcttttttctcattatcttcttgcatttcctgtgtttttgcttttttggttcgttttaattcggtggcttaaaagtcacggtcacctctcgcccagcgaggccgagacagtaatggaagagatgaaaaatatcccccgacacccaccaatattttttgcagcaaaatgatgcaagattagagaaaactgacactgaactctctcttcagtatgacaaaatcgataatgacttatgctgatggagcattctcaaagctactcattctttttcatcattcattttacaaaaatgtctccaaatgaatgttctgaccgtccctttcaacaacccgacaatgtacaacagccgcatcaacaaccagatgaagacgccgagttgcgcgcacaaattgaagacgcggaagaggatttgctcttgaattggtggcgtgaagatccgacaattgtaagcttgtttttcaatttagcatttttaatttcttcacgtttcagattcgttttctttttggacatggacgagcccctgccatagaagccgcgcttcttcaacgcgccgaacgtgaggcagaaattttgcgcgaatatgccgagaatcaacaacaatgagaaggggccattcagatatcatgtcgtatgttatttttcttatttttttttttttttattatgatgataagaaattttacaatgcagaactgcggaggagaatggcaataagggatggggggggggactaaaactcgcgcaccctgaccg

SEQ ID NO: 13852 - DNA, 1719 bp, Heterodera glycines
cttaccaaatcgatttcatctcaacaagtttttcctttgaacatttgaaatcgtcaattatgtgcccaaatgttcgccgccgtcaaagctttggcctaattgtttacaaaataatttataatataaattattcattatgaatttaatattttgaccttttcaccgatttcaaaaaagtttgctttccatgcctcgctgcttatctgtccgtgccaatgatggtcattccgcgtgccattcacgacgttcttgaaattttgtataattttctattgtttttctcactttttttcatttatggtcgaatttttttgattttcaaaattcatatttttcacaacatttttttattacaggaacatgtctcatcccaatgcttttcgtcattccaagtgtatcgaagcatctgatcaaacagagggagaagaaataaattaaaaattgtaatactgtaaaaattatgtacatttttatagattactgtacaaaattaactctctatgaatgcagttctgctgaataacaaaaaaatattaaatttttcagcagctaatttattaaaaactccgaaagccttcgaaattctatgaaaaaaatataacgtaaaatgataaaaatttgtttcaaaaacaaaaagttttttgagactttacaaccataatttttttttacgcaagtcccaagtttttgcatcttttttcgaggtttcaaaaaattcacgaatttccaatgaaatttattactaagataaaaaaattctatttttaatataaaaatttgcaattttttgacgttagcctttgttttaatatataaatttttaaattttgacttacatttgtttgtaccattaaaatggcattttataattggctttttaatctcatgaattaatcaaaattttgtcagatcacagcatattcattcgttagaacaacgatagcttaaacctgtaataaaatattgtgaatgttgtttctacaaattttctgtttctaaaaaatttgaataaatttctttaataatttattggactatacgaatttacaaaaataaatttacgaataaatgagaaaaatgaatgaatggacaaaaagtgaaaacgattcccactgcatttgcttaatgtttcatgctgattcatcagcacaaattaacaatttcataaataattttacataaaaatgaataattttttacagaaaaaatattgaattagaaatatatgttttttattatttaataaatatattttagttattaaatttattaatgagtaaatggtgtttaagagtcaaaagtttcctatactttaaaataaggaaatttttggaatcgtttcttatgggtgtattttttgttttattacatttttactaagaaatttctggaaaaaggccaaaataggtgctaaccctcccgtttaggtgtttttggtgctaaaaagtcgctctaaattaaaaaatgttcggataaaatgggttttttgtgcttctctcatcaagtactatccgcaaaaaaaaataggttaaaccctaaaatccaggctctactaaggaaacaatactaaattgaggagacgacggcgattctttaaaactttggggttttgagcgcttcgaacttcgccttcggctaaaaattgggcttttcatcttcggcttcaagtgctaagccgagctttgcccaaccctgcgcccaattgtttgaattctgttg

SEQ ID NO: 13853 - DNA, 1817 bp, Heterodera glycines
tttaggtgtttatggtgctaaaaagtcgctctaaattaaaaaatgttcggataaaatgtgttttttgtgctagtctcatcaagtactatccacaaaaaaaaataggttaaaacctaaaaatccaggctctactaaggaaacaatactaaattgtggagacgacggcgattctttaaaactttggggttttgagcgcttcgaacttcgccttcggctaaaaattgggcttttcatcttcggcttcaagtgctagccgagctttgcccaaccctgcgcccaattgtttgaattccgttggcgtgagcactcaaaaaggcataaatgccacaatctgtgccataatttagagttgttccccgacctcggggggggggggggggttcaggaaaaccccaggcctagaccccttggacttcaaaattttttgaaaattgttcaataattttttaagtttttttaatatttgagagaagtgaactcttttatccattaaaatggaaatgcttttcccctgctggaaatcacggtaccgtagaatggttaagcaaactaataagctgggaatgacatgggtgattggtctagtggtatgattctcgcttcgggtgcgagaggtcctgggttttggggtgccgtgatcacggaccacgggtcacggattttttcaatttttccgtgattttgatccgtgattggcattttatatagggaatttttattgaaacgaaaatatgaaattggtgggaaaagggaaaatcattgagaaataattaaataaataaattcattttcttggaaatttctacaaaaagttttaattttcctcaaaaattagctcaaaatcgtaaacttaatcattttttggaaaaggtacgccgcaaaaaaagcggattgtgtttttttgtttcttaaaaatatcttttgggaatttttccagcgattaaattccctttttttaataaatttaaataaaaaatcatttgaaaaatttttttataatcacggaaatcacggggtttttgtggtgccgtgatcacggaccacggatttccgtgattggaaattcaatcagggccagccctgcactgtacccaatatggttttcattcacttaataaaagtggcattttgtcctgtcttctgctggcttgcatttttataaattctctttgccaaaagcaaagaaatgacccaacagagaagaaaagggcatgggaagggacggcggagtcatttcgctgcccaatttgaaatgtcattatttttgcataaacaaattaccctaattagtgttctccttcatgactaatccttaaatgaccccatttcgatcagagcataaattcccccctcattaaactcatttttctcttcttatttcattcatttttcggcgctactttaaaagagtactcttttgaaattttttcaccttttttattgcctattaaatttttagtttaaaaagccgtatacctaaacattttataggggtttctggtgccgctgatcacgaattttttatattttcttcacattatttcaattgaaatttaattaaagacaaatatttcaacttaaaaattattagttgcccgaccgtccgttgcccatcaaaattcgttttaagcgccttcagattgagtaattaaaatcagagctatggcaataaaagcattcattcattccctttttgcagttacatcgatcactccgtcatcgcttttcttcgttcaaatcaccaaattttcgacaaaagaggcaccaatttagagttgtggatttattccgcacacagctcggatgaccagccgatt

SEQ ID NO: 13854 - DNA, 3461 bp, Heterodera glycines
  unsure (1)..(3461): unsure at all n locations
ccattttttcggtcctttcccacactgaattacccttctaagcgagaaaattnntggnnnaagnagatagnnctcctctcccaccgaaaatattgcaaaaaatcgtctaaactggccatgtttttggaggtttttggatgcttaaaagtcgaccaattccgcttttcagcagaaatttgcatttttgggattcgttttccacaatgcattcaatttcttattgcattccccatttttcaggaatttcccccgctctctccattcattttgcgatgcatcaaagcaccgtcgcgccgtcctccgccgctgctgcgcagagtttgggctgtaaaattgagcccccaaagccaagggttgacgccacgcgggcgaccgactcggacaaactttcgacagcaaaaagttagttgtgttttttttgcccccccccccttttctgacgttgacactttttttgactttggtggaaatgtgttgaagaaatggagacagttttgtgcaaattttgaaaaattttaaaaacctaaccctaaaactttggcgagtcgcaaccatcgttttcccagaggcaatcgaattgaattattgtcggttaatagaggaatttttgaaaatgaagtcttggtccacagcatttcccccctcccccgaatgtcttgcaaaaatcggaaattggccattttggaggcataacgaccaaattttaatatcaacaaaaccaatgcaacagaaattttacatttggaatttttgcttttcacaatccatttaatttcttttnttggtgtatgtccaaaacggaaaataccaaaagtttttggttttctttacatttttttcatttacagacactgtcacatgggcgctgaagggcgagggcattgccgtggtcaaaattgacatccccgacgtgaaggtatggggaaagatgggtgcacttcattccccccccccgaaaaattttttagaaaaaattttcaaacctagaaatttttcataaaaaaattcttaggaattgtcttagtatgaaaatttcaaggaaaaaattttttgagaaatttttcagcgattttttagaaattttataatgaactaccaagttttttcaaaaagtttctaaaaaatcgctgaaaattttctcaaaaaattttttttcttgaaattttcgtactatgaaaatttctaagaatttttttatgaaaaatttctaggtttgaaaatatttttttaaaaaatttttcggggtgggggaaacggcctgcgccgtggaaagatggtgtccgtaaatgtttttttcatttattgcattcttatttgacaggaaaacacactcaacgaggctgtgtcggacgacttgcgcaagacgttcgatgcaattgagcagaactcgtcagtgcgtggcgtggtgctgatgtccggcaaaccgaacgtaaggagtgtcaaaaaaatatgggaaaatattagaaaattcggcacttgctctgatgatggctcctgaaaaactcaaattggggctttttggttttcaaaattttgttggctggaaaattgattagtattcataattagcgaccccgaaaatccctaagaaaaagtttcataactttttatgacaaacaaaattttgcaaaccgaagtggtcacccccttgattttttcggttgccacaacagcaaaaaaatttggttcatcatcttacttacctactttggtctatattttatttcggcattttatcccctcgtgggcttttgatgtgtaaacctgacaaacatttggcccatgaagatttgggattatcaccactaattgataaataagtgttggctaacaaaacaataagttttttttcctcagagtttcattgccggtgccgacattggcatgctgtcgcggtgcgcaacagcggaggcggcggcacgcatttcgcgtgatgccaaaatccattttgaacggatggaggccagcaaaaagccggtaatcttcaagaaaaaaccaaaataacgatgaaatcatttcatacaaattttccgatttttttaaactgattaaaaaaagagttacttttttttgttgcttttaggcctttggtgtattggagggataggcgacagggaaaagagaaaattttctgtctgtacagacattttttgctgtttttgttttaaaatttcaaaataccaaaacagggcttatcgcttccaaattattatttttttcccatttttcgatcgttgccgccatctccggctcgtgcatgggcggcggcttggagatggcgctggcgtgccactaccggatcgcggtcagctcgcccaagacgcaattcgcactgcccgaggtgatgctcggccttttgccgggcgccggcggcacccagcggttgcccaggctgatttcgctgcagaacgccctcgacatgatgttgaccggttggtgggcacgggacgagaacaggataaatcgtcgctgcaaaaaatagagaaaaaattcaaaaataaatttctgaaaactggattatttacagttagataccaacatgcaataaattccaatttttttatgaaaccgttttttcctgttgttttttacaccctcccattttcaggcaaagtcattcgaccggacaaagcgaagaagatgggcctggttgaccaacttgttcaggtgaacacggagttacatttaactacaatttcgcattcttatttttacaattttcacaaattcttaacaaaatcgaaaatcaacaatgattttttaaccccttttttgctagaaaaaaaatcagaaaataaaaagaaatttcttaaaacattttaaaaaagtttgtcgcttgtttatttatttttatttgttgtctaaatatggatcaatttcagccactgggcccggggctgagtgacccgatcagcggcacacatcgctacttggaagaggtgcccgcaatgagttggaaattcaaccaattataattaattggttttttcaaaaaaaaacatttaaattttaccgaatttttaaaatttttatttgaataacttttactgttttttattttgcacttcgcaggtcgccatttccgcctgtgagcagctcgcggccggcacgctgaaaatcaaccgcgagcgaccgctgatggagcgcattcagaacgtgttgctgacacgaaaaccgttgctggacgcggtattaacgattttcattaaaatttgcaaaaaccaaaaattcgaacactttcccattttccaacccctctccctcattctcacgggcatagcctttatatctgtctgtattccccgctctgttctcgtttcacaggtggtgatgcgaatggcacgggacaaagtgatgaagcaaacccatggcaattacccggcaccgttgcgcattttggacgttgtccgcaccgggctggtggacggccagcaggagggctacgaggaggagacaaaggt

SEQ ID NO: 13855 - DNA, 1427 bp, Heterodera glycines
atttagattttttttttatgtaaaaattctgttttagttgaaaattcttgattttgtattagtacgagttagcacgacacctttttattcttcaaaatgtgaggcttcctcgtttttaccttttaatagtgtgcagacatttgattccatgcataaaatggtttcaaatttgtatttttaaattattaaatgtcataaaacattgaacatgatagatattaaacctttgtaattaatgaaatatttataaatttatttattggcacttgctaaattaccgtatatgctctaattatagcccatgggggattatttttcaacctcctcagaaaaggggggataattggagactgtgggcttaatagagactgggctataattagagcatatacggtatgtaaaaaagcgcaactaaacaaggaaagtacctgaaaaaataaaattgaaaaatggcatataacaagcagataaatgttggagttgtttcaatttattaactaataatttagttcaaatttttaaaattaaatgaaacatacagcattaaaaatgcaacagtaaaatttcgatcagactccgatcctcactccttggcctcctccatttcctttttctcctcttccgtttcctttttgtcctcctccgtttcctttttgtcctcctccatttccttttcatcttcatcgtttcccaaaaattcttcccatgcgttttcccttctctctttctcttgcgcagtttcagcccttttaaacttttctttaccgtcccagtgtttagccttaaatacgtaaaatgtattttgtaatttaaatttatttggccgtcggttacctgcacaacacgcccagccacaattcgtccgtcgattgcttgaacagcggcgtcagtgtgttcgacgttgtcaaaagtgaccgtcacaactccgtccggattggtctgaaaatggaattaactttcgttttggttcgatttgatattttctgctcacatcgtaaaccgtcacttttttcaccggcccaaagcgttcgcatagtttttgagtgtccttaatcctttggcattattcctcctcaaatccaacggaaatttgcctctttaagcgtgaaaattcgctgtgcgttcgcgtcaatttcctccaaattgaacattccgcgaagtaccaaagtgcactcgcagggcggccgatagttccgcggtttttccggcttccactcgaaaatccttaaaacgttgcatttgattgatttcttttacaaattttttctttttgcgttttatcgattttttgttacttttgctgtttttcgaagaagcgctttttctgtgccccggtgagacgccttcgctttttgggtcggtcgaattcgcctttcatttcaaactttgccctctccactttggatttttgtgagcactgtcccatg

SEQ ID NO: 13856 - DNA, 974 bp, Heterodera glycines
  unsure (1)..(974): unsure at all n locations
ttacatacaaaaaacattcatattaaattatcgctgtttcaattttcctcctccgatcaaagggaagagtcgcacagacacgcggtagcagacaagtccagccggcacgggcccatagtcgcgcgaatccaccgaatttgtcgcattgtcgccgcgaacttcgatacgaccgaccaacgggtcggagggacgactgttttcatgaacagcggaaacacgttttaagacatacctgtggagggagagaactgttatgaatgttaattttttaaatttcgtattcacgccaacaaattgcttaagtagaagcacttagtttactcgggatgaatttctggcgtatgaataaggaaaatactgtggaatactgtttctcccaaaatttcccacactgactgatttgcatttgtggggtcaactaaacacacgacgtctcccgggcgtaaaccatcgtttgggtcccaaactcgagcccatagaatgtcgccattatagaaagtcggcagcatggaatcacctcaaattcaaaaatgtaggtaaatttaatcatttggcttgccttggcatcgaatgaatgcgccaatcctttggccaaagacttgtccaatgcaagcccccaaaaataaatttcctacgaatttaagtgtcattgaatttataaatctaaacaactatccgcgaaatgagctccaaaaagaaacaagatacgcatagtggaagaatggaggttcggtacgaatcagcaccgcgtcattaccatataggtaatactggagaatctgggctccacccaaaaaaaaatttttcttgtgaaataatgaacccggggttttcggttgatatgtattaaaatttgcaaaataattgactttatcatttattttgaaaatcatagattttagaaattttgaccaacatggcagggtaataaatgtagagtgtttatgttttcgattgttctatgnnatcatctc

SEQ ID NO: 13857 - DNA, 948 bp, Heterodera glycines
  unsure (1)..(948): unsure at all n locations
aggatgtcatttcgacctcgatgtgagtcgtttcggttgccgtctaatgtnaattcatccaccatttttcttcagcgtgctntggcccgttattacacgnccgatgacnccgaggcctcctacaaaaaattccaaaccgaaggtttggacagcgcacaaaacacgggcagtgaggtggatgacgaggaagggtcgggtggaaccccaaatgacaaatcaaagggtaaacagccgccgcacaaacgttcgcggcatgaggacgaatcgaaggaaagctcgaaattccctgccgaactgacgctgatcacttggaatgtggacgggacggacggacgcaatttgaacaaacgattctatgcggtgctttacataattgcaaggtgagcaaaatggtggcagggaaagtccatcgaaacactgtgaaatgcatcggacatttgacacgattagaaccaaccccgaagtgattttcctgcaagagatgactcgacctctgatgccccaactcaatgagctgatggccccgatgtacaacattgtggtctccgacgtgtacaacccggattacttctgtgtgactctcattagcaaagtgagtgtctttccttcccacactttgtctacctttttctaacatttcagaacatcaaaatcaatcactccgaagtcattcgcttccccaacactcaaatgggtcgttccatgacagtcatccaaggccaatggcaacgcctccgtctcgcgctggtcaacacccatttggaaagcactcgtgaagtcggcgaagagcgcaagacgcaattcaaattgtgtatggaaaaaattcgctcaatgtccgggaccgacagcgaagagacattggcggtattcggtctgtttttggtggtattccgttttgaaggcaactcccgtttccacaggcggtgaccttaacatccgtgacaaaga

SEQ ID NO: 13858 - DNA, 1515 bp, Heterodera glycines
aatttcacgaacaaaaacatcacaaatccgctggccatccgtggtgtatgataatggatccacaaatctaaattggtgcctcttttgtcaaaaatttggtgatttaagcgaagaaaagcgatgacggagtgatcaatataactgaaaatggaataaatgcttttattgccataactctgattttaaattactcaatccgaaggtctttaaagcgaattttgctgggcaacggacggtcctcaggccatggaaatggcacaaatctgtcatccatccgcacagataggttcggttctggtcctttgtccttgcgacgaatttcgattggtctccaaatagtcaattcacttttgccattgaaatgtttgtccaccaacgcattgaaacgtggcgaaagaagtgccaatttgaggccgagttgagcacggtcaaaagaggggaaaatgtccatccaaacgtcgttgcaaatccaactgaaatgggaaaaagtttagttaaataaatgaagaatttgtgtgacttttcaaattgcttaccgtcggttcatttttgtggcaattagcacaattttggccgagttccgaatgatgtcacacaaagagcagaataattaattgcgttagaaatttttattttttttttcaaatgcgagacaaagcgaaaaaacaaacatttttatagccatgaaaagggattgatgaatgtttttgtatctttttgtttatgtgtcatgattagggcccggatttttatgtttttacatattttttttgcggcttagttatggcgagagaagcccaaaaatagcattatctccgaacaatttttgatttagagcgacttataaaaacataaaaacacatattttggcgttttgtcacataaaatatgttagcacatattttggagtttggcacatattttgcacatattttggcatttttgagaaaaattgcaataaaaatacaagaaaattgaaaaatacaccccctaaaaatcgacttttttcctaattattaacataattttcaaattaaaaaatgttttcttcgattgtagaaactaatgaaatctcgaattcattaattcgtcattggatttcgaagttctctgctggaactttcaatttatagaaatgatttatcaaaaaaagacaattttaccccaaacacttcgaaatgtatttgatttgcgttgtatgggctaaaaatgataaagaatgagatttttgggaatttttatgcaaaaacacacttattttttcaatttttaacacatattttagcacatattttggcatttttgggggtttttagcacatatttcagcattttttagcacatattttattacatatttcaggatttttagcacataaaaatccgggccctatttattagcctacaaaatttcaaaaaatttcggtgggtttcaaaaaatttatggccaaaaatgtttagaaaagcaactttttgaaatttgcaggctaataaaggatctacagttgcgaaaatg

SEQ ID NO: 13859 - DNA, 1181 bp, Heterodera glycines
  unsure (1)..(1181): unsure at all n locations
gttcgaatttataccttgttttttagacttagctgatgcagagctttcgagtgatacgtaatttgtcggaatttgactgttttaaagggtcagtggccccctttttcactcaatttttcgagttttaaacagggtcaaaaaccggttttttggcacatccgcacacatgggggagaggtcggctatcgaatgatactaataatgtttaatttggatgcttcttgaaaaagggtgcactaaagttgacaaaaataatttatggtcgtgtctttttttatggcctgtgaactgcaatagagccgcttttaagtactcaatctgaaggcgcttaaaaaggattttgctgggcaacggacggtcgggcaatggaaatggcacaaattcgtcatccatttgtacagacagcttcggttctggtcctttgtccttgcgaatttcgattggtctccaaattgtcaattcgcttttgccatcgaaatgtttgtccaccaatgcatcgaaacgtggcgaaagaagtgccaatttgaggccgagttgaggacggtcaaaggatgggaaaatgtccatccaaacgtcgttgcaaatccaactgaaaaaagttttgttaggtaaataaatgacgaatttgtgcttaccgtcggttcattttttggcaattagcacaatttgctgttgaatttcgaatgatgtcacacaaatatatagcagaataattaggtaattgcgttggaaactttatttttatataatgagaaacaaagcggaaaacaatcttttttaacgaaaatcactagggatgtcaatttaatgtaaatacatattttttttccttgattccccatgctctaaatagtagggaaaacactttcttttctgtgtttgcgtacaaaaatcgggacttttatttacatatttcgggattttatacatatttggtacatattttgaggattttttacgggaatttttaaaattccttaaaaaaaatcaaaaatttcggcaaatttttcatttttttacatacgtattctgagaatttttgcaaatttatagaaatttcttctgaaataaaaaaacttttttagaaaatgtactcctaaaactagcaaaaattaattnnttaaatgttaaaatgtgattctaaacctatttaggtcattttatgatgacattttgtgcct

SEQ ID NO: 13860 - DNA, 1573 bp, Heterodera glycines
  unsure (1)..(1573): unsure at all n locations
cgcaaaaagcctattntggacagcaccatgaaattgttcttttcaccgacaccttttggacggcgtcgttcacgggaagcgatgtgagcgaagaggacgaaactcagacgcaacagaacggcacgagcgatgccaaaggaagcaatggacagagggaacaaagggagggggaaaaggagggaaaagaaggggaagaagaagccaacggcaaaaccaacggaagcagcaacaacaatttgttggagatggcacgatatttgaggtggggggagggagggattggcacccgaaaaatgcgtcggtggaaaagtacgaaaaagtggccattttgaaaaccaaaattagtaaagcgtaatggaactgtaggtttgtttcttccatgccaattcgtgcttaaaataacagatgacacctttcaacaattccattccattgatgctttttccgctcatttgggggggggggtgacaaatgaacacaaattgattgatcgctgtcacttgctgaaggatgagagccgatcagctgaccgaattggacgaatttcgacagcgattcgacgacacggacaacgcaatgttggcacaaacaaagcacaaaataccgccaatttcggcactttccacttcccgtcactcaccactcattcagatgggctttggtgttcctcgacctgcttggccttgttctgctggtgcccattctgtgccatttctgttgccgcgcgtccgccgccaaaacagtgagcagaagttgctgcttcgccttcagagttcgtcaatcagccgaagggcattaagctgaacaaatttttcatccgctggctcaatttcaacacaaatgctttgtttggtgctttgactttcccaatatttgaacacttccattgtttttgtgggcaatttcaaaaacagccgaacagatcactgatcaatcggagggatggaaaggaaatgccgaaattaatgtccccacaatctctcctcagttttccttttatccctcccaccacactttgttcttctccaggttcttctcgtactgctcgtcctcctctgtcttctccaacttttcctcctcctctctctgcttgacaacgcactcaaattcccttcaatcgttgacaaattattcaatttttatttggacgaagtgccgacagaaaaacgagcggaaataattgggccggcggaggaccaattttcatgcaaaataaaagtggaacacgaactgttggaacggtacggactgcaggtgggtggaagggcaaaccatggcataaacaaatgcagggcatactgtagagagctaccgtagccgagggcttttaaatgaatacgatacataaaaaatgatggaacgttttcctccatacatccaaattccgatttaggaacaatgtttgccaaagatgaaaggctgtcttctgtcgccttccatcgtcgtttttctgatcctcatcactcttttcccattcattctcactattatcacatgcttttggccgaaacatttgaacattttgggcccgttggaaaaggcccatcgaaaagtgcagcttttccaaaccgaa

SEQ ID NO: 13861 - DNA, 3176 bp, Heterodera glycines
aatgactgagaaaggcactccattgtcaattctcgcgcaaaaatgcaccgtccatctgctggtatccgttgggctgtaagtggaaagaggccatccctgaagacactgtccgaagaatgcgggacaatccctgggtttccgccagcggaatgttcgcctgcacaactgcgattcggcctaaaacggagccgattttgcaaaaaaacaaaaaaaaataccccataatttaagcttaaaacatttctgtttcatggaatatttttcctttgtctacgagtctcacaaattgtaaactttttctcatgtggggggagcgatcatataaatccgtggtttatttcctaaaacaaacccttcgcgccgtccattgaaacatccaaaattgtcgcccgtctctcactcaatgctctgacgacagtgtccgggtcgggcatttctgcatttgttgaaatgaacagaagtagacgaggaatcccaccgttccattttcacttgcccttccgcttaccggcactttccgacaaaaccaccacttcgactagcatcatcggctcgtaaagcaccaaattcgcctgctcaagtgcctttgagagacatcggctggcacaagcgttgagcaaagtcaccggaattttgtgtccactggtcgaaagagcgctgaatatgaaaaattgaaagggtttaaattgaatgttgtggaagctaatggaaatgtaaaaatacgttcggttgtcacttgccgtagtttcacgtgcaaattgaccacgggagagcccgaaattggaccgccgtgcaccgcaacggaacacccggcgttgatcgacttcaaccagtccgggtgaaataaaaggttcttcaatgcctggtccgccatttcgacgtcctcctccctgtccaaatcaatggaaacctaaaaaaaggaataaagcaacgcttatgagagaatccaagcacttttctgaattggtggaccactgtccccgtgttcacgaagggaattggctcgatttccaatttcattgtgcaccattgccttttgtcgattacattttccatatgttcagtgctaactgctcgtttctgtgggatctctttgtaattgacctaaactgcaaaatgttatgcagaaatggggcaaaagagatttttttaaaattattttcgttttttccgtttgcattttgcattacccgaagagggccaaaaaaggcgttcagatcaaattcacgcagcagtcgttctcgcatcacttcgatgtgcaattcgcccatcccctcgagaatggtctgtcccgtctcctcttcttcgatgacgcgaattgatgggtcctcaaccgctgaaacgaaaaaaaactgacaattcgggagaataaaatggactaagttgcgcaagagctgcccgaaagtcccgttcatttttcaaatttggtggttcgatggtacaagaaaacactgccggaggggagtcaatgcctaaataatctcaaattttggttaaaaacagaaacaatggaatttaaaatactcaaccttcaagtgccaaatgtttgattttcttgtgaagcccccggttgtttgaaggagcaaatgcctcaaaatcgatgtgttccgtcctctttgcgctgtgtttgacgtgagtgctgccaattcgaagtgcaaatgattacgatgagaccaattcttattggcaaaataaatcaaaattggtaccaattgacgagtgtgtcgcccgttttggtgttgtttaggccagtgattacgacaatgtttccctcctctacactatcaatcggatgaagcaaatcgctgaatggagtgaacagttggaaactggtttggtgttcacctaaagaatatttgtgaaccaatatattgattaaatttaatgataaaatttggaaaatattttgtctaatttttatgaaaaatttaaagggttttcgacttaaaaacaactcaattttcgattccttttgacagtggcatggaattgggaaaatgaaacacaaacaaaaaataaaagaactcaccggtgttcgcatttactaatgcgcggctcggctgtccgagttgcattttgcctctgtaaactcttgcgtaattcagctgacctcgttttttgtcatgtctgacctgatggtggaggacatttggcaaaattaatgagtcccttcgctcactttaaaaacgaagacacaaacgtccgcttcgtcggcgattggataaatcctctcgaggggactcggcaaaaagtccaccaccgaatccaacaacggcaccacactggcagtgaaatgcaatgccgacccgcaaagcagcggacaaaggcggcgccgcagcgtattttgacggatcactcaaagagggaaaaaacgtcaaaacaattacgataacttttgaaaaataaagtgaccttctgtcaaccgaaaaggcgtaaatgcttcggggtttgacacgaattcttgctcaaacacttcgtcaacgtcggccaaacggatttgaagctcttccatagaagcggcataaacgtcatccccacggagtattttgctaaaaatgacgattgtaaatatttggaaattgcaaaaagtcgagtgcgatttagtccattcccttttaaaattattttattgtttgtttggaaataaaattagtcaaccggaatttccatccacgtgtcgttttcttttctgttaaatacgttggcatttcgttgtgcggttcgatcgattgccaaatatttgcgcgaaagcacttaattcgaaaaataaattgaaagtgttgttggactcaccatttacaaacccatccaatttgcaatctttgttcaaaacgggcacaacaatgggcaacacttaaccaaaaataaattaaaaagggagaataattgttgggatggaagtttccatgagttaatttcatgtctaaaagtcactgccacctttggagttcagacggtcttcgatcgatgcaagtgaacggtcaaaatttgcgtttggtttgtccattttgttgacaaaaaatatggacggaagaccaaatttgcgcgcctgtcgccaaacggtcaatgtttgggcctgaaacatcacaatattttaacacaatttacaatgataattaacgacctgaacgccggcggatgcgtccaacacttaacaacataaatattatgaatag

SEQ ID NO: 13862 - DNA, 2871 bp, Heterodera glycines
cctctccctccttttgtgctttgcttttccatttttaatttgctttacctcctcccacagcctgtcgagttggtccggcccaattcggtgaacatcctctggcaaatgccccaagtcttcgtgatgactgtcggcgaaattctactgtccgtcaccggattggagttttcctactcccaggcggcgccgagcatgaaaagtgttgtccaggtgccaacaattaagcatatccgctaattagtttaattacacattttcctccaatgttattaaggccctttggctgctgaccgttttcttcggcaatatcatcgacattgtaaataaaactataattattgcagctaattaatattattatgattatgcttttattgcatattttaatatttataatatatttttacgattaaattaattttttttttaattctctaattttaaattttgggccattaataaatttattctattatttttttatacggttaatctctccgttccttttaatcaggtcatttcgcaagtccaaatctccgacccggtggaggagttcttcatctatgccgctttgatgttcgccgtcatcggtctgttcgttctgttggcgatgcgttacaaatatgtggacggtaattaatataattagacgcctactttattactgtaaacacttaatacccgtatcattgcacagtaattaattaatttattaattattcctttctcaagaacacaatttggaaattcccgactcgccggaacggagccgtcgctccagcgacgagtacagcagcagcagcagcgaccggcgcagcgacgacgaccgcttggagttgggcagaggcccccgccgcggggcttccgcccccggcactgatcgaaaaagcggacagatgagcagcgaaagaaagtggcacgggagagaaagaaacggaacggcacgaattaatgctgcggaaaaagcggcacactctttttgggccattttggttggccaaatttcagcaatttaagcaaatcccttcaaaatttgtattttttacataattcaaaattaattcctactgtattattattttatgttgtttctcttctctgtttcacgtttttgtcaaagggatgggcaaaacattctcccactgatctcatctctgttctgtcttctcccctccccctttaatttggcataattttcccctttttacatgcccaccgtaatattattgatcaccccaaccattgtataccgtaaccacataacactgttttctgtgttcatttttagtcctataaccgttggtttaaattcaaatttgttggctcagtgtgtatcataaagagtgattgaaggatatacaatagtaataattttgacatttgcaaaaaataaaaataattaaacaattgcaattactgtttaataattaataaacaaaaaatggtgaaattgggccaaaaaatgggaggagtcaatgcgaacggaactttggcaatgtcagacaatgggacgttcatgttgcattgactggtagtgctgctcacatccgtccgtggtgaccccaaacggatgtacgttggcgatttgttcgtgtccggcggctgccggaccgtccgttcggctccgatcgtaaatgatcagcacagggatggcatagcaggccacttgggccaccaggaaaatcttaaaagagtgggtgaagtgaaaatgagaagaagcatcgagattctcgcgactctgtcaattttggtatttcctacggcatattatgtttagcgtttgacccacggcacatcaattagacaaaaccaagactctcagagcatattaacagttgggaaggaaggacggtttgctttcgcaattccatccccaagatttcggcattttagttggcatttttgttatcccccagtggttattcgtatcgttatattccaatcacaatttgaagtaaatttcaattcttcacttaaagcttaattacccccgcgaaaatatagccggccgaatggccattgtccggcacgtgggaggcgaagccgaatgaaagccaaaagcccaccccgcagagcagcgtgaggacagacgaatagacaaattcctgcgattttaattaagaaggctttaattgggtggtcatcaaattgtccccacaatgacgccccaggggagaaaagcgccggaaatggtgacgccggacaagccattttcacggttcagcagaaagatcaccgtggcggtgactgagacgatcagagagcaaaggccgatgaaccaaaggacgccaatgcccggcacggcggtggaggagccgagacagatcagtatgagcacggcattgatctgggaaggagaggcatttgatggcatcacaattgggaaaaataggggagaagcgacagaaaataatgggaggggggggggagaccggcttgaacaggtcgggcttttaggagagagtgacttacggattgaatcggcttgaacaggtcgggctgctgggcaaggaacagttcctttgctgccatttttacatgttatttttaattaggacaacaataataactagagaccggacaagagggtcggtcgaacggtttcggttaaaaaccgaaaaaaaaccgaaaaactcaaaaatttctcggtcggtttttttcggttaaaaaccgaaaccgaaaatcgaaaaataccgaaaaaaaccgaccggtccgatctctaataataacagggtagccagatctgaggctttagcctcattttgtggttttttgatgggtcaatgaggctaaatctttcaaaatgaggctttcaggctttttaagtttatctgagaaccctcgcatcctaaagaatttttttacgaaaat

SEQ ID NO: 13863 - DNA, 1827 bp, Heterodera glycines
  unsure (1)..(1827): unsure at all n locations
ataactagagaccggacaagagggtcggtctaacggtttcggttaaaaaccgaaaaaaaaccgaaaccgaaaaaaccgaaaaactcaaaaatttctcggtcggtttttttcggttaaaaaccgaaaccgaaaatcgaaaaataccgaaaaaaaccgaccggtccgatctctaataataacagggtagccagatctgaggctttagcctcattttgtggttttttgatgggtcaatgaggctaaattttcaaaatgaggctttgaggctttttgtggttttttgagaaattttgaggatttttgaggcttttggggaaaatcgtcagatcttttaaattttgtttaattttgatgtttggcaattatttaatttgaatttgcctttttaacagatcatcaaaacgaaaatctcacccaaaaattccaaaaaattttttttaatttttcataaaaatcaaattaccattttttccgaaaatccacaaaataaggaattttttaatgaaaatatgcttaaaatgtggtcaaaattcttaattttgccaaaattttcccggaggtgcctatcggcactgccccccccccttgttccccaaaagtatttggaaaaagcgacgcaaaaaaatcagcttcgatttttcatgcttagaatttcataaaatgcttatttctaataaaaaattgcccaaattgatcatggacatcacaaatgtaacatttgaatattttaaacgtgttttgaataaatttcgtaaaaatgaggctttttgaccccaaaatgaggttttttggatgccaactgaggctttgnaaaattgtaatctggctaccctgaataataatgttttgttggaagaaataaagctaaattcacaatcagaagatcaaagtgattaaaaggcaattcggattggttggcattttcacagtttaagcaacttttgttggtcaattccaatgaatttattatttttcatatattcttacacaatctttttattatttgcttaatcaatggaggagaaaaattgttgagagaatgaacgattagaaaagacggacgggacggaccgacaaaattcgccaccattttcccttatcagagggaaagggggcaccacagagcacaaaagaggaggaggagggggaacacgacacgaagtactgctaccgcccgccgctgcgtgtcacacactttttgtttacggtccgaaaatgctgtttgatcatcattcatccaacggcggaatgccatgccgtgagaagcaaaaaatgaaaaggcttcagcgaatgccatcattggattaattatttgcatttattaaatttgttaattttggtatttatttaattggaaaaacataaaactgtttttttttgttaaaatcgctactgtattatatgtagatacaaaatttagatagatttcaatacaataagtatcgttctttttgctaatcttcaaaaagaagagtaccactgaaacccactttgaatttgaagcgatacgccaaagttaaaaaaaataatgaaaaaattttgcttttaaattttcttttacctacaaacaaagtacaaacaataaaattgcataaagtgaaattcctaaccatttagatgaaattcgaattccaataaagttaggtgctgttaatctattatttaaattcatttaattgtggcttatggatgtaaacgccgaactcccgccggacttcgagtttgactcaattttaaggcccattaataatagccctttcttttcccctcattatggcagatggtatcanaatcaaatagcgggtcatctttcctctgttatacgta

SEQ ID NO: 13864 - DNA, 2241 bp, Heterodera glycines
attatgtttttatacgatttttctttttgcgtgataaaaaaattcagaaattattaattttattttggcattttgccctaattaaaaaaaatcaagaaatgaaaaatttatgtttcccttccacttttcgctaaatgtaaaatctatgactctatggttattaaagccgttttttgttgttatacatatttccttttaacttaaatctctattttgaaggtaaattttttgtcgcacacaaacttgagtaaaaatggcatttcgcgcactttctttcgcccgtcgtccgtttacaacttcgtccatttgccgtaaagaaattgacctggtcgccggtgtttatctgaacaaagttcgggaagtggttggcaaacaaaggttcgttattatgtaaaaagtgggttctaatcgacttctgggagtctaatcaatgaccgtcatcagtttctttgaccattaatcttttcttatccagtcaatgcttgcttacatttttgggcataaaacggaagcttaaagcctacggaatttgtttttttataactaaattatgggctaataacactagacaaaaagttgaaaatttggtgttttctcattgtaacttctttcttgatttcaactttttctctcttcttttatttataaattcaagagactataagctttagtttgataccaataatgtatactttgtcaaagtaaaaaaatttatggccacaaaaacaggatggttattgtttggacgtaaaaaggtagtcggagaatggacctttttttgcaaatttcaattgaaaaaggaataacctggaactgggttttttttatactgcctaggacctgcattttttacacaaaaacccaagaaaatccagccgaactgggctgacaatgaacctggaaccagaagaattctgttttggatccagacccgccgaattttggtttttggcggaaaaaaccaattgtctccacccccctcaagcgggccttgattttttttttttttgtaaattttcgaatccctttacaaaattaattgtttcatgtttcagtgagattctcaattcgcctcagttgaagaaggagttgaacgaccaactgaaccgtttggcccaaaaattccatttgccggatgccgacgcggttgccaagttgggccttcagtttaaggttcgttggtacctcggcgacttagagacaaagacttttgaacaaatcgggatcgtttactgatccctgcctttatcaaaatagtcgggatcggggtctcgatacccccccccccgacttttgtcgaatatttccaacaaatttttgcatttttgaaaaattcgttttttattggtttttacttttcatctagtaccagggtggctatattataggaaatacggtaagtgccaaattttaggttttctcgggtttggggggacgtcgacctactctcgaattaaattccctggagaattaaaattttcatttttcgaaaaaccccatcacacataaccgtatgaaaagtttccgtttttatggattttctttttttttaaagggagcaagtgttgtcagttcggtggaccaattggttgatgggggacagtcggtggatgcccagcttaatgcgcttaatgacaggtgttgtacaattttaatgaggacaaacatacaaaaaaactatcgtaattgttttgcttttagggcgccataacaacagcaaaaaaaattacaaatctttttttttcaattttcgttgaattttttgagaatttttttgagctaacatcaaaatttttgagtacttatatattttttacctaaatttttaaatcatcgcatttaatcatttaaattataaattaatttattcatccgtcatcgctttttaagtcgtgccaaatatgaagcggagcagaaggggaagagacaggctgaacaggagcggatcggcgcaatttctggtgagtattttgcatgaaattctaagcggagggatccggttttttgtcacgattgtttccatttttttttcaaaaaaaaacgcctatccatacccactctcttccgccactcccgcccacccattttccaactccaaaaaagtttgttttatgatcgaaaacaaaagattaaagcatttatttcaaaaaacgctgaaatgttaagttttttttcgaaactcgcttataaaaaatttcatcttttttattaatttcgacggaaacgataccgccggggggg

SEQ ID NO: 13865 - DNA, 1400 bp, Heterodera glycines
gaattgagattcacactgaaacatgaatcatattattttgtaaagggatttgaagatttccaaaaaaataaaaaatcacgcccctctggaggggggtggagacaattggttttttccgccaaaaaccaaaatacggcgggtctgcatccaaatcagaattcttctggttccaggttcattgtcatcccagttcggctggattttcttgggtttttgtgtaaaaaatgcaggtcctaggcagtataaaaaaaacccagttccaggttattcctttttcaattgaaatatgcaaaaaaaggtccattctctgtctacctttttacgtccaaccaataaccatcctgtttgagttgctaccgtcctggtttctcctgccccccccctcccccgtttgtccattgcatgttttgtattgtatctgaaaatcgaaaaatttggtcaagaaaggaggatgggggggggggcatcgttccccgcctaaacaaaaaacaactgactattgttgttatgtccgaagataacaaattaaataagtttatttgccgaagaaataaataaataaaaatgcagaaataaattggagaggtcaaattggtgggcacaataactgaatgaggggaatgggagggtgaagatggcgaagtggcgtggggtcatacacctaatcaataattacttccttctctaacacctcccctcttaaattcgaaacccgaaggtttaagccaaaaattttttttattttgatggcgaataaaattggcggggctttttggctcgggttgatcggcggactaccaacggggaattggctggctgaggcagattttgttgaggtggaagaggtggttttacaaccggcggtggctgctccatttgtggtgcatccttttcggcctcgtcttccaaaatatggcgtcgccttagctgatttgcgtgccgatgaacaacgcgacgcagaacaggcacataaacgatatgtgggcgaattgtgcagcctctcaacaattttcccttgtagccactccgtcttgttgttccggtaattgatcagtagaacatgatcatttggaaagaaattggtcagttttgatccatgcttccgatcaaaattttgagccattttgtcggtgtattttgactgtccctttttgaatgagttttgatcaaaattttcggctttttccccttttggatggatgagcgtcagtttggtgcgcaatttcctgccgaaaaataattggtccggtgaaaagccatccaaggcgacgtgcggagttgttctgtatgcgaacagcatcttttcgatccaatctttttcacctttcgacattttcttcattgatcgcttgaaggtgtcacagagagcgtttgacttggccattcgattgaggatgaaa

SEQ ID NO: 13866 - DNA, 1713 bp, Heterodera glycines
ttgaccaattaattattcgttcagttgccaaatgcgtggcacagtcaaggggacccttcgaatggctatcacattttggcagagaggcgacaacgttcgcgtcaatttgtctattgtattcgtacgaattgatgtttttttggtcaataaattgtttgtttttggacgaattttttgttttctctgtgattaataaattttcgacaataccgctgaagtggagttgaagctgagttatgctgatcaaaataaacaatacaagaaattagcgctcgaaaaattccggttatgttatagtctaccacccacaaaaagaatgaataaaattgatgcattcgttctctcgtgatggggcacttctaaccttttaaaatggtcaaacccggacaaatttggtataaaaaacatttctcattttatagcttatacattatttcatgagttataaaaaaaacaaattttcgcatgctcgtatctatgtttagtcggggaattttcaccccgaaccccgacttttccaaccccgacgtcggggtcgcaaccctacttagtaccattcgacagccaagcttttttcggcgctatatggattcaactttttttttggcgatttttgggcatcatggagtttactggtcccgttttttttttctttaaaaataatggaaaaatttttctagggctattttactgtgctgagcacgaatccgaccttatttttgaccgattctgaaccccgaacccggattcgaacatttaaaaaaaaaattttttttaatttttttttctttcatctatgtttgtcttgagcataaggttacgcatgtaaccgatcgtatggtctatggtagagaattgatcacaaaaaacaaatatatccatggcttaaattgttagtgagcctacggccttaagttaaaacaagtgttatcatggtatgaccaaatttctcattatgcatatgctgtttatgctcaagacaaacatagatgaaagaaaaaaactttaaaaatgtttttttttgaaaaatgttcgaatccgggttcggggttcagaatcggtcaaaaataaggtcggattcgtgctcagcacagtaaaatagccctagaaaaatttttccatgatttttaaagaaaaaaaaaacgggaccagtaaactccatgaaatgcgccgatttttttatttaaaaagtcctgaaaccaaatacccgggggttttaaaggtcgctgatcacgagccgctgacaatgggtacgaatctgaccactttttcgaccataaaaatttacaattaaaaaaaatttaatattcaaaatcaaaaagaattgacaaaaactattaatgattcactacgaataaaataaaaaaggcaaaaataaatatgcgcctgcgaatacacgtatgtcaatgtgatgagactgtgtttttcaaaaaatttttggctcaagtggacatttccaattcgtcgtccccgtcgccggcggccgaaatttgtcggtgcgctttgatgtgcgacacgccgttctcgtccttggccaagctgtagatgtactcgggacggcatgccaagtgcaaatgctcgacgagccgacgatcgtgagtgatgacaatcagttgcagcgagcggttcagctccatttcgtcctcttctctgttgccagtgcggcgactgttccgttccccctcaatcattagatgtcaaacaaaatgttcc

SEQ ID NO: 13867 - DNA, 1058 bp, Heterodera glycines
gaccatttcacgaaaatccgtcggtgtggcggacatactcagccggtcgcgctcgttggactcgcccatctccgtgattttgtccagcgtcccgttaatgctgtcccgtcgagtgtcattttgcgcaagttttgctgcaccgtcgtttccaactccttgaaaagcactgcaaaattgtttttttacactttcgccattttgcctgcttcgagcgttccatggcgcgcaattggcgttccgtctcgggcaactcgcgaccggtggcggcgatcagctgctccaactgtttgacctgctccgccttgtcgccgatgctctcccgaattgtctccatttgaatgactttttcgctggcgttcgcccgtcggtctttgaactcggccaactgaaagtgccaagaagccaattaatgccagtcaataatgcctttttcaacctggttgctgagctgtacccggcgctttaatgttccaatgtgctccatggacaggtccaatttgtcgcccgcacgttccaacagtgcgttggctttgccgacggtgccctcgtccccggcactgctggccaattccatcatgtccatgcgcaatgtgttcaggtccgtcttgaagagagtaatcagatttaggcagggtcagtaaaactgggattttctgcaattaattgtcctttggtcaattaattacctgaatgccctgcagcattttccacacgtcgtccaacagagagaagtcgctgagctgcttcaactgcgactcccacttcacaatgtccgcagtcagcttgtcaacactaaattatgccaagagaatgggacggaggacgggggagggacaccccaaaatccaatcccaaaaaacccgtaaacttttcggtaccccgccccctatccctcacatttgcgtggtttgtcccatcgttcgcatttccctctccgccgatgcgatggcttgggacagtttggcacactcctgtctcttctgtgtgctgttgtttttcagctgaacgacactgagacggagcttctcaatggcctcggccatttgtttttgctgttc

SEQ ID NO: 13868 - DNA, 2426 bp, Heterodera glycines
  unsure (1)..(2426): unsure at all n locations
aaaatttttaggtttaaggctctaaaaataaaagctcattaaatcggcactaataactcgaaaagtagcttaacaacaaccgaaaaaaaatgttttttgtgcgtttcaggtcacgaggagctcaggaaaaaataatgaaaaccctaaaaaccttatccctaattctccattcttggttttgttcgatagctctagttgtttaattatttctgccaaaacttaaaaatttcgaatgtttcaaaaagttttagctagaaggaactcaaaaacttagccctggttttttcaacatggacaaaaaattttacctgcatactaacagaattattaatagtttaggtaggtcaattccagaatttttaattttttgtcaaagaaaaactttggtccaaaaatccgtccggcgacgtttcttcctgctccgaatttttcaacaaatatttattatataaaaatttatatatatacatatatatatttagtaatttaacaaagttcccaaaatgatttcactggccattttggtcgtcttcgccctttacgaggcaattgccgtgccactttacctgcgcctcatttacgtgatgctcaaagacacacatttcgcaggcagtccactctttcgcattgtttcaatcattggcattttggtttggcatttttttgccattaaattttcacatcatttacttaatcccatttcaggaagtgtgccatctttctggtcgttctccttttctaccgacttccgctgttcgcgccgactgctgagtttttcggccaattcactgatccccagcgggtgatcagttgggcagcgtttgccatgttcttcctccgctacctctacattttcctccatgttttagtggccattaaccgggcaaccgccatttggattcccttaaaatatgacaaggtcattagcgtggtccaaccaactggaacgaaagagaatttatttactctgtccaaaatgaaatcatccaaattttgtgcggatatttcctcaccaatgccataattttttctttctttcttggtaaaccaaaataataaacttgctaagattcggaagaatttgacaggctctattaatctccgttttatataaaagatcacaaaattatccaaaactgattcatgcgaatttggcaataacttttaagatgatatattaatttggcaggctaatagaggaattgtattgttttaattactctaattattgacaccttaaagcgggtggcgagaattggtcctgtcccatctaataaatttacacttaaattcacgaaattctcagatttggaaaaggcattggcgtcggatgatctgcttttcattcgtgatcgccttccttctcccgtttgatcgtcttttttcctccagtgtttatgcgccaatggtgaaggggatgaacggaggctttacagcggtgccaaaaaactacgatttgtatacggtacttagagacttccgagagatcgattcctctctccctccagtaataccgtaggatcgtgcaaaaatttttgtattatttttagctggatcaaaatcttttgacggcaatttcctgcggcattggcattttgttgtgtctgtgtttgaacggagcgacctttgccaaaattgcaagtttcaaacaatcactgaagggagtggccaaaatgtcaccagctcaactcaaaacagaagccaatctgttcataatggccatttggatgaccatttcattaaccattttgggcgtttttcaagtaaaaaaagtgcataaaatttcgctgccattttaaattttgaatataaatttaaaataaattaaaagataattaatttaattccgattttcagtgtttgctgtactttttgccgcgcggcagtgactccgccattttcgcaatgacctttctgatgacttttgtggaggacctcaacagcttgagtcagccatgggtgctcattttgaccaaccaaatgctgagaaaagtggcatttccatcagtttttggcggcgcagatttgatatccaacccaaacattaaaatcatcaaaatcactcgagtggcgcctgtgctggctaattctgcgagattttagaatcattgacattgtcgaattttgtttttcttaacatttttaatcttaattttttattaaacccatttttaattaactcggcagtgccggtatgtgtgaaagtgggaaaacaaatgcgttttaaattttcatttgatattttattttattttttatangcggngatttaaatccatcttttgattaatacggatatagcacggaaaaagagggcagtgaagagangagagagagctttggtgctgtatagcacagacattgatgaaaatacaaatttaattaaacaaatgccattctgtacaaggctttgcatcattttattt

SEQ ID NO: 13869 - DNA, 2577 bp, Heterodera glycines
ttttcgaatttttcccggcggcgccctccaccagccaaagatttatttaaaacatagtgcggcaaaaacgttgattcatcaacttagaaattaacctaaatttggagaatatctattagcaaattgagcctagtttttaagaaattccccagcggcgcctgtcggcaccgctggacaacaacatcttccctaatttttttttaaaaagtcgacttaaacccaaaatcagcaaaagattttcgtttccaaatcacagttatcttctgatcattaaagatgtaaattctgaatctctctgggccatatttcaattccaatcatttaaataaaaaattcattaatttttcgaaagcattttgtttctttttcttttattaattatatatatatttattttatttttttgctataacattgcttttttcaattacctatgttaaaaacaatttatatttagaaaagcggaaaaaaatgccttttaaaaatttttttttcatgtgatataatttgtttttttaatcgataatgaattcgcatttttttttcatttattttttaataaacggatatgcatataatccatcttatgattcagacggatatagcacggaaagtgaaggcatgtgaagagaggccattgttgtgaaatagacatagacattaacgaaaataaccaattctttattccttaaatttaacaaatgccattctgtgcaaggcttttcatcattttgattatatattttttaatttattttttcctcaggcgatttttcatgtgaatttccaataatatgcatattatattaatgacatatttatatgtatataaacaaaaatatatatacaaagaaaacaacattaattaaataaaatccattcaaaatattatgtttaatttctttgttttattttttctttcattgcatttttccaaaatcattggaaattcaaatgaaatgagcaaaaggtaaacaaatgaattttaacaataaaatactcaattaatttgttattttacataaaaataaattaggaaattttgtgtgaaaattttctttttaagcgcttcacggtccaattcggtcggttctgataattcggataatattatgacgacagcccaagtatatgccgaattttatccttcaaactttgtgtccgattcggtgaattaaatgaatattttttttgtatttatgaattttattcgaataatattatctaaaggctttcaacgattcacatctgtttaaaaagtcgctttccttcaacccaacaaaatcgaaaacggtaatggcataaataaataaaaattcattaattaatttgcaattttttataataatttaggagggctcggacaatgaatcgcagcaacacattcaaaaatcattttcctttaaaccgtcaaatattgggaaaacatcgagagaaagtccgaccaatttgcttgaagaatcattcaacaacaatcgaaatttaaaattaaaaaaagagatggaggagaaaaagaagattttggacgaaaagattgacaaatggttcggaagcaaaaagggaaatggcaaaaatggtgaaattaattaatataatatttaaaaattaagctaattaatgtcttttaaaagagaaatcgaattttaaatgaatgaaacaaaaccaaaaacaattcgtcggattgaatttatatatttttaatgattattaattaataacatcatcaaataacaaaatttaactaatgatcgaaatacattaatgaattttagcaggaaatgaagaaaacaaattgcgtaatattctcgttgattggtgtctgaccacttttcccaatggaaatattaaaatgtagaaagaacagaaaaacaaaaaagagataaattatcacagtgtaaatgttatatatttattttattgtctgtataaaatttattttgaaatttttattgttttcagatgaatgatctggaataccgtaatagctaacagaatacaatacttcaaactttacatcatgtaaaaaattttaaaaatcaattttattaaaactcagttaaattttgcttatatatttaatagggaaatgggaatttaagtcatatgaaattcacaaagtttgaaaaatattcagttattggtcaaatgacttgaatatccccagccttatttcgagttaggacacaaattttaagttttaatatttcgatctgcatttttatgaaaaatttaaatgattttttttttttgtaaaatataccatagaaatcgagaaataaaaaattaatttttaaataattaaagtgttattctaagtcaatttatcctttttctgacattttgttcttattctctcttttcgaagaattttctgtccaaaaaccataataaaaaaatttttttatttatatatttgggttttatgaacatatttcttacatatttcaaggctaacaataagaaaagaaacgagcgcagcgaagaaatagtgcatgagttgggtccctctcgcctcccatccccctacactttacaccccagcgaaataaactgaaaacaattctcagctatatatat

SEQ ID NO: 13870 - DNA, 3186 bp, Heterodera glycines
ccgcctcacccggtcaaaattcgtcacagggccaaaaagagaagcggggacgacactttccatcattttcgaaaaagtaaacaaaccgttttagacaaacactcatttgccagaaccaaaaacggaaaggatttatcagataaacggacattacaggaataaaccaacaaaacgcggaaagatcagaatttgaactctttgtatttctttgaggaagacgaagttttcttctgctcttgtacttttcttttgcgcttaaaaattagtaaaattaataaagaaataaataatcactgttcacattttgctttgccgaatgttccgccacctagaaatccaacaaattatgtaaatcctttgaactgctcagaattacgctttaccatgtccgagaagtcctcctcattttccattcgtatcttcgcctgctttcgaagttgttcctcgtattttcgctcgagtcctccttggtcttcgagttcctcggggttaagtgacacttccacgccttcgttaggcaccggaattttgcgctgctgaaaggaaaagccttttccagagaaggaaaacaaagaaaaacaaaacatacggcggcgatgtcgtacacgtgactggtggccatcaactgagtgcccactctgtccacctttttctctgctaatatcgtgtaaagcggcggcgcgggagtttcggggccagagagactaaagcgattgtttaaagtccaccacaaaaggtgaaacaacacctgctttcgtccatcgttcgcttctttcgcagttcaattgttgaactcggagtttccacgcctggcaccgtcgtgatgccactcggagtcacgaaactgtaaacgaaagttgtaacaaggcggaatttaccctaaaagtccaattcaatttgtttcgccgggagttattcgcctcaaggtgtgtccgaaacatcgaaatcggacggacaaggtgagtggtgacttgttgttagaaaggaaattattttcctatggtacctacttttggataaacactaaaaaagattttctggagcgaaatcttcccccccccactttgaatacgtatgccaagcgttggttacccttctgtcggcgcaggtgttacgtatccgccctccgggggtggcggtggcaatgcgccggtgccctcctcgtcgtcctcttcggcttcgctttcctcctcactctcttcctcgtcacttccaatttccccccaatggcgacgttcaatcctcgactcgtcaacgtcgtcagccacttgaggaacctgagaaatgaacaagttagggcaggggtgtatctagaaaaatttttcgggggggggggaccggacccgaagatttttttttctcttcaactgaagacctgtttttttgcaattcacggaataaaaaaatttttttttacttgctgggttaaaactgcatttttttactaaaaacaacccaattttggccgttttaaggggaaaaattgtaaaaaatagtgtaaaatgaaaaatttttgaacacttgagtgctatttgttacgaaaattgactgtaaaatcaaaaatgtacccataaaattttagttttttttggggggggggggaatcgaaaaaagtttccattatttgctagaaaattttttaaaattttcatttcgggaggggggggggagggggattttttcccccccctgatacgccttgagttagggactttatactgcaaatgtacattatcgaattcgattccgaatacttacagtcagtccaaaaacgtctccatacaaaggctttccgtattcgtcaaccggtggttttccccagcccccagctaaaaaaataatattgcaattgtaaaaaaagagcaggaaattgccgtgatatccgaaggcacacccttctgggatcggacagttgaggccttgaatcttcaaattcgggtacgaaggaggcggcccataacgctgcatcgcaatgagccacggaggcggaaatttgttggagttctaaaattcactggaatttactctcggaacaatttgttggcgggtgaccggtccaactggcattcccagtgcaattcgaagttcatccgacaaagtgcccggcttcttttctcgcatttgcgcttccaattccttcccctcgtagtaaagttcgcccatcttcgtcatctgtggttttgtctgccatttgaagaaggcgtcgtgaagtttctgatagtcaatgtcgattctgcccagttttggccgggttcgttcgcgcattttgtttttcagcgattggtgctcctccttttcccacattgtctcacgcatctccattatccccgtcctcttaataaactccggcaattcaaatggtggtcgctcaaatcctcttttgccggccaaatatttcctttttgcgttccaatggcgtgggaccatgactgtgtttcgataggacttaagctcgacgagaagaaatgggtcacgggaggtcacatcggcccattcgacgacgtcggcccgaggtgtgctcttgaaaaccataaaaaagcattaataaagcattgtgactttttcgcgttaccgcctttaggtcggccatcgatggttgtagcgccagacgcaacttcttacgactcattttatgcgcctcacctgcctcttcagcttctttctaaaatgaaaattaggacaaaacgacgcgaggactcttcacccgtctctggttcaactcctcctgaagaatttgttcggaaatcgcagctttgctgagagtatcctcggggatttcggtccgaacttgtcggaattgttcttctcgctttaattcctcttctgtttttatctgcaaaagtatttgggtgtattcgttcctagtatttttttccttgccttgaatgcatcgaaaatcctcgaaaagtaagaaaagttcgggtccatctggtcgagctcgggcccttccccaacatattcaatttcgaccaaaagatcgtcgccagcagtgcccttctgcttctttccctcctcccctttttgagcctttttttccttcgtctccgtttcattgctttctttgaccacttccgaaacgtccttttcctcctccgtttcatttgtccctccttccgcttcaaatccactatcaatttcattcaccgcttcagacatttcgactttttcttcaccccatgtgatgat

SEQ ID NO: 13871 - DNA, 979 bp, Heterodera glycines
  unsure (1)..(979): unsure at all n locations
tttcatgcattcgaggggcatctgggtggataaagattaaatttttatttagtgtgcaaagaaatggagatagaccttttgtcaagctttattaagttataacaaatgtcatttatgttttctttttatatttgaaaaccaaatgctaatacattattttaatctttattttaaccgtacaaaattctaatatcggcaaaataattggagctgaattctgtgagcctttattcagagagccttttgaaaggccaacctttttcaaataaacacatcttagtagaagtacacagttcattatttcgaaattgaacagtaaatttggggagttgaaaattcttttcttgctacattttgaatcattttttatccggtgacagcttataatattccttattttcatgcattcgagggcatctgggtggataaagattaaattttatttagtgtgcaagaaatggagatagaccttttgtcaagctttattaagttataacaaatgtcatttatgttttctttttatatttgaaaaccaaatgctaatacattattttaatctttattttaaccgtacaaaattctaatatcggcaaaataattggagctgaattctgtgagcctttattcagagagccttttgaaaggccaacctttttcaaataaacacatcttagtagaaatacacagttcattatttcgaaattgaacagtaaatttggggagttgaaaattcttttcttgcaacattttgaatcattttttatccggtgacagtttataatattccttattttcatgcattcgagggcatctgggtggataaagattaaattttatttagtgtgcaagaaatggagatagaccttttgtcaagctttattaagttataacaaatgtcatttatgttttctttttatatttgaaaaccanaatgctaatacattattttaatctttattttaaccgtacaaaattctaa

SEQ ID NO: 13872 - DNA, 1214 bp, Heterodera glycines
ctaaagaaacgatgaacagtgtaaaagttggattgaattgaaaaaaattgatgttaaacctccttcacatccatcgctttgagcaattcgcgctccgcctgcgagaactgctcaccgtcccgtaacgcatgtttgctgcctttcagtgtctcggccacgcgcagttccaactcagtccggggctaaaatccattttgagatttattgataaaaatcttccagaaaaaaaaacaaacaaaatttaccgtgtgcgttttggcacgctcttccgctgtcaaagtgcgcagcggatcatcacgacgttcgtcgtgcggaaattgaagttgttcagcgacacgaaggccctccacaattgggtcccatggttgcaattcttctctataataataggcaggtaactaatagaacttggacattgtttaaattagttcctatacaaatcaaaataaggacagtgactctcgagttataaagaaatttgtatttcttgatagttaaaaatgaggccccaatgaaccccttcaaaaagagatacacattggctgaatttttcttcacaattgggaaaacagtctttacaaatgaaccatttggcaaaatgttcatccgtttttcccaccccaatatttgcccacttcgtctgtcgataggccagccgactttcgatgcgaatcgtcgcctgtctgtgcagcggtgcggccagcactttgttgtcgcgccgttcactctgctgcgcctccagcgccgcctccaactcggcttccgcctccgtccgcttcgtcacccggcggggcgtcgctgtgcgctttttctgctgctgtgccaccgccgtctttttcctccgattgcggtccaattgctcctttacggcattcacattccttaattttggacggtgaattaaaaacggggagttcaaataaaacacaagttggacccaatttcgaatttgtccaaacccaattcccatgtttcagtaacggaaacagaaaactaagatttgtgtggtaaaatgctacctcgttgatttgatgttgaccaacagttcgtcgacgcccacccgttcatcgtcgctcattttgccaaatactttaaggaataaattgcaaaatgcagtaaatttaggttgtcaaataataaaaataaatgtcatgatttgcaaaattaacaaattattgtctacgcatttggcaaagttaacaactttaatctca

SEQ ID NO: 13873 - DNA, 1408 bp, Heterodera glycines
ttttttggaaagatagtgcaaattttgtgtccgtatttcgcttacattgtcacgttggtccaaacctgcccgaactccatgctcctctttcagcattttgacaagtgcttctgacttttcaatcagttcgacccgcttttcatccgacaatttaacggtaattccgacggggataacaacgacctgaaaagcaaattagtaagatttgaagtcgttttgaaagagtctccaaaatgaacaaatccctgcctgaatgtccgcaacgcgtggtggcaacaccaacccggtgtcgtccccgtggatcatcaccatggcaccgatggttcgcgtggaaagaccccaactgttttggtggacgaactccacttgccctttgacgagtgagtcaaattcgatgttgaacattttggagaagttttggcccaaatggtgcgaagtcccgccctgaaaattgcagaattgtcgaaaaaactgaactggaaaaccaaggaaacacctataaatagactatttggttcaatgaattcgctaatttttttgtaaagtttgtaacaaaatgccgactctctttccacctgaatgcctcggccattgaccggcacatacgcctcaaccgtcgtggtaaaatctgcgccagcaaatttctccttttcagatttgcgccctttcaccaccggaatggccaataaatccgtgtagacgcgagcatacaaattcagaatgtcgtacacttcctcctcagcctcctcttttgtcgcgtaggctgtgtgtccttaattttgaggaaaaagaattgtcttacactttatttcatgatgcttttgaaaccaccttcctgccacaaaaattcccgggtccgcaaaaatggagtcggatgtttgaattcccatcgcttaaatggaaaagaataatttgcattttttatgggaaaataaagcaaatcttaccacaacattgcaccattggttgattttgataggcaaatccctgtgtgatttgcaccatttggcaaaggttgggtacatcaccgtttcactggtcggccgaatggcaattggaacggccaagtcggagtttccggccttggtcacccaagcaaccttaaaaattcgttttataaaaattcaaattctcctccccatttttaagttaacctccggggcaaagtcggccacgtgcgttttttcgcgttcgagcgcagcagcggagacgaacatgggaaagtaacagttcttgacgcccagctttttgatttcagcgtcgaagaatgcttggatgtgttcccacacggaatacgcccagggacggatgacgtagcagccggacacgtcgtaatactcaataagttctgccttgacgatcacctggaaagcgcagcgaagtgtttctttctatgtcaacagtcaca

SEQ ID NO: 13874 - DNA, 1261 bp, Heterodera glycines
taaaaaccaaaactgtttgaaaaaaaattaattatttgcttagaaacatcaaaaatttatcgataaagataaagaaaaaaaaaaaaattgccatcagaagggcgggaaccacttactctgatgactgatcacagtaaaatagtcacagagtaagtgaataaatatcaagtgagatcacaggttaaagataaacaataacgaaaaatttatatgaaaataaaatcgaggtcaaagtcaataaaatgcctcaaaagttaataattctttatacacacagcggcccaattttgggctccaagtacaaataagtttattatttatttagtaatcagaacgccaaaactttgcaaaacttaaaatttattggggattttcccttgtaaaaatggaagagccgatctcgagttaaaaacataacttcgaaaaaataaacagggattcgatagagggggtcaaaatatgggcctatgcaaaattttaagaaaattggtcaataggaaaatttttttttcaaggacaacaaaatcaaatttatttgcaacatttttagcataaagatggtatctacacgtaataaaactggaaaatttatgaagctaagcaattctgggactgaagcaagacgaaagcggaaggaatggcgccgggagcatgcaaaaaaagctggatcaacaccaaaaagtgacgaaaattgaacaaatttattttattttaaaaacactgcatttttcaggactaaagcagaccgaaaccgtgccaacagcagatggagaggggacatcgacccaagctgccgaaagtggaccatcaacgtcagcttttgaccttcgagcggcgaccatggccagagttgtacgaagattaccgtctcattcagccaggctgctcggtcaaattctccatcaaacaatttcgtttgtgccgttttccctactaaggatagccgcgaaaacttggagcgctatggaagcacactttgggaacaaattgacggaataggcacattggcgggcaaacgagtcaagtggtaaattttaaaatttattttttccatttttctgaattcaaaaggtttatgggcggagacgtcagttttatttggtcaatgatcgggcattgtggttctgcagtgacaacatttccgtctccaatttgcagttgcagaagtgatcatttggtgcaggaaggcaaaatttgtgaactccggacaattgatcaaaatgggcagttcgcggagcaattcaccagagccatggtgaat

SEQ ID NO: 13875 - DNA, 3783 bp, Heterodera glycines
  unsure (1)..(3783): unsure at all n locations
tgggaaattttaaaaaaagtttaaaaaaatgttaaatttttttttcttgtaaacttataaatttttctaatttttgcgaatatccacaaaattaccatttttggtgaaaatctatcaaaaattaatcaataaaaaaaaaaaattcgcggcaaacgcttgcaaaaaaaggtagaacagtcacaattaagatttgcggttcaaaaatgatgcgaaacgcgctgctatacgcgtatacaaaaaacctcgcccgcgattggcggtttgctatgaagttagtcaaaaaccatcatttgactaacgtcccaacactttcgcttcacaacacttcgcccccgcccggcagcacatacgtaaagtgccgtttccttgatcactttgaaggcaaacagaacgtcctgttcgttggcgtcctctttgttcacacaaaaacggatggtcgtacgattgtccggtgcagcggcgatcacgtgaatgtgactactgagtctcaattctttcaacaagttttcgttcacctcttccgaaccatcctgtgcaaaatggaaggaaaacaatttaaaatagagcagggcacggggttttgcggaatccaagtccgattttttttttttggagaaaatgcgtgatttgtgggattaatcccgcgggatccggtcctgcaaaaaattttgagttctaattgcagcgggatccgcaattagttgcacaaattgaaatcactgtaattcattaatttaaattaaatgtatgcaaaaacccctcttcccaaatatatgttaaaaactttaatagaaaatgcttaaaacttcaattgaatatcaaacagaaaaatgattttaaggcgcttttccgcaataaaatctattaaaaaaatacatattttcaatttgataaaattatcgctttaaatttcaaagttaaacaaaaaattgcggaaaaaaatttcactaatctgaacccatgtaaaatgtataaataaagaggaacttgtaagcaatatttttagaaacaaaaattctttgcaataattaaatgtcatttaaaaaaaaactaatttacattcagcagagaagaaggataattataaaatttgagcagatcattgacacataagaattagaattggttttgtgaaatattctacatttttgaggttctacggtgccgttagtcgcctaagaaaaaaatggcccaatttcttaacacattttgcagcaaaaaataaataaaatattttttgaatttttggaataaacttttgaaaaatgcttagaaaagtgaaactgacaaaatgccagcaaaaaaaaacaatgaaaattctgcgttatttaaccccagattattttattcgtataattcagaaacggaggtaatttaattttctcaccttaatccgaaaacagaccaatgccatgatcacatcgccaacaatttcgaaagtcgggtcagcagacatcaatgatacaaaatatttggccaatcgcacatgctcgcggatgtaccgttggagaccctaaaatgcaaaaaataaaataacgaggacaaacaatattttggaatttaaatccgctcttcaaaaatgttaaaaattttgaatgttccgtagaccaataattctgtctaattgattaagaaaggcttttgattttttttgagttaccgtatttcttcgattatagcccccgggggctctattgttcaacccccctcaaaaggggggctttattcgagaggggggttctaatcgaggggggggatataatcgaagaaatacggtaaccgaaaattcagattttataagaaaaacaaaaagaaaaatttgacacaatctataaataaaataataattgaaaagattttttgaaagaatttcattttaaattaatttgttaaataaattccataattaaaaatactaaccaaataatttttagcattttgagtttttccattttttagggtccacatatttatgttatatttaatattttatcaatacaaattgcataatttggtaattagttaacttccaaaaaaaaagatttattaaataattaaaaattttgtgattccatttaaattcccttaattcggcattcttccccttttcgtctttactatattggataaaaattgcttcgttttaactaattgccacaattaataaattaacttttaaatcattgccccaaatggccacttcgttgtttgtcaagcgaatgatggctaacgcgtgctgttttggccttttgctgctctacgtgatgttcggtgggcttctgctgctgcgttttgagcgtggccaatcggagcgggcgaaagacgaattaatacggcgcaaaacggaatgcattcggcactttttgcgctaccaaaggcacttttttaataaaattaaattagcatttgcaatttttattgcaataaatattgtcttaaagtcaaagaagctgcttgctgggtagtttcttaaattagccacgggatataaaaaatagaaaaaagaaataattaaattggcttaaatttcagcgatggcattttcaatggccaagacagaagtaacgaatcagcagcaaaagcgccgactctcatctcagcagcggaacgtatcactgagcattgtctgttcggaatcgtcgacccggcggagggccggcggcgccaaacatggaacttccgaaatgccatcctctacggctttggcattctgacaacactcggtgagtgcgaaactggcgaatctgcggttaacacggcgaattgttcgtaattaaatttaaaaaaaaaacaaaaattaaattcaatttgatttttaaaatatccttcagtggataaatgtagaatatgagaatgccaaaacttatcggtcatcaagtaaattagataaaaatggccttattaagagagaatttgtgccaaaggagggaggcacaatttgagataaaattaattcaaatattaattattctccttaaaaatattggccatttatttgctcgacagacaaaaaataaacaataaaacattttattctcctttaatcacaacacgtaagtaaattttcaaaaaaatatacaaaaaaggaataattaaaataaaaataaagcatttaaaattcgcgcgcaaaaaaacgcttggccaagcccattgattagtcattcattccctcgggaggcgccgcttcgggcgattctttgcgccggcggaaggacgaagaagtgctggcgcggtgctgctgcggttgggaggacgaagtgctcggccggtggtgctgctgaatcggcgcctcgcctccgtcgaacatttttttcagctgactgaccggcttctgaacagcggacactcagtttggcacgttaaatttgagaatggcattttaagaatttatttcgaaatttttaacccaaaaaaatgaaggctgatatttttaggtaatggcgaaaaattcaaaaatatttttactaaataccagcaaaaattgcgaacggtggcgaaaaagggcaaaaaagtgatatgaaatttaaaaaagtgtgctttatatggaataaattaaacatgaaagcttgaattttcttttgactttttgaattccccgcggtgtcttttcaccctttttattttaattgcatttgttttacaaaaaagacttaatagtgattagcaaggcgccaaaatagtgacgtaattaacagttattacattttttcaatttaattattcccgttcattaaggtttttttggngtatcctaagcatatttttattataaagtttctgtat

SEQ ID NO: 13876 - DNA, 1778 bp, Heterodera glycines
  unsure (1)..(1778): unsure at all n locations
gatcactcaattgcaaattcaataactcactataacactgccaaattaaagtgatcactcaattgcaaattcaataattcactttaactttgccaaattaaagtgatcactcaattgccaattcaataattcactataattctgtcaaattaaagtgatcacttaattgccaattcaataattcactataattatgtcaaattgaagtaatacacccaaattgccaattcaataattcactataattatgtcaaattgaagtaatacacccaaattgccaattcaataattcactagatcactcaattgcaaattcaataactcactataacactgccaaattaaagtgatcactcaattgccaattcaataattcactataattctgtcaaattaaagtgatcacttaattgccaattcaataattgacaaaaattttgccaaagtgatcacgcaattgccaattcaataattgacaaaaattttgccaaagtgatcacgcaattgccaattcaataattcactataattatgtcaaattgaagtaatacacccaaattgccaattcaataactcactataacactgccccataaaatgggcccctgatagtgatgaatcaacagattccacatttattcattccttactactttatcctattccttcaaatttcctacaatgaagaagcattttggcttttcactgttctccgttggtatttcggctgtgctaattataatgcttatgctgataacgatcctgccgccatctattgctgatgattatttggaaatttttgcaaagccgcctattgccgatgccaaccctaaaagcgttaggctgaagaaaacggattctgtggaaactttgaaaaaggaaataggaaaaaaacttggcattactccaagaacactgacacataacagcccatatgcccttcaacttgatgacaaaaaaacaatgcaagattatagcattgaagaaggtgatatcatttattatttcttgtatggtgtgattaaaattccggagggtgaatttgaagtgttcgtgaaaaacggagagaaaaaatacagtattaaggtgaagatcactgatactgtggaaattttgaagaaaaaggtccaaaaagcgactgacattccggcagaaaatcaaacatttgcgcactacccagtacgtggccgtgtgcttgatgaagacaataaaacaatgcaagattacggaattttggaagaggcaactgttcaaatggtgttcccatttgaaattgccgtgtgctgtgctggcaaaacgtacagcgttaaagtgaaagaaacggatactgttgtaacagtgaaggaaaagatcgaaacaattattggcattccgcccaaacgacaattgatgagcaagcaacagagtgatgtgcttgatgacaaaaaaacaatggcttattatggcattgtaaaaggcaaaactgtcgatgtgtgctgggatcaatttgaaatttacgtgcaaaatggagatgaagttatcacagttaatgtgcaggccatcgacactgtggcaactgtgaaggagaagattcaaaaaaagactggcattctaacagaaaaacaaacactgagacccaagcattcgcgtgcactgagcaaagacaactaccgatatggtgagataaatccgaatgctattcttgcgcttggtgagaacacaaaacaatgaaagattatggcattggaaaaggcgcaaccctttttattggaatnngcatttgaattttcgtcaaattt

SEQ ID NO: 13877 - DNA, 957 bp, Heterodera glycines
  unsure (1)..(957): unsure at all n locations
ggacaactgagtacaactgagtaccgaggtcccggtttgaccgggaccagtcccgggngttttcccggttttcccagccaaaaattcccggtttttcaacccgaataggtcccggtcccggttaagcccaaaattcccggtcccgctctactctagataagacccataaaagaaagggcggatgtgcctcggtagctcaattgtagagctgcccacggaaaaggtacacgagtggattcggttcccagtgggaacttcccacccgaggcccaacattttgcccatttcttattgtagggttaagccccaaccttcggggagagaaaagtcaaggaaggggagaggtattttgtcggggatggctgaagaatttaaagagtcgttccgtgctgacgcgtttcgtaaaaaaggccacccgggccaatgggttcgaaacaaaaaataagtaacacataaaaattcataacttagctcaaattcaaccaaattaatatttcatggtatcattcaatagatttaattgatctctatctgaaaataatttacaaatttttttacttaagtatgagaaaagttataaagcattgaaaatgctatgttttttgcaatggtcatgcatatataattataaacacttagtgttttaagtctacaaaatgcaatttagccaaaattattttatatattcgatagccctaagaattctctatttaatttcagaaaatttcattgagtttcaaaaaattctgtacaaaaaattctgactaatgattttcgaaattttgtgataataacttttctcatacttaagtaaaaaaatttgtaaattattttcagatagagatcaattaaatctattgaatgataccatgaaatattaatttggttgaatttgagctaagttatgaatttttatgtgttacttattttttgtttcgaacccattggcccttttac

SEQ ID NO: 13878 - DNA, 2797 bp, Heterodera glycines
ctgctgagcaatgacgcattataaaatttattttaaaaaattaataaaaaatgatatatggaaaattggaaacaattcgcaagaaaagcaagaattcggactggggctaataaggggaaaacttttaggaaaaaaatcacttggatttcgtgaaaaaatattctgaaaaatgttaagccaataggaaaatcaaaaaaaaatgaataaaaatattttttatttaaatattttaattatttttaaaaatgctatattcgtggtatatcagcagcggtgagtaattcgataaaatgaaccatggtgtcaattgttcgcaacagttcaaaagaaatactgaaatgccgtgccattcacagacctttcgttttggcactcaaaaatgaaaagtcaaaattggtaaatgtgcccggtcgattgaaaaaatttctttttaataaattgaagtaaatcttatccaaccaaatattagttttcaattattttctcacgcatgagtgaataatttttttgttaaagcttcacatactgttcagcattttgcttttcacactaaactcattggttggacggactaataattgtacttttaaaatttcaattgtttattgcaattttaaattactgcgcatggactcttacatgatcaagcaagaaaaagcacactgattaaatagcccccaatgtttacagtgatgatcaaacaaagtgctcgaaaagcgcgattgttaatcgaattggcctaggccaaacctcaattaggggtaattaatgatgttattaaaccttaatcaccagtgctgatttaaattttatcaccattccaacaagcaaatagataattaaaaagtcattatgattaccaaaaaacatataataaaacggaagattgacagaagctaaaattagcgtgaaagtttccatcattaagccccttaaaactgttaaagcagccatagaacgcagaaataattgtaacaattgccaaatacaaacgaattttgaatttattatgcctataaatattaattgaattaattctttaaggataattacagtacactttcaccaaaaactaatacgatcagtcggtcaataccggtgaaaaacatcgaagttaaatttgaaactgtgaaataatttaaaatgagatataaacgaacaaaaaatggtcaaattggtaagaatttcaaaaaataacaaagtgtcaaaaggtaattaacggtgccattgagtgaacctaaaataattaatattaaatcattaaaaatatatttaattaaataaaatataataataattacaaattaatatgctaattaccgttcaattgtttatatcagccataatgactagggcggagaattatatggaaatccgtattttttcctggactgtgggaggcctgaaacacacgaaaaacatgtttttagcttgattagaagcttccaggatggatttctatatccacatttgtacatattttgcatttttctaaaaaacctctattaaaacggcccccggcagctaaattggcctttttgagcccaaaaacaggaaaattttccaaaaaaatcatttttcgccaaattttctcgagaatactgaataaatttaaattttcttaaaaattaataaatttatgtcaaaattaaacaaaaatacaaaaattttgcttttcctgttgattttttgcttaaaattaataaattttagctttaatattctaaaatgatttttaataccacattagccatttttatatgtattttaataaaatttaattaatttgaagaaaatttggaagatttacccatcaatttggaaaatttatgtccatatttttgccattttatgtccatatttcgcgattttttgtccatatccaaaaccaaaagtgtcgaatggcaacacatttaagactgagcctatggcaactatggcgtgataaaaatatgataaattgtcgtcatttcatttagtcaaaaaagccatcaaatggaaaaattttgagagaaaataattcaaaatttcgcccaaaatgagcaaaatttaaaaatcttgattcattttaaaaaatgccaaaatttaattgaaaacctataaaatctttgtaaaaaaagaacaatttaaaaaaagtcaaatatttatggaaatattgaattacaaaactaaaataaaaaattaactgctcataacattaacaaaaattattcagaggcttaagcttgtaataaaaatttatcaatttgaaaaattgcccatttcagaaggtaagtttttgctaaataatttttttttgttgatttaataaaaatattttgtaatttataaacaatggaatcgcgatttcaaattcagcttcaaaaatcaattcattcaaattaacaattactgcttatcaaaaacaacaaaatatcaagaaatttgattgaaataagccatagaaaaaactgtaaacaattaaaaaacaacaaaaaaatttttttgaacaattaacaacatcgaataattagagagtatcatcttatccaattaatgatcattttcatttccgaattaaattgtagaaaatatttacttcttgtccttcataaattaaaatttttgagtaagatacacaacgttgctgcttcaaatttgcaaatcgtttttgcttaaattatcaactataattttttggtgcattttaaaaatgcatttcaaataggtgaaattttttaaatgttgtctaataattaattaaaacattaatttatttaaaatatacaaagaattgcaattttttaagactctataa

SEQ ID NO: 13879 - DNA, 2209 bp, Heterodera glycines
atcagtaacctcgaaaacgcactgactcgtttttatgtcataagattttcatcgacgcatttccaggagcgcccccgtaagatcattaaatgcgtaaatttagcttcaaaattatccaccttcttgtatttccgcaaaaaaaagtgtttgtttttttatctaaaatatttttagttttccactaattttgcaaaatttatcgtcataatttatataaaaaaccctatataaattattttaattgtccatcatcataccaagaatgatgcccatagaaaattttttttcttccataaatatttccatttatatatttttttacttttgatgcattttttcataattaaaccaaccaaccggtggaaaatcatatttcaatttaatttgatagccccataagtcatcaccatcatcttcatcatcattatccggctttggcacaatttcccatttaaacgctttcaccgtaacaagaaaattggtgcaaataaacagtttgaaattaaaacaaatttgttcaacactcttcgccgcgtctgctgtgatgaatgtgtgcgctttaattttttgtccatcattttgcataacgctactgtactggagtttttcggctacggtaccgctatggccaacgaggcaccgtacacgcacatcgtaactgaacaaatgcatgaatatgtaagtgatggatttttttaggtgcacaaaattgacaaaaagaaaatcgagaagaattgttttggaaaatgaaaattttccaaccctttccaaaaaaaaatatctgaatttggcatgttttatggtgctaggttgtttcgtaaaatcccccattttagcgatttttttcgacaaaacatggtataactttgcttataggcaatgaaattttacattctcggtaccattcgatagccaagctttttctctattagcctggcaaaacttcaaataaaattatccaatttaacatacgttatggcagaagtagtacttattttcatagaactttttctaaaatttatcaattaaattttgaatggtaatagagaaaaagcttggctatcgaatggcaccaagaatgtaaaatttgataatttatgccatgttttgtcaaaaaatctttaaaatggcggattttacgaaacgaccagcacgatttttatgtatggttgttttttaataaatcaattacttttaggtaaaaataatcgttccaccagcagtgattttgtctccagcctctgtttcttgtcagttaaaaatttcaaaaacttgttaaatttatgaaaaaacatttttggggggttataaaacataaatgcaaaaaaataaatattatatataatagaagtgaaaatttttatgatcacctaaagaacggatgttcaatcaaacttggcgaaatttggagtgataatttgctgccttcacaatttgctttatttaaaataaatgaaaatagaaaatttaagacaaagcttttgcaaatttttcccatcaaaatttgaagggctgctgaaaaaattaaaaaaaattttttttttttttatattataatacatagagatttatgtgcatataattttatattatataaatatcgtttttttatgaaaatttcatgcataatagataaaaggcatattcaaaaaatcgttacattgattattattttatgattatattatatttttttcgtcaaattttttcatgtttactatatttttggtgagcagacaagcgactcggaaaagctcggcatgatgtaatattgcgtactgggaatgacaatttaattattttaaaacgatgacttttcgcgtttattttgtgtttaaatttcatattcgtttttgaggttttttgttcgtctttagttactttttgatattctccgattttctcttttttctccgtgttttaaaaataaattgttcttcaaatcgccttaatttgttctgatcaacaaagtgtttgtcatcagacgactttttgactacgagctgctgccaatttgtaaggcaacaattctcttcgtcttctctccgcttctcttcaactccgttaaatcttgactaagcattcaatcttgtccccgtaattgtgtttctgagttttaattacctgaccaccccatttccttccccaaccgtccaaaatacagtcagtcccaccccttttactatcccgcacccggagaggtacgact

SEQ ID NO: 13880 - DNA, 2008 bp, Heterodera glycines
tccagtttttttaaatttataattttaagttcaaattttttgtgttaaaatttcaaggaaaaaaaattctgataattttctagcgggttttttgaaaaacgcactgtgccgtccgaagcctcgctcatgcagtgccacaggtcgtcagtgtccgcgttggcgtattggtgcttcttcagataggcgcgcagtgccttttggaaggtggactcgcccaagtagttgaacaacatgcgcagcaccgagcaggacttctcgtaggtgacctcgtcgtaaatctcgtcaagttcgttcggattttcgatgggcacctttcaataaaaaagggcaaaaattaattggaaaaaaaaattttttttttttaagtcattttaggtggccgcattttccgaattggcaaatttctctgtttgtatacaaaattatttggaaaacaagttttttcaggttcgtaacaacaaaaaaaaaatttttttttgaaaatttacctcgattgggtgcgaattgcgcaatgaatccatgcccatggctcggaccaccgtgttgtccacaaaggtggaccacactttgaactcggggtattttttggcggtgaacagagactccatgaagcaggcgaagccctccttcagccaaaggtcctgccaccacttctgaacacgacgaaaaatagattattttattatatacaataattagatatgatgtacaacaacaaaatgaaaattaaaaaaaaaatttttaccaatttttgacaaaatttttttgatgaattgtcaaaaattgaccataaaaaaaattaaacttttttttcttgaaatttacttataaaaatttcagcaggggtgagttgagggagcaaaaatgcaaaaaaaactcaaataaaaaataaattcattcaatgttactccttaagagatttcaagaaatatttccaataaattaaagcattctcaaaaaatttaaaaatatttttaaacaatttggttcaattcggacaattattaaaggagttatatcccaaaaaatctcggattgtcgcccatttgtccccttttttcgagaaaaattctctccccccccccaacggattgactgactgaccattgtcacgaggttaccgaaccaaaagtgggccacttcgtgcgacatcactgtggtcagccactgtctgtgggaggaggaactctttgccgggtcgtacagaacgctgctctcccgcgcggtgatcagaccccaattttccatggcgcctaaaaggatggcgtttttaaaacaattaaatgcggcatcaaaagtcagggttttgcatcccgccacccctgaactcgagagttcgaaaaaaaaattagaatcaaatttgccgaattttcgaccatttttggttgataaaaggcataaaacacagcatacatgaccaaggggtgcgccagtcagacccccatacgtcggacgtttggcgcaggggggggggtgcgccaggaccaatttttctcacgtcggcccctattttccccggcgacaaccttttttttttttttgctattcaaaccacttttttttgcagcgtgttttttccaaaaaacttcgtgggaaggggtggggcggtgccgataggcgccgccgggaaaatatttttgaattttctatgggtttcgctacggaaattgttcaaattttaactttttcccccttcgttacgaccccctcccctcctttacagccgtcccccttacgacgcacgtgggggggggggggggtgcgcccttgttaatgtatgaattcaattgcatttttataacaataaaattggtttcattttcactaaaaacaggtttggcaaaggagcgctgaagttggaactgcccaaactgcgctttgacgtggagaagtcgagcaccggcatttggcaaccgcgcggcattcgattggacgaagttggcacatttttaaatgcaaattttttttgaaggaacaccaaattcattttcgacaatctcaattccca

SEQ ID NO: 13881 - DNA, 2325 bp, Heterodera glycines
  unsure (1)..(2325): unsure at all n locations
gtccaacttcgcgcttcaaatccgacaaaactgtgcaatacttaaattgcaaaatatgaaaaaaaaaatttcgggggcgcttgggaatttccatacacttattaaatctgaccccgaattgaggcaaaagttgaaaatgttttttttcaaaatttacgtgagagaaatcaaagttttacatcaaacctcgtgccccccccccccgccgaaaaattcaaaaaaaattttttttcgagggtctggggtgaaagacctgctccgccacctcactcacccgtcccatcctccaacttcagcgacgccttttccacctccaatgcacccgcgtggagtgtcaggaaatttgttggctttgtaatctgaaaatggagagagggaaaaattaggttggtgaggggggaggaaagtgaaatttgccccaaaattggtggggtaggtaaatccttcggaattggtgcccaaaaaaagagataaaaattttctttaattttttaaagtaagaaaatgtgctaatcatttctacactattcagacgtacgttttaacgccaataaattttacaaaattaatttttttttttgaaaaaatcatttgcttgatgcaaaatcatagatggaatcaatgtttatgtaaatacgagcaggtcaaggccattatcggtaaacttgggtttttctggacctgaattcgtgtccaggaaatccaggtccaggcttttttcaaaattcgggtctcaattttttttaccgccgggggacactaattccgaaggattgccccaaaattttagtgtcaactaacctcaagatggatggtctctttgcccttgaatttacacgtgtccacgtcaacgctgaggcaaatttggtacagcgacgggctggccaactgcggcaatttgctgaatttgtccgaaccgtttgccatcgacgaaaaaagccttcggattattgcagacgaaattttgaggtatttaaaaaaagaaaattgaattgcttctaaaaagaaaatgagtaccaaatgttcagttttttgcacaggtaattaattttaaatgttggtaaattcggcacttttacgcttggggccaccaaaaaatcttttaaaccagggctcccaacctaaaattttcaaaatcagcattttgccgacaaaaaattagcattaacagactttaaaaatgaaaagtttttgcgattttgtgtcaattttttatgaaaaaataaaatattgtagccaagcagtagcgacaggctccgccaggaaatttttatttgaaattttcaacgaattttgttaaatttttggtaaaatacataaaaatgagcattattgaggatttttttttcaaaaatcagcaaatttctcaaaaaattagtatccaaaaaaaatcatcacgttgatctcttgaaattagcaaatcccttgaaattagcaaatgatgataaatcagcactataggtcaagcccaatgtttgaacaatgctcgaaacgccaaatagctaaattggcgttattttagcgcgctaattcaaaaattacactgataaaggcctttttgcacaactagcggggtcagcgccttcggcgcatcccccgctaggtagtacgattgtattataggattatgaatgataaatcgactggctcggccgcttcgcggcctcgcatccttttcttggctttttctccaatcgccgagactcaacccaccaacatttcaatcactggaactcaacccaccagcattccaatcactgggactcaattctcctgcatttcaatcactggcactcaacgcaccaacatttcaatcactggaactcactcaacccaccagcattccaatcactgggactcaattctcctgcatttcaatcactggcactcaacccaccaacatttcaatcactggaactcaacccaccagcattccaatcactgggactcaattctgcatttcaatcactgggactcaacccaccagcattccaatcgccaggactcaacccaccagaatcaatcaccgagactcaattctctggcatttcaagcaacgcgactcaaattaagcaattctccgatattcttccggtctctcaatcaccagacaaaaaattgtgccaaattcatcactgcaatataatatcgtgtaattttaggtctatataaaaaataaatgcttattaacaacacaattaataaatataaaggtaaaattgcaaattcaataaaatagaaaaaaatgttaagatttatcaatgaaaaaaaaaattgatcaataatcaaattatataactaaccanagaacttaaacagacctgt

SEQ ID NO: 13882 - DNA, 2153 bp, Heterodera glycines
tttcagaaatttccattttttgatccaattaataaagtagcatttttaaccttgagtgtttctataacttggtcacgttgcgagagaatgtcgcgatgagacaaatccatcacatggatgagaaggtcctatgaaaaggaaacaacaatttagacacaataatatcgctaaattctcacagcggtttcgatgtattggagagtggcggtgaacgaggcgaacagtttaatgggcaaattcgaaataaacccaattgtatcggccagtaaaattttgtgacgggacggaaggacagcctagtcaaaaggaaaaaatgaaatggaaaaaggcaaaaatgcctggtgaagggtcgtgtccaaagtcgcaaacggacgatcttcgccacacaacgattgttcatctgttaaactgaacagcaaagaaaaaacacaatcggaagtgtgcgtttaatgttgtttaccttttaatcaacgatgttttgcctgcatttgtatagctaaactttaggattaattttttaaccaattttaaactcacccaatgacaccgatcactgccattttggaggcattggccgaggctgaagcctcaagtcggtgtcgcacttcgttcgcacgcgacgcaatcgcattgcgaatttgctttcgcagtgaatgttcgcgcattcgaagaagttccacgcgtcgcgtcccctcggtggtccttaaaaaatgatttgtggaaactttagaaacaaaagcccgttagttcaaatgattaaatgaatataaattccgtttaattactagccttcccaaagatggaatcacttcgtcaacattcagtgactctgccagttcatcagaggaggaggaacttttgtttgcctcaatgtaacacaaacgatctctgaaacagattagttcaaaaagcaggaatattcggttcatttcgatggttttattagcctcatcagattttgttaaatctctttaaaacttggatatggcaaacaaaacctcataagaaccgaacatttaaataagcaccgaatgtacggaatctcggcaagtgctatttgaagtcgggcttcctccgtccgggcataaagcttgaaaatgttcaacacaatgttgtaacggtcgtagaccggaatgccaaagtaggagttcaactcgcgctcaacaaaacaaaggttttcaaaggaacggcgactgtttccctcatccgtttacctgttgggcgggagccaaaatgtcgatgtttacacagagggcattcacaggatgttggagcatccattcccgaatccgttcgagccttccaacgccccaaactaattttttgcgaattaattgcgcatcggtgttgagcacaatggcactaacaataaagcaaacaataagcaacactctgttcgtcaccctcccgtacctgacgacagtaaatccgggaatggtctcgcaaagcgtttgcgcttcgtcaatctgaaaagataaggcagaattttgggcataattaaagagcgggaatttaaacaagacatttgagaaatctgaacatcacctgttgctgaacagttgtgtttttaagtgccattttgcgaatgcgcggatggacaaggagaatgcgctggtcacgcgaactccccgaaatgttgctgagaccataagcaactttcaattcggtgaactcacgctcagttcgttcaatataaaaagagaatattaaaaaattaatttaagcactcattttggtaatactgtgctttgtcccccccccccttctttcgaaaaatttttttatgatttcaaaagtcatgaaaacatgtttaaaagtgttttcggggtcggtgatcacgaatccggcacccatttcgaacaattccgaatcccggacccgaactcggacaaaaagttgaaaattcaaatttttcagattttccgttcaaactttgtttaaatacacggaagtgaactaaaagtcattagtgcttcaataaaagataatataaaccatttttagacaaaaatggaaaatttgaattttcgactttttgttcggaattgtttgaaatgggtgccggattcgtaagcagtgaccccgaaaacccttttaacatattttcattataaagggaaatcataaaaaaaattttcgaaaaagggggggag

SEQ ID NO: 13883 - DNA, 1269 bp, Heterodera glycines
actacaaaaaatgataaattatggaaaaagaaagtaaaaattaatccagacagcttcaaaaattttgcttacgccggctcgcactcgtcaagcgcaccgccacttgccatgtccaccggttgctgttgttgcccagtttttggtgtgccactgcctccactggcggttgaagagccttctgccaagtcagggtgttgagacttgaacgacgactgcagttttttcatctaatggaaaagaaaaatgttttgataatttttagttattttttctttaacggattattaaatttgggcatagtgacgggaagcagttgctccccacccgccgttcgaaaaatttaaattttcatttctgactttcttagaattagaggtttatttatctacttaaaaatgaggactataatggctgtctaataattgttcggggttttctttaataaaatttccattctaacatctccaaataataacgttcgtctaagaatataccctatccagggccaactgtcgtttctgagcggcaagtgctgcgcgttttgccgatttgttggcggcatcctccgcagcagcgcctgcttgagccggcgcaggttcctcaccaacaatcatttggtcggaggtcgcgtacagagccgacacttcattataaagctaaaaattgtattataactgacattcaagaatgcgaaattcgactcaaattcgcatacaatcaagcccgtagccaggaaaaattttcggggggggggggggaaagggaggggtccggtccgaagacctttttttttttagcctctctatccataaattttattgatgaaattcattgtgaacatttttgattaagaacttcttatttatgactatttccattattatagtaaattacattttagaaaggcattattatgagcataagaattgctgcagttctggcgattatttttgtttatggcatggaacggaacagaacatcaaaaaatttgattaataggttattagaaatttttcaaaaaataattaaggtaatttaggttacccggacacgacaaataaaagagaacatttagcaatgaacaaaaagcagcaggggatttgagctatttatattcaattggagaagacgaaaaagtgttatttgattatttaattaattaaataatttaaatttaaaaataaatctttttaaatggaaatccgcaagaaaacttttggacgaaaaaaatggatggaagttgatttgaacattaaaccgcttttaatt

SEQ ID NO: 13884 - DNA, 800 bp, Heterodera glycines
  unsure (1)..(800): unsure at all n locations
gcatgcctngnncaggtctgctaataagggaaaacaaaatttggaaattaaataagcaacgaacgaaggaaaagaaaacatttttttccaaataatggtattaatatgtctatttaaatttaaataccttttcaatttggctaaacggtttgggcccagtgcttaaaatgtgcacaatttcacgctccaatgccgtttgcggagtggcttcttcactgacaccgatggaatagcgttctccaagcagaatgatactgaaaaaagcatctcaatatggaataaacattttgaatttgaaaagggggtaagaaaaaaaatacagcaaatgatagaattcttcggcgagtacggagaatattttgccgctttcctcctgactggtcccctcgatggcaccaggctgcgtactgagatcctcgaaaccgattgcggcccatttggccaacccttttttttccatcacacggatcagaaatttgtttggctccattgttgcaccaatcacctgtaatttttgaatcaatgcaaacccaagagaaagtgtcaggttgtgaggccaagaggcactctaacaataagcgtatgattgaatttccgtaactaaattcaacatctataccaacctgaagcatcagaatgtcacgatcaaacatctctgtccgacataaacatgaagcataattgtgaacctggaaaagattagataaaaataaacaaattaattaaaacgtggcacactcttccatgtccatgtgctggttttgctaatgaataccctgtcaaatagtgctgtttcacct

SEQ ID NO: 13885 - DNA, 1874 bp, Heterodera glycines
  unsure (1)..(1874): unsure at all n locations
gcaaatttatgaagtttcacccacacttataacccttctttgtcaacacctgcatggaactcaaaaaccgcagcaaagtgtgtccgccttggatgaagccgtcccgcaaagcgtcattccattcgctgccgtccttcggcacttgggtgagcaaatagccgatgtcgttcagtgagtacagcgcacgtcgcagcaccgcggggtaagtgtcggtggcgaagttcaaatgtttgatgtgttcgttgtgtggtgaaacttgaagatgaggcggattagtagaaatagatttaaaataagaggacaacaaattcaaattacgtgttttaatacgtgtcgggggagggagagcacattcaaaaataccctccccccccccttcttccaagcacggtcccagggggggggnggatacgaccccccaagcctctccgcacccgaaatttttaagggaaatattatttttgcggaaaatttatcttttataatgtaaaaattttcccggcacgcctatcggcaccgtcggacacctgttccccaaaggtttttggaaaaaccgccgcaaaaaacaaagaaaagaaggtcattgcccgggggaggtacccccccccaaggagaataaagaaattgctaaattaaatcaatcgtggaaaactaataattttttgtggaatgtgtattaatcccgctttggttgctcaccctttcctcctcctggcactcactcaccattcatatagcgctgatgacaaaacgcacgcagatgttcaatgcaaatgtgcaatgcgttttcctcactgatcagtcgccctaaaaaatttaaatatgcaaaactgaattcaaagtattagcagtttaaaactcacgcgcaactgttggcacagtaaaaaccttaaaaatatatgaaaagtgggaaagtgatggatgaatgggtttttgtttggacctgtacagtcatcgaagtcacactgacggaatgctcgtggtcatcatcaataaagtcgtcgaagatcaaattgtaattcttaatggagggtcattaaaggggattttatgtctgaatcgaatttaatattaaacagggtaattacccgaacaaacaaacgcccgaaggcatttttgtggtccaaattcatcagaacggtggacattaacagctggtgaaaggctgtgcgtgccgctaaaaattggtagaaaatagaaaaggggtttgacggaagattacatttccaaagacgtcgatcaaaaatcatcaaatagacgacatgggatggatgcgtacagtcacaaaggcgctcgagttggccgagtcgcgcacggcccaacggcggcacacagtcgcagtcgggacagccgaatctgacgaggaaaagggacggatgaaatcgaaatgagaaaaacagagcaaaccaaatgaaagaaacttgatcaagaaatgtaaaaattaaacatattccatttctctgtataaaagacacaacttacaaaagagactcgctgagaatagccgcaaatggtgctaaaataaaaaaatggtagaaattctattttttactcataaggaagcagcaaaaaaagatggaattgcatttttataatttattgcatacgaaattcttgcgcccgcgaagtgagccaacggagcaaccgaatcgccaacagttgaagagaagtgagagtagcgcggaacactttgaccaacaatggacccgacttttgggtgcgttggtttgagtcttttttgcttcgtttctacatgggaaaaaaagttttaaaacaacaattgataaaggcatagaatttaagtcaaaaaggtgcaaaagtatacaattggaaagtaaacccggcggcgcctatcggtcagcaaaaaatgacat

SEQ ID NO: 13886 - DNA, 3530 bp, Heterodera glycines
  unsure (1)..(3530): unsure at all n locations
gtctcggttcccggtttcggggttttagtctcggaaaccgagaaatttttacactgttcaagatgactatttcgggcagtgggggtcgccagcgaagggggaaaaggggaaaatttattgaattttgaacgtattttttaacaaaattcatgaaaatcccaaaaaagccaatgtttagggcctgtctttgttgtgatagcaataaaatttaagcataaatttaagatgcttttagatttgcatcacaattattgggatgccagcgcttgtcaaaaggacgtcaaaattagtggtgccaagcatttaattgccgaatgcgttggaggcatatacagtgaatatagtggtaaatttcgttataattatcttttaattattgtatttattctttaaaaggctgccattccgtcttcgcaaaacattcgatttcatggaataatgattacccttacattttttactttgaaatttcaatcataaaaatgttaaggtacaaaaaaaatattttataaattgaaccaaaagcaatcgataaacaaataattaaaaaatattttaattttgtttaattaatttactttttttagtgctattgactttggatttgccgtcagagaacagaccaaattggatggattaattatgaagggcgcttccatatattcgagcagcggttctttttggtgtaacggttcatcaacagctggcaaatcttacggtgccggcgctaccgtaggaattggcttttcatttactaatcgacaaatcatttttacaaaaaatggagtccttttgggtttgttcgtaaattatttgtttttttataaagtttttcattttttacagatttcttcactctgttagacgattcttcattttccacaaattctttgtttccattcgtttctttgtgtattatggtaaaattgaggcgaattttgggccgaagttcaaattcgatttgacgactctctgttaaaggaagaaataaatattccttaaatttggtcattttttacgggccaggcgccgttttcgcgtggggcggagtttttggactataacttttttctttgccaaccaaatccaatattcttgatatccttcgaaagcccttcagatgcactattagcctgcaaaattccaaaaaatttcgttcagtataaaaaaagttcgagccaaaaaaattggaaaatttggtttgttgaactcttctgaccataacttttttgaaccttaacgaaatttttccaaattttgtacgctaatagagaacacttagggctatcgaaagataccaagattattggatttggttgacaaagaaaaaagttatagttcaaaaactcgccccacgcgaaaacggcccacgcgaaaacgaccccgaccccattttgatacccttgtactgtttgaatttggaccaggcatttttggccaacgaagtcgggtccaatcttctgttgaccagccatgtgtggattttatccattatatagccaagtagacaagcaaatatcaaaataatgcataaaactaaggctagaattccaatagagacaacgtccatgaaataacgcttcttgcgcctcttccttttatttttgttgtcagctgaaatgggaaaaagaatgtttggggatggtcaaggatttttaatttattttgaaatatgataatgtgcgccttgttttttttaaaagatttataccactaagaatggatttttcaaattccatccaaaaatttgatttttacgaattctaaatcaaagtaacttttctgttaaaatttttgaaatcttgaatttctcgctaaaatttaaaattaatttgccgataagcaaaatttttgtttatttttaattaacgtttggggttttttttccggttttggaattttgcttaaacttacaaacgcatattattatcaattatttttacattcatatttgatgtttgccgcaatgtttaaattttccactgccgagtgcataagtcccaaaatttgttttccattggatttattcgttctttcgtcattcttttcctttttgtgttgattatttttccgtttttcctccaataataatttgactaatttggccattaattttgtttcaaattttttattcgttataatttctgacagtggaatttgttctctcattatacaaattttgatgacgaataagagatattctttcaatgaattcaaaacattccctataatgtgattagaaaataatttattttaaatattttaccaatataattaattttaacctgattttacttcctttataaagattgataatttttcaattatttggctcattactgggtcattctctttgattgctgataattttcgcaatttttcagtcattttttcgtttattttttgctgagtttctagctaaaaaaataataaataaatttttccctaattaattaaatttttcatatattttaatcaaataaggccatggaaatttgcataaattttttgttagcaaatgttttgttcttttttcattgtcccctgatgaaaaccataaacctcctttgaaattaataaaacgatcattttgtaaattacgccgaaaatttttgctttaacattttttcattttcccctgctaattactttgtttgattgcccagtttgatgaggctcaaatacaatgtcaatcaaatgctcattttccgttatttcattcaaaaattcattaaattccttcttttcaatgctttccatgttgaataattcggccattgttttcccattactttcagttgatggctttttcttttcgttgagatataaagtgatcagatcagccatagtttgttcatttttgtccatttcgctagaatccgccaaaaactctttctcgattggtgcaattgaactttttggattggattgacgagcataatacaacggaattttttctgttattttaaaatttcaaatttttgtgtttcaaaatataatttagttattatgttcaaattttaattatttattaattaatgattgttcacctttgcctctctcaacaaaatccgctaataatgtgctgattaagcagcattgaagaacaaaataataaataatctttttcatttaagactattttttttatattttaccttatttaatttaaaatataaaatgaaaaaatgagttttgaaaaaaatttcgaaggaaaaaatatcctgagcaaaactaagcttcgtctcatataaaggcagggctacttattttttaatcattataaactgcaattttttattaaaagtaattaattatatagccatttttcatatattttttcgtaatattctgtaaccaattaatttcatccaatttatgacaagtatttgccacatcatattgattattattgatgaccatttttatttttacaaaataacagcattattttttaatcttactanaaaaataattaaacagcaaatataaaattaaaaattcgtaaaatgtgaaacgatttataaata

SEQ ID NO: 13887 - DNA, 1135 bp, Heterodera glycines
tattgataattgcaaaaaaaaattcccggcggtgccttcagcaccgcaacggtttgccaagaattgcagaaattttttttttttcgttttctgtctgacatcataaggccaaggagcaaacaatgaaattaaagaaaatcgcccaaatttttcagaatttttcctctttttacctactacatccacctcttttacaccggcccccctacgacaagggggggggggtaagtgtaggcaccaaaaagtttatatacaatatatttcattacatgccaaacaaaatgacccatcctcggtcaatcccctttttttgatttggcatttttcaacacggtattataatgactgatttgttttttctgtatagatgatgagtttttccgaccgcgcgattcgggcatcagcacaacgacgacgggggaggcggacgatgatgggacggaggagcgggagcagtacatggacaaaaacaacggattggttcagcaaccgcagcaatcactttttgaccaattgtggccattcagcagcaacaaaccgggcgaggaggagttggagcagtacagcaacgacaaagcgagggaggagttggagcagtacagcaacaacaaatcggggacggagttggagcagtacagcaacgacaaatcggggaaggagttggagcagtacagcaacaacgaaccgtcggagggggagttagagcagtacagcaacaacaaatcggggaaggagttggagcagtacagcaacaacgaaccgtcggaggaggggttggagcagtacagcaacgacgaaccgtcggagggggagttagagcagtacagcaacaacaaatcggggaaggagttggagcagtacagcaacaacgaaccgtcggaggaggggttggagcagtacagcaacgacgaaccgtcggagggggagttagagcagtacagcaacggcaaaccggtggagaagtccctttttgaagagttgagggagacggaggagcagcaacagaacatgattgacaggtggttggagggaagagaagcggcgcgcttttccaaaaaaaattttgggagcaagggggttgcaaaatttacataacaataaattcgccctcctccgaaatcccaaaacaaaaaaa

SEQ ID NO: 13888 - DNA, 4256 bp, Heterodera glycines
gtgaattgtcatggtaagggttctgcttcgaatgttcgtccgtccgcccctttcgttggctttcgccaaaattcggtcgccacggaatcccttcgctgtaaatcgtttgaaaatttccccatttcttcgcaacggaatgaacgaaaacaacaaaatcagcaaaaggattttgctgatcggcggcttggacttcgctggttttcccagcagcaaattgggcgagaaatgagcaaaaatattgggcaaaacggacgaaatcgcacggaacaactgacggtcggggaagaagccgccgccgcgccgatgggcggaaattgggcccaaaggaaaacaacgccccccggggtgtggagggaaagcggcgaggggccggagagtgtccgacggacgctgaaaaaagaagtggggacaggcggtggcccatcagctggccaagaaatcactggctggttccaacgacattctgtggaggcaaatcgatccgaacaacaaccccgaaagggaaaagcattggaagagtttgactattgctggaggggagacaaagcaaaacggacggaaagcgacgacggcatgggaaacgaatgggtggggagggacagcaaagggcgggggggggggggaaacggcgggggcatttaaagcagcgacatcacgaacctaatcaaccccaccatctcaacagccaaaaaacagcagtgccatcgccactgcttgccgccgttcggccaccctctcccaacttgggcattcaacttccaatcgatatcgactctcgacatcccgactaggagcagtagaagcaaggcagcagagagtggggtcagagagcccatcaatcaacggattggctacggggggtcaaggtaggatcaggaggagaggatcattagggagcgtggtgcagcaacacactcgaggaggacgagctgtcaataatcgaggtacgcgagaactgatcagaggagagataaactgatcagaagagagaggaactgatcaggagagagtgggactgatcaaaggagaggacttatcagaggggagagagaatgatcagaagagagagagaccgatcagaggggagagagagagaagaggtcgaccagaggagagagggatcgatcggataccgtcactatccaacaaacgcttatgctcatagttttgatattattctttcagatactacacgtgccgaaccaattaaatgggacgacgccgaaataaaacaacgccataatcaaacagcgcaaaacaattttccactaattaatcgttcaaaaacgctcccgagcatcaaatttgacgccgatttgcagctgaaaaggcaattcgccgcagaaaatattcgcaaacgcgaaaacgaacaaaaaacggaaataatcgaaaggcaaagagaacgctgtgaaaacggagaagaaaaaggaaatccgtgggattatttgggcagaaaaaacgaaacaaacggagagaaaaagttggaagaggaaattgataagctgttcgaacagctcggacttctcgacagaaagcatttgatgaacaacggagaatttaaaagtattttcgagtcaatgcgaaagcatttgccgacaaaagaaacgcaacaaaaacaacaacagcagagcattggccaggggcagcagagcttttgctttacgaccaatggggcgcaaaagacagaaagacagcaaaatgcgtacaaaaagggacggagggaaactcttttgggacggagcgcatcgaacaatgcattagccgaaaggtatggacgaatcactcactgatcaacagaagtgatttgagacgaattaatgggtcattaaaagtggccaaactaacaattgaccccgaaagtgattgatcaaaccaatgaacagatcaaacattttgcagagcaaatggaacaacaacaacacaatcatcatcatcagcatcagcatctttattattgtcatcactttcaaatggggagaaacgacagcagcagagaaggcaatcacttccaaaaaatcagccgaaatacggcggaaatttggaaaatttttggcaatcggttggcgtgagttttacctccttttaccccaatcactcgcagatggtaaaaacgcgtgcggcggagacttcgccaagcaaacaaaggcttccgctgggattaagttccgtcgaaaaactgcagggcatttgccaatttacgaatcaaacggtggaagaaccaaatcagccaattaatgtgtacccgcgaaggtacggtggagtaattgagacggtggcaatgcggcggaacaattatctgatggaagcggcgaggacggcgagtccgtcgggcacgagcacaccgacgaccaattcgggcagagccacgcccaacttcagctgcggcaggttcggtcccaaccggttaaacggtcaaaatgtgcgtatttcaattcaacagagcattcaaatcggcctctccgtcgatcgccgatcaatcaaacacggactatttggactgggggactccgtccgcaaaagaatgagcaaagaaagagagaatcggaaggggtgcggtcgctttccgaccgtaacggaggaagagaaaggagaagcggtggaagcattggctaatcaaaatgggacaattatcatctcgattggtcagccacaaaagattggcaatgggaaccttagaatggacagccaaaggcagcagaggacaagtcgaagtccggacaatgtttgttgggtgggggagaatggcactaatcactcgggggggggggaagtcgggtcgaggcactaatcactcgccaaaggtcagcgagtgctcccagcagtcgcagtgttcagcagcgaaaccaacgactttgccccagccaacgccaaagcacaatttacgcgataagctgatcagtgccggctttccgatcagttgccagacaacgagtttttttggtggaaacgcaaagaacccattttatgggcagaagcagccggatgatcaccaaaagcagaaacagcagtcaaattcagcgccgaatttcccgctgacaaacactgtgatttcgcgagtgaatctgttcgagagtcagcaacaggtggacaaaagcgccacagacacagaacgggttcccattaagccgacttcggttgcttctgaggttggcaatctgtcgcaacactcactggaaacgaatcgtcagcacttggacattgtgaatggaaccaccagcggaaatggccaattgtcgccacgttcgtcggtgttccgtacaaaatcagtgatcgttttcgattttgacaatttgggcggcactcccacaaaagcaatggccaaagagcaggcggaagaaaacaaaaggaaaagcggaggaaagaccaaagaacagccgaaagcgaagcagcagaaaaaggaggagcagagaaggacaaccgcaaagggagaagagcaaaacgccaaaaaggtgaaattaataaaacaaattgaaaagggaagcaaagaaaagagaaagcggtaattagcggtaattagtattagttgtaagtaattgacccaacttaaagggagaaggcaaaaagggtatatatacgtattatttgtgataaagcagcacgaaaaatgccaatctcgggaaaagaatgcccaaccattcctcccttccccttcccctccccgttatccatttttcgtcattttcccgtttctgcggttgcccccccccgccccgtataaaataaactgaacagagtcagcaacaacaccccacaactcattcattctctcctactcttctcatctcttctcctcttcccctccgtttgtcctcatttattcttaattaatttattattatttttttgttaaatcctctcactcattaaattaataatttgttcaaaataaaatgcaaaaacaacgtaataatggtgtaaataatgaagggaaggatggaggaaagaagcgaatggcggacaatcggcgaccatcggcgggcggcagttgcgcagaaacatttatttgttcgatcgctttttagagattattttgcgcagtccgaccaaaacattcattcatttatttaatgttggtttcccatttccctcaatttctccgttttcaatttaatttttcatttcattaattatgtaaaaatcacttaaggcattcctttgctaatttatgctaattaatgagcaatgcctttacaattaattctgcggctccttttcttttcttttccaatctttgcgttaaattctgcccaaatgag

SEQ ID NO: 13889 - DNA, 2367 bp, Heterodera glycines
  unsure (1)..(2367): unsure at all n locations
tgaatatagaaaaaaaaactaaaaatgtatcaattagtcctacgttaggggaaaatacagatttcttaaaanagcttgcggccaccaggtctgataacgaaaaaacgatctattgcagggacatccgcagaacaaatacttgcccttgtggaaatttgcgcaaatattttaaaatttaattttcgtctaaatccgagccagaggcgacggttgtcacaatacgcggactattacagggccatagcacgcgctcgcagtgagaactcagctcggcaaaaacttcaacaagggagcggaattgcccttggtgctattcttgtgcctgttctcagtgtcttagcccaaatattatttaaattatttaatttacattattctcataataaaattagggctttttggggttcgcttctcaattaaatcaatttatcgaattgaaaaattgatcatttaattaagcggctcatcaaaatccaacagttgacaataatgataacggcaggaggcagcattcaaacagaaatgcagaacccgaacaacttcatcagcaaaatgtccaatcaaatcaacagaatgccacaagtacaaataaccaagaaataatttttttttgttataaaaggcatgcgctgtgaattgatgtgccggcttaggaccgcttttttctccgatatttaccaaataaatacattatataaaagtgaaaaatgaaatttctaggtcttcagaaaaagcatgggatgatttagtctctctcttacaatattaatttaattttaaaaaataaaatttcttttttaatttatattgactcgttagttaaatttaaaaatttaagccaaaattttcttaaaagaattctttagcttttgctgatgaaaatcataatccgaatttgaacaatgaaaatacgccgccaaataccaggacaaataccagcagcagtgaacaaaatggcagaccgggaagaacaaggagaggtacaatcaataaaaatatttattgaaaattttaaataattaaatttctttacaaatttaatctcctccgtccctcaaaaaagaagttaatcttttaatataaattttaatttttaactgaaaccgagggaatttatttgggttaggacgggaagcacgcttttgaaccggaagccggtacaaaatttaaaaattatcttccagttttatcagcaaatgtataaatgcaattttttcttttcaaattaccaattttttattttatgacatatcaaaatatttttgttattttatttattaaatttaaaaaaaacatttaatttaaagtaacacctgttgcttctccattacgaccaattaatgctaataatgatggtggtaatgatgctgttcatcagccacgtcaatcaacaaatattggcaacctgtcgaacaataacaataattatattgaagaaattgtacaacattatatgcgtaacaatatggaatacatgatcaccacatattccggcctcaatgatcaaacattacaatcagcaatgaatgagcagcaacagcagcagcagcgatcagtcgcaaccacaacaggttggtcgcccagaaatatatgaaatgataggctactgtacttttggtactgtaaaaattgtaaaattaaacggggagaaattgttagtgatttatgctgtaagaaaaatttattaatgaaaatattgttattattattattatttatgtaatgattttgattactgaaatccgttagttttgataaagtgttccttactgtatttttggaaaacttttttggcaaaaaattgccaatttttccaagtctttggatttatgcctttttgaaaaataagagggacaaaaatctttggctttaggccttttttgaaaaatgtttcatgcctcaaaataaggacagtacttaaaataaagacaaccagggaattttccatttttaggaagtgctgacagttcaaattcgattgaatatttaaagcaacagatgcaggataatgagtgttgtgattcggaaaacaatgacggcgagacgaactgtacaatttgcttagaaaaaatcacaccaacatcacatgctaagcaattgacttcatgccaagtctttaaaatatggaaaaaattatttataaaggaaaattaatttttgagaaaaataattgttttcccaaatttagcacacttttcatcgcgattgtgttgacacatggtaattaataaaagaaaggttttatttaaagatatatttatttgtttatttaggcttgtcacggcccaacatgccctttatgtcgtggttgaagtgatatccgtgatctcttggcgggaaattaaaaaaattgagttaatatgattc

SEQ ID NO: 13890 - DNA, 1918 bp, Heterodera glycines
ttttcttaaattaatgtattgtaaatccccaattaactgttggattaattattcagtatctcccggcgaatcaataaccattaatgacagaaatggtcatttaattgttatagtgcgaggtttttccgacatgctgcaatgtaaacaatttttttttattatttttaattaccatcgggaccggtactgtaattagttattagtttatggtacgggtcttgtttttatataaataaaaatatcgaataattcaaatatttttaacgctaatttgtttgtataattttttatattttagtggatttgagcagacgtttacattaaaagcggtaattcaaaaatattttatttaaaaaatataatatttaaattttatttatttatttttaggtggtgaaatgtttacaataaatgttattgcatatgaatgagaacagaaactttatgtaaaaaatataaaaatctttggatttgaaatcaaataaatttaaaacataatttttgtttccaatgtttttaatgataaatttgttattgaacattttgcataatttggcgatttaaacaaacaaataaattagtacactcaaaacagtatttatcaaaattgattattaaaagatttttggcacattgactaatcactgtgcctgctgaatgcctgatccaaatctaaatgcctcagttattaatcactttaccctacccaaattattatcacctcattcctacttgagtcgttcgtcgaagtcgggatcaatgtttcagtatgaaatctggattaattttatccaacgaaacgaaatattttttttatcaaaaaaaaaattgaaaaaaaacaaagagatgttttttaaaatattttttggcctttgtcggtgggtaatcaatcctttgttattgaaccccatcctcggccatatcccacacaaacatacttttcagaattacataaataaccttcaaaaaagaaattcccattaaaatttgttttaaaagatatttttaaatgcttagaatttctgtcaaaaatcagtcacccatcaacaaaatgatgaatcttttggtcaaaatgtggaaaggaaaactttatacaaaagaatttaaaaacgacagtaaaattgaaaatccaaggaaatgaatgtacaaaagtgatataataataatcataatcaccaagaagatagccaataatgttctgttgggcaacaggaatttccccatgagtttttgtgccaatagatttcatttttctaaatttcataattttctcgttaaaattgaatttttttttcaatccaattttcagttaaatttaatttgagctcacattcccggattttttcctattgccctgaaaatcccaaaatggaaaaaaatgaaatttcccgatagaaaaaccaaaataaaggataaagccaacggatgaaaagccccaaggatcaaaagatatacgtctcccccccccccaaaaaaaagaataaaatctcaaaatacatcaaatccattctcatgaaatctcaagcgatttctttggcgccgccttcaccaacattcgaattgtttgcctccaatttattggcaaaatgctttttcatttctttgaacttttcccaaatgcttttcgtctctctttttgctttttctttgttcgttttgatttttgtttccaaatttccaattttgtttttctcttcttcgatttcctttttcaatttctttttcctttttttcttcgatttcctttcccaattctcctccattttttctttcttcttcttggttttctttttcaattttccaatgtctttttgctttgatgagttgttccaatgttgttgcataatttgggagctcttctttttttcaatgtttcctcatcaatcgcaaatttctttgtcttcttttctaattgttt

SEQ ID NO: 13891 - DNA, 1361 bp, Heterodera glycines
aattggagcccatttcaacatcacttctggggcttttctgcaacttttggtcccttctccattcattttgttcattccttttcctttgtttgtttctttcagtcgcttgaccgcaaagaacaaacctcgaccgcccaaattagagaaattgacaaagccaaactcgctctctcagtctgtaattatttaatggaattttccattttgttaatcgtcgccactatacgtagatcagttgttttaagatatttcatttcacttgcatttcaattgcaatttggtaatttttagggtcggcatgccaaagcggacagagcacagctcaagcggttggcacctttgtttagccaccgaaaaaggtcattctaaaattgcagaaaaagagcgttgatcatcggaaatttgggctcaaatgcgcaaagcagcgaagaggcgaccacaactttgcttagctttttggccgcttccggcaaaaatgagctgaacgaagagtgggtcttctccatgttcagcagtttcattttcattcaaaaggtcatcgtccagcgaatcgggcgaagaatttgtgaagacggaatttatcacttcattcggtggcgacgaggaaaaggacggcgcgaatggagggagagcgggcgaagtcgccggaggacaaaatgaggacgaatgcggcgagagagaggcggtcgttcagggcccaattctcccaaatcgggaataccgacgccttctgtacaggatttgccaatttgatcattgttgtccgtcttcactttcattttcattttgttcctttttgaacacagcgaattgtcccgacgacggtcgaatagccccgaaaacgcgtgggagcgaaaagaccaccgcgccgaagagagtggacgtagcggtgacgcttggtacggtcatcgccgttcgtcgcgctctccgccccgtcgacatcgccgtcgaacgacgcgttcacgcgagagggaacgaaggcgccggagcagccggtcaaggagtagaaatagtggccgacaaagacgacgacatcactcatcaagactttcttcagcctcaccatcgccgaaacgctcagcaacagcatcgacaagtcggaaaactgtccgacatgcggaagaacgcgaaaggtgaagagtgggagagagaagggacaaaggagagtagaagagagaaaagaggagagcagcaactctcccctcagcccccgccgtccctaagaaaaaaaaaattcttgaaacttttacaacgatttttagacccaaaaagtaaattctaaaaaaatttacactacaattctatagaaaaaaacaaacaattttttcctgaaatttttactaacaataagtttttttttt

SEQ ID NO: 13892 - DNA, 943 bp, Heterodera glycines
aaaggcactgacgaagacagcggcacaactgaaagtggaggaggaacagcgacagaaggaaatgctgcgcgaaaagaaggtgagagagagagaaaagggacagaaagcgatacacagagaaaaagagagagagaatgaaactcagaaaaaagaggtagagagagagagagagagagaaaaaggaggggacagagagagtgcataaaagattggatggggcagggtcaaattgactgtgcgtgttgatggtttaaaattggggagtgagtgactaggcctcgaagatcgtattgagaatttgaaaaaattggataacaaaatttgcatttagagacgagaagaacaattgttagaggagtcgcgtcttttgaggaagcgggagagagagaagcgaaagacggacgacggaagagaaaaagagcgcagagagagtgaagcgcattcatccgccggcagacgaagaagacggtcgtcctccgagaaatgaccagtgatcggcgacaaaagcattcattcgaattgtgactttttgaattcatcagatggattataacatttcatttctaagttaacagtttttgccatgttatcaattcataccttttcctcatttcaattaattttaattctctattgaattcgttagccttcgatgcttcgctcattcgtctttttgtgtcgtacttttccgtctttgagttttggtgcgcagttcaacaaaaatctgttcgccgcttcacaaaaaaatgctgctctaacgaagtgagtcggttgtttccatgagagaatcattaattggcgattagtggaaatctttccatgtgcagccgatttttcagatttttttgttgcggttttcattggtttgggcatttcgtttattattcattaagtcgtttgcattttcgtcatttgtccctttttaattggacttcgaattcaa

SEQ ID NO: 13893 - DNA, 1129 bp, Heterodera glycines
  unsure (1)..(1129): unsure at all n locations
ggcatttcgttaattatcatttaagtcgttttgcatttcgttcanttgtccctttttaattggacttcgaattcaaatgggggtaattctccgccggtcgtgccgatttaactgtcccccaattgcgaattgtccctctctcagacatttgcacgtctctcctttccgttacgccgattcttcggacgatggcaaagaaaaaaaagaaaacacaattaaaattgacgaaacaatccaaaaggataaagttgacgaaacactccaaaaggaagaaaaggcggcccaattgacgtcattagagccgcaaaggttgaggatgaagccggacaaccggcgagtgctcgtccgaatggccatcaaagcacacaaaataaatgcggccagcgaggagggcggcggaatgtccggcgcaaaaaggtagcaaaagggcgttgaaaatacccgttgattgtgagagtgcccgggcgtggtggctttccccatccatttttggcttttcctgccctgtcccctcactcactatgcttttaagccttctctccatgaacaccactgaaatcgaccgacatttacccactgcgatgactttgcttcaacctttcgacggcgtccctttccgcgaattgcccgtcgttcacatcaaagcgtcgtccaacaacacaatcattcacgcgttcaatttcattacggtttcgcctcgccttttctccttcaaagcttcgctcccttcagaagagggccattatctatacttcgtgccgcaaggagggatttaaaaacaccaaaaagaagtcgccgttggccggccaaacgacgggcgtagcggcaggtcaaaagctgttgaggcgaggcgtttcgactgtccgcgtgatcattaagggcattgggccgggacggatcagttcggtgaggggattggcgttggctggtgtaaatgtagtttcggtgagtgtggtggcatttggccaaatcttcggaggaatgtctttttcagatttcggatgtgacgccaatccccgaattggggcctcggcctaagaaaatccgaagggtgtgacgccattgtgaattgtttttgcgctttttctaaagttctctcctcaacggatgaataaattgatgaatgcca

SEQ ID NO: 13894 - DNA, 1562 bp, Heterodera glycines
cttttctcgtgttgtcgtttcaagaccatttcaggtggcaagtaatcaagtgtgccgcacattgtctgacttaactttttccatatttcgaagtttttgtaaggaattaccgcctatttttggcgtggacagcccaaccaaagtcggcaatccgaattttaccatcggcacaaagcaaaatattctcgggctaaagagaaacaaagaatgaggcaaataatggtaacaactgactttgatgtcacgatggatgaccttttttgagtgacaataattgagcgcatcggacacttgaaagatgtactgaaacaatgaatagaaaacagacagaagaacataactgacaatgaacagcttcggtgtgattacctgggcagaagttgactcagagaaccgacgacttttttgcaaaactttgaacaattcgccatgaagagcgtactccaatatgaggtacactttcttatcgtcgtgaaaatagttgaacatccgcaaaatgttcgggtgtctgaaagaacagcaaagatttcttgcttccgcaaaaaaccaggccatgatacataataataaccattttttcaaaaagtgatcagctcagagagggttagtgacctcagctaacaaaagaaatgaactcacctgaggtgggcatgaatttctatctcacggaccaattggtgctccacattccctttgaccagctgagatttgaagagaatctgagggaaaaagtgcaataaatggcacatgcccaaagacaaattaactgcaaatccatggaactgttctcaaaggattttttcatccattttgtgttaaaatatgttttctcttaccttaagcgccaccggaatgcgatactttcggtcgcgcgccaaataaacatttccgaattttcctttgccgagcggacgtccaatgtcaaagtcagaaagggtccattgtttttcgctagtgttaatttattacaaggttagttaaagatcacctacttccattcctttccgaactccgaataatttattccttcatgcattttattgcttggctgattggctgggcgaagattttctttgttaattattggttctggctgcttcatttcttcagaaaaaaaactagaatataagaatggctaaaaacaaatcttgtaaacttctttgtcaatgtggtaattaggtaggtatttgtatttccaatcttgcagctaacccgggaaatcttttacaaagcaaaggcagggagggattcccatcaaatcaaactcaaacaaatgcaaaataattaatgcaaatttaaatttgaatattttgacgttttatttaatttcattctcttactcatacgtattttttacacttaaggcaaagacgcagatagctcactttcacttataagttgttaactttcaacttttttcaaggcgcattttttgttgtattatggcaataaacactgataatccatcaaattctgctacaaatttattgtcggataacgaaatgtggaaaatccatgcagtcacttataaatatcatggacaaaggccgaatgaacaaagt

SEQ ID NO: 13895 - DNA, 2717 bp, Heterodera glycines
  unsure (1)..(2717): unsure at all n locations
tgagcataaatataaatttgaataaattttaaaggtttttgaaaaaaaaaatcccaggaaaattccaagtcnccgccggagaaaacataaaaaaattcaggcaatgattgatgtctgcaaaaagtgaaaaaaaatttattgttgtcgaaccattcatggttaagtcgtaggaaaatcgaaaaagcaacttttggcgagttttgcaaaaaattttttatgataaaaaccccatgaaactttgnttatccgggcttttagaggtcgatgatcacgaatctgacatctaattcgagggtcatttacctccaaaaacccccattaaataaattttggtaatggttacttttactggtcccataaaaaagaataaataaggcggttttttacgattctttgtcacactcgggggttacttgggccgctgatcacgaatatggcatccatttcgaccaattcctaaaacaggacccgatttcgaacaaagaatcgaaagttaaattttagaaatttgggttaatgtctcgaaaacgacttaaatgcatgaaaacaaactgaaagtcatcattcctgtaataaaagatcatataagccttttttagacgaaaaattcgaaatttgttgaaatgcgaagttccgattttttgttcgaatccaggtccgagtttagaaactggtcgaaatggatgtcatattcatgagcgctttcggtttggttccttttttaatttttgcttccgatttatctttcccagcgaccccgataagtccataaaagatttttataaatataatttaaaaaatgaaaaattactttttgaaaaatcttattagacttgatgaaaaatcacggattagatgaagtcacatgacagatctgatgtcatattcgtgatcagcggcccaagtaacccccgagtgggacaaacaatcgtaaaaaaccgtcttatttattcctttttttatgggaccagtaaaagtaaccattaccgcatttttaccccaggaaaacaaataaaatttgtaacttattttccttcgggaccagaattctgcagtattaccaatatttaagtatttgattgaataaatttcaaatttttattctaataattatttgtttagcgttggcttgattccgattgtgcgagttcggatggaaatggctttcacatcatttgcattgcattgcaagtaagaacaatgaaagaccgcttttccaatttaatccgttgactctttctctcttttaggaattgccttttgcccaatttttacgtgtgactgacattaacaacacttggtctcttcacatcacttcttggatgaatgcacacaatttggctctcgcaagtgaactttacgtcgcttccaacgcccttttgatttatttttcgtggaatatgctaaacatggtgctgcatataattgaattctattactataaatatttatatagtactaatactgattttcccccaaaggttgacagcattgaagaccgatggatcagagacagtattttcggtaaaggcacaatgtctaccaaaatcgcttttcgcaacaaaactgtgctcgtgttcgttaccagtcacttttttgcggatacaaaattccacatggagcgcatcaaacaataccaagtcggacgccgctgcacattccccgaggaaaagtcggcgaaaaaattcgtcatttggcagggcgacctcaattcgaggtgattgaacagtttgaaattgataaaagcagatacgaaaagtactacggtattgtttattttcagtaaagttcagaatagaaggcattgccaacgcaacagaactgatccaaagattgaattccatggaagagggcgacgaaatgaaagcggaaattgcgaaactgctccaatcccatgaccaactcacaaaggcacgagcgaaacgggaggcattcggcgaatttaccgaagcagaaattggattcaagccgacttatcggacattggtaaagtgcaacaatttaaaaactaaaactccaaaagtccattcactgttttaatcccaatgcctctttttctatccgttttccttttctttcaggtccgttctggtgcctacgactcactccgtgtcccttcctggtgcgaccgaattctgtgcgaaggtgacatggacgcacttcgcatcacaaaatactcgtcctgtccttccataactttgtctgaccattttcccgtgtcggctcaatttgaattgcactttcaaaaagaaaagcggcaccagctaagcgaagttgaacaaagacttcaaacattatctcttatggaagctgaacacagacaatcttcgccttggctcatccgagttgagcacattccaacttgggaggaattcataccgctcgtgtgccgaattgcgattccaaatgacatctgggcagatttgtgttcttatcgtgattgggtcagttaaatctctccttctccaccttttcactcattccagacattttcagatcggcatttaccacaactcgttgaattcgattacgaaaccgttggaatggatgtacactttctcatgtccaaccgacgacgaacgtaggattgatactgagcggactttgattgtcgaattccaaccattgaaaagtggtttctacagagtaggatatttctcggcgcgcaaaaaatgttttatgaccctttcaaattcattttttgttcgaatgactct

SEQ ID NO: 13896 - DNA, 2213 bp, Heterodera glycines
  unsure (1)..(2213): unsure at all n locations
gacgcagaacgacttcaactgggacgagacgaccgcaaaatttgaaacatttgtcnggagaaacccgatcattgtttctccgccgtttcgactgtttccaaattcgtcaagccgcgcatcaggacgtgcaaagtttgatcgcattgatcaactcgtcctgcgaaaatgccgatctgtcgctgagcaaagaggagctcaaatgcatgatactgatcattgcattgcgggacgaattcaccgatctgaggcaaaaatgccttcagcgcttggaagacagtcgaacgagcggacggtcaacctcactgcaagagcttggagaggagtgccgaaaatatcaaatcctaaaggaaagcgcgctctccctcggctcaaatccctgcagcaccagtgccatccgagccaaaccgcagcaaatccgggacaagcagaagtccaaatcaaggccacagcaaagccagaaaggacatttccagccgaataattcaacggctattgaaaaggaagtggacctgcctgatcagccctgctattcatgcggaggcaaaaatcattggcaaaaagactgttggttcaaaaattcgaagtgcgaaaagtgcggacgaatcggccatatcgcaaaaagatgcaaaaacggcacagaaacccgacgtgttcgtgccgtggccacaaattctgggaatgacatgcacattcacaccgtttcacttcagccaacatgtaaggctattgaaggaagtagtaacaaatggtggagaattgtcaccgaaatcaatgggatggaaaacccaatgaatgtcgacaccgctgcacaaatcacggtgatcacaactgattcgtggcaaaagcttggcaagccaaagctgggcaagaccaccatcgcagtcaaaaactgcaacgaaaaggcattcgcaattaaaggaaaattcaattgccaagtttcgtacaacggacgaacagcgaaactgattgcgtacgtcagcgacgaaatccatcaggatttgctcggcatgccttggatcgaagagttggaaatcattccgaaggagcttatgtttccaaattcttcgcaaatcaccaattcggtgccaatgaagcatcagaaaatgccgccagtcaatttcaaaaattttggtaaatttcaacagaaacaccaaaagatgaaacggcaattcaacgacaaaaacggcgccaaaaccatcactttccaaaatggagaaccagttttcatttggaatttgaaaggcaataaggcaaattggttgccggcgacgattatcgagagagttggcaactctccgacttatcgagtcgacgttccgacgctccgttgcgcagtccaccgccttgtcaaccaaattcgccgccgtttcccaatggaaatggagacatcgcaaattggccaagcaaatggaaatattttggctgggaaccaaccaaatcggaccccccattaaggagattgaaaaagccaaatccccaattggccaaaatcaaaatgcgccgcgaagatcagcacgcgccaagagggcacctcagcagctgaacatggacccgtcgaagcggaagtacgatgtattccggccatgatctcgcgcagagggatttttccaaagaagggaggtgttggataagggaacaactctattgattatattttccctttcactccctctcttattgactctcgccccgccccttgaccagccccataaatatgtctccctttccctcactccgggcattctccctttcattccaccatttcattattttatttatttattccctgctgtcctccatatttatttgtttaataaattatttatttatttatttgacaacatttgttttggtcgaagaccaaacatttttattgttgtagtaaatacacaacagacacactgccacccaaaccgatgaattttatggaataggtattctaattgaccaattaggtcaggtcagcaaacatcaaatctcactgataatgtggaattgataattaattgattatggaggaataattatataaataaaataaaataataaatgagcaaaaaaatgctgaaaatggagaaataaatttcatcgccgccacattcaaaatcccaaatgcttctgactaatggacaacaaaaaaaacatgaaaataaatgttataaaatctgaaggaatgagaatgtaacatttcatactcataaggtaaaaatgtc

SEQ ID NO: 13897 - DNA, 3363 bp, Heterodera glycines
accaaaagaacgagttttcttaaatttaatgctgttcaattcatctatgattaaaaagtgtaagtttgaacccgatttgggagataggcgcaaatgtctggacacgctttatccatttgaatcactgtgaaacctatcgtaccttttcaaatgcagcaaaaagttcaaagcgactaaaacactaattctgtaaaacttaaataatgggacgtcctgaggaacgaattagcccttttaagagacgcagtccgcttggcattgttcgtgttcattttttaaattttatttcaaatgttttgtttagatttcgaaaaaggttcgcgactgtcttttttccgcttcgtcggcatttggtcgttctttctctttggtcattagcaacaaatggaacggtccgtccattcgttgttttttgtttctgtttttccctcatcttttccacttttatgcttttttccttttccagttgaacaacataagctctcgtcacttccacttgagcttctgttccatttgttcgattcggcaaccggtcctttttcactttacaaacttttgtgaacaatttccatttcattttcagttgccgacttgcagaatataagccttatcagccacagtcatctgttcaaaatgctcggctatttgacttccatcaatttcagcaaacgatttgcatctttgctgaatgcatcatttgtctccagcggaggcactgacaattccaaaaagcattgcgaccgtatcgagaaaagtgtcagcgaatatggtccttttttatttaaatttattaatttttaacttactattaattggattgtcgtcctttttcagcacgtctcatccgaatttgtcatatttttcgaacacgcgaagaatgcatttgttttaccgttaatttgttctcaaaacttaactatgtcatcaaccgtaagggatttgaatgctttggagcgatttggggaatactcataacagaagtgaatggattggggggaggatttcgactgagttgccctttggtttcgcagatatccgccaattggtctcagaaggagttcttcactttgatgcaaactctgatcaactctttcgggttggctgaacgagttgaccccgttttgcgttctgaggtggatttgattaaatttccaatgtgttcaattgtttctttctcaaaggacactctgtggggggaggagttgctcctccgccgtttgctccgtggccttttcttcgaccatcgctgtccctcgtcgtcagtgtccgtcccctgccaaactccgcgtcgtttctccccccataacgcgtcattccgtctctctgcgcttctccgtttgttggcgcctgattctctgctcactgcccaccgtttgctgctcattgtcggtgctccaattggcgtcagtgttgcgcatggacaaataaacgacacggaaaacaacgaaatcagtgcagggaaaggtaaacggaccataagtggacaagagggaagttaagaggggggattctgtatttcgtacgggggtccgaagaatttcataaggttttcgaagaaaagcgaaaaaacaaatattctttgtcaataaattgctgaataatttataattttcaaaggtaattaattattattttttaaaatgcattcaaagcaaacggaacccataattaaactttgttatttgtgttgtattacattagtgcattcaatcacttttcattttcactttgttctcagaattcgtggattaccaacgcatttacacggaaccaattggcgatttggacagtgctcatgcaattcttggtgaattgccatcgatggtctctttgctgttggaaacatctgatgccgttgaatctgaggagttgcgctggaacgacttggaagtgttcaactgtttggagatgcttacaagtgaaaaagcaaaaatattgtttttgttgcccaatactttagtcatttttttaattttaaagcattttatttatcgctagaaatggacattttacctgctaattttatcaaatttctcccttccattagcatttcccgagccttgggtgcttcgcaattttgccgctttgctcataatggcccctggcctcgcccgtgtggcggtgcaaacgcgcgcaatgcatggaaatcctggcgaagcgggcagcacatttgtcagttgcattgaggtaattgggtacaattctttaacaaaattttgattcgttcttccataaaataaggcattcgaaatgttgacataatataattagttggcggcgcttctttaggccagcattctgctcaaataccaagcgtccattctgttgcgtgacactctccactctttgctgaccaattgcgagccgtccgtctgtttggtggtggtgcgtgaggccgtctcctgcatgtaccaacacacattggagattctgcccaccaacgaacaaaactgtgtgtaccctttcccttgttttttctcttttaggcaataaccgaacgattttcagtggccggccaactctttgacatggatttgttgcgaattgcgctggaaatcagtcgtcaggtcgccgagatgtttctctcccatttgcacttcattttggtctgacctttgctcattgtttcccttttgttgtaaattgctttttcaatgtaatattatttatcctatctcttccaattctcttctcatatttatcctctttcttctaatttctctcctcctaatgcatctcactttgcttctgtgccttgtgatattttgtcattttccttgccatattaaatttttgccaaccaatcaccaccgtattttgtgccatttcttcaatcttctgttaatttattttaaattgtataaaatccgctatttaaaaaataataatctatgccttctttaattgtttattttataaataaatagacaaatacatatatgcgtgtatattaaattgtgaatctcaaaatactcggttttctgttttatatttttcgttaataaaggaaaacggtgtcttgctctttcgatttttgttcttcattcgtttgcttttttctcccctttaatgcccaaaataacaaaacgcaaggggcgaattgtgccaaaactgcgcttatcaaaagccaaaaggaaaagcccaacctggaaaagatggggagaagggattattgggaatttgacagttcacatactaagtaaatgaattatcaaaaaagtgccctttcccatcgcccaatttaccggacgcatccctccgatgagaaaccagcggaaatatgttcggacaaaagcacattgtggcgaaaccgagtgaagaattgccagaggaaaagtgcggcacaaatgccgtaggaaacag

SEQ ID NO: 13898 - DNA, 3047 bp, Heterodera glycines
  unsure (1)..(3047): unsure at all n locations
aaatatagatttatantggtctaaaaaccttcagtaaaccctaaaattttaacctagaaaagcttttttagtccctttcttcgtaacatataagcaaaaaaaaaagtaaaaccatacaatttataattctatttataatgtccggttttggccgtaacgatcattgtcgctgtccaagagcagcatataaaagtgtggctgcaataattagtgtcctccgcccgctaccttcctttggttctatgttaaatgagcttatattaaagatggccatcagcagagcctacttcatggcacgacaaatttgccagaatgaggagttttttctccggcacgaaatcaaaatagggttgaacccggatatttctctcacgggaaattccatcggggcggctgccatgttagcaaccgtatcgttagcaaaaaaacgaccggtgcgcatggacacaattgtaaccggcgctgttgaacataatggcgacattgatggcgtcggggaaataataccgaaagtggagggggccgtccagcatggattgagccggattgttgtcccgctgctgaatggccatgaagtcgccgatttggccggcattgaaatcatccccatagtggactgtcaagaagttgtggacgaaatgatgtgttgaggcatattattaaaatgatttgatttttaaatgttgagaaattatcacttaaattaaaaaaatatgtattttttacattttactcgtaggtaaattattttaccgtcacctgttcattactcattttcaaaaacacaaatttattttttgaaaattcattgttcgtggttgcgaaatgtcgggatcaacaaggttgggatcgggttgggagccgggactaggattttaattgtttccttatcgcgaatttaaattttcgcagtcgcgaatcgtggatcgcggcaaacacggaaatttcactaatttaaaatctcgttgcgtcttaaaaagcgaacattttcttgccagctgaccaaacctttaattacgctttcgatgcccctgcaaaaggcattattctcgacgtcaatcccgctcttggcaccaccagctccggcactgatcagttgacagatcaatcaaccccggagaaaagacccacccattcttccgccggttattcggctgttgttcttgcctatcattgctgatcagtagggatgggaatttttgggatctttctacatattacatatgtacatatttttatacatattttggactttttcgtacatattttcattttttttacatattttgaggatttttgagaatttatagaaattttttgtgaaaaataaaaaataaattttttgaaaatgtatccctcctaaaatcgatttttttttcaaaaaatgatatatcaaaaattaatttttgaaataatataatgtgattataagcctattttgctcatttttatggcattttgtgcctatttcactttttacgaagaatttttttccaaaaaataatcatttaaaaaatttttatttacatattttagtacatatttggggatttttgtgcatatttcataaatatttcaccattttttatacatattttatttacatatttcgcgattttaaagttgtcttgccagcgacgacgttccaacgttttgcactggcacaatgggggcgcaaccggacggaactgaaacagcgtgtcggttggcagcgactgctcgtcaggccctccttgacgaaggaagaattggcggctgagcgggagacacgtgaacaaaggcggatgaattatgaagaaagcaaaaagaacgaaatggtgacgacgcggcgtggaggcaaaatggaaaaaaacttttgaggtcacaaaactttctcaattgtttttactttaactcaagaagttttgtaaacaaaatggatgagtttaggcttttacttttagaaaataggtataaaattatcgcaataaccgaaagctggttgaacaataaaataagcgactcgcaaattttagaaaattttcctttttctttaataagaaaagatagaaaaaataaaaagggaggaggggtagcgtttgtcatttttaatgaaataccgtttgaaattataaaaactccaaaaatacaaaattctgatatactttgtatcgatgttttttcgcccattgccgaatcaaaaatccgtcttattttggtttatagacctgtaactactgaaacactcgaaaatgttatgcaacttgtagaattaatttcgtcactaacagcagttggtcccccattctcacttagtgattacaacactgtaaaattcgacttaagactaaatgtttttccttgtagaaaatttaaacactttaactttaaaaaagctagttacttggaaataaatgccatactctcttctactgattgggttacctttttttcggactgtatagaaattgaccaaatttataacaaattcgcagcatttttacattttttagtatcgaaatatgttccattaacagtatcaaattttaaacataatttcccagaccatattaaaaaaaaattatgatttatcgtcggcaactttggaaagacattaaaaaagaaaaaactagagaaaaatttatagaaacctctaaaaaacttgaatatgaaataaagaaataccttacaaatcgtgaaaataaatttttaagtggtttagaccctaaacaacggtgccatgtgatttcgtcagaagtgatttcgccagtgattgatttcgccagtgagtgatttcgccccgggaaatattttgaaaatttcggcgtctgtatttgatttcagattatgtcaaaaaattgtacacattttggggtccggtggtgccgataggcaccgccgtggaaaattttgaaaatctaagtgacattacgctataaaattacaaattttctgaagaatttttaaaaataagaacaattgcccgaaatcagagcagcgcttaggcggtgccatttgttagtaccattaaaggtgctaaattaaaaacaaaagagaaaaacaataaa

SEQ ID NO: 13899 - DNA, 1511 bp, Heterodera glycines
accctagaaaaagattaaagaaaattttatctcttttttccgtcgggacaccaattccgaaggaataccaagactataccatgaataactcttcgttacataggtaaaaaacgggttgggttgtatgtactagtaataaataatgcattccaaaaaaaggttttggaaaattaatagtattacacgagcggttgggcacgcgggtattaaagacaataaatggcacgcaccaagatttatgaagattgttgcatttgttcagcaaagttaatgttaaacagtggcgagaagtcagtcttttggggattaattattcacttttagaggagggggaaattggggaaaaaatcaaaacaaaaaataaataaaacaaaacgaaacgaaaaatttgtgaataatcaaagtgaattgagttgactgacaatttgtgaaggccatttcgtgacaaaggcaattcaaatgggcgaaaagcaaagaaaggcaaaagaaaggtgaacgaaaagtgaaagaaaagtggtggttacggctgatttatgactttttatggttgggaattgctcccggcggagtgttcttttcacgcagcacaaaaacacattttgcccgaagcaaaagcaatcagtggaccaacgaaatgccaaaaacaaagcggcaaataatacggaaaggaaaggacacgcgcattttgtggatgccgaaatatggactaaccgtcgacggatgggccgaccattattcgctgcaataatcggaaatgcaaatttcgggcgaatctcgcgggccttcctccttttgccataatctcgcgacgcccacactttaaacgatcgcatgggcgcaaacaaagcgaagggctcagagtccgctcgaagacggtacggtccctttggccgttccatttgatcgtcgttgaaaagggggagagaggaggggggggggggggaaggaatgcgccaaaagcggacgccacggcaaataatttaatcgcatcaccgaaggaaggccataaaactgtcccaatcatcaaaagaagggagcggagaggttcctaataggggggggggggggaattgttaccggagtcgtttattcttcattattcagataattgaccggatgattgaatacgatagttaaaatccgtgcttcagcatgggtatatgtgctgatacagaggtgaagaggatgatcatgtagacaaaaatcgaacaggccatggacaattaactataattatttgaaagagtaaaaaaaggatttaggattagtgtaaaagtcatatcttttccgtctcagatacagagaaagcaatggacatcattatcttctcctctgcgatcaccaactggttcatatgagaaactactgattgtgacattataaacatttgtgaaatttgtaattatatgtatattatgaactataataattgttgtttaaatgagataaattatttcaaattccggtttatttcattatttgtggaagtttgataatagatatcgagattg

SEQ ID NO: 13900 - DNA, 1193 bp, Heterodera glycines
  unsure (1)..(1193): unsure at all n locations
ccaccaagttcacatttagtctcttccaccgatacttttttctttcttccttttctcttcctctcatgtttctctctttctttccgtcctcttcttttcttcctctttcctttctctccttcacattcctcttctcttcctctcatgtttctttccgtcctcttttcttcccttttgttcctctttcctttctctttctctttcctttctcttcctctttcctttctctccttgacattcctccctttttttcgtcctcttcttttcctctttcttttctctccctcacattcctcttcccgctcctttcttcctcccactcgtgtttttccgtgtcactcctcctttgccaactttcccttccgctttctctttctccctcacttgcttctcggttgctctctcccttttccccgctccctcttcctttctgctcccctttctctcgttctgtccgctttttcctccttttccctttaactctttcgttcggtttattgctttgagcagcttttccctgaatgattcgttcagctgctgctgtttgtgagaaagtgttttcgcttctctgttccgatggcgccgtttggaaatgggccgcaattcatgcgcaaattgcgaagctttggaagtgatcatttgttatgatactaaagggaggcttctgttctgatcaccttcgacttccgttggttttcccttgggacgaaatcggtccgaaatttgccccgatgggaacaaacgcccggatcgaatcagcgaaaaaagagtgggaaaagcaaacggtccgagggactgaaaaggaccttcgtttctctgttttcctaaagttcggaatggaaatcactttcattaaaatacaaaaactcttcccaaataccattctctggtgccgaaattggaaaatgttccaatgaaacagctccaaattggagttttggctgctgtgagttgtccttccgaagactgaggccataatgaaaaggcgaaaaacggacgaaatcactgaaacgcggcacggcatcgaccgtcaaaagatcggtgtcatcttcggagacaaaacgatcgaatggcttagaaaggggggggggggatactatactggngatattttatacaaaatgaattattttgagcatgtctttaaaaaattaattatggcggattagtcgtccgacggtgtcgaaaaactc

SEQ ID NO: 13901 - DNA, 1561 bp, Heterodera glycines
  unsure (1)..(1561): unsure at all n locations
aaagtgacgacggacgacagtaacgggcgacaaatcagcggcgaaacactccgatggtacaccgagaaaaacaattgctccgaggaaacaattaaatcccttanccaagccgtttcatcacgcgttcctttgtttgtaaacggaggaggagagaaggcgatcaagtgcataagcataattaatacacaaaatgtaattgcatgatgttaattgactcgcactaaccaaggacatccgtttcggaattaacaaaaacattgggagtgaataccacaagattaacagtcggataatgttaatttaatgataaaaatgtgaaatttctgttgggtttattcaaagcttcttccttaaataagatgatttttttagaaaatgaataacaaaaagtgcgatcaaccatttaatgtaattccgtccgtctttatctttcattgtgttgccattcttttccattatttttctgccccggcagaatgtcctgatgagaccgaacgagaacgcgaacgagagcggccgttcttcactaaaacattttgttgtaccgaaaaatttcgttttttgactaatagcatatttaaaacattaattgagtagcactaaccgggcgaacgcgagtcacggcgagaaggtggagaagagcgggagcgagaacgaggcgagcgggaacgaggtgagcgagaacgagaacgcggcgaacgagaacggctgaaaaaagatgttcgttttgtccgttagttccttcatccctcgagttttttctggatttaggccttccctttgcgtgtctaaaggaatggaagctggaaagagtgcccatgggaatgcaccttcatgacaataaaccacacttttaaccgtagttaccacaattattctcatctaaatgctatgcatttacctccgagttcggcgccctcctccccctcctccttcgctttcatccacgagttttatgcgacgtccattgatgtcttttcctaaagcaatgcaattgaccaagatatttaacaaataaaaaaaaataccctgaaatttgtctattgcgcgacgcatgtcatcacgattagcaaagcaaacgaagccttcgttcggttttttgtgcgcatcggcgtaagttacttcagcgtatctgcgcatcatgtccttgagctcctgaaaaaaagaattatttacaagaaatattataacagacacccaaaaacatgacaaacggattattgaaaaatgaaagactaatgataataaaaaatgcagattggttcatttacattttttgaaatgattgaattgagttctaagatatcgtgaaacacaccagttagaaatagttggccattttttgctcatcagttcaattttgctgaatctgacaaccggtttatggcttgcgagtcttttttgcccgtggctggctcgactacattccttggccggtacaacgaaattcgagaggtgaggcctagcctcgaagaaagaagcttcgggcactgattgtgagaaactggaccccttggttaaaatggcatcttttgcagcaaagaggcaaatatcgggctgg

SEQ ID NO: 13902 - DNA, 3736 bp, Heterodera glycines
  unsure (1)..(3736): unsure at all n locations
ttaagaggaataaaatattcagaaaagcattaacgaacatttggaggaattcgagggacgacagaatggggaaaacgaacgtttggaaagaaaaatcgacaatttggggcgaaaatttggacgcgccaatttaaaaggggaaaataaggaggaaaaaacggaagaatttctatcggaggatgatgagcaatgaattgaattggaggggaataaaagatgaatttttgtaataatttactgatttgatttatctgatcttttttctcactcttttattttttgtctgaatctttttgaaaataaatggagcaaagcttttaattaattaattcaaaatagttgaaaaattaaaaaaacacggtttttgtgagtaaacaattgacagaaaagagggattagaaaaaatcggtcggttttgaagagattgagacggcaccgtccacagttatcgttgctgaaattggcaaatgttaaaaaaatcgtaaaaaagtaattaatatttttagtgcgaatttgaaatttaaaaatggaataaataaaacgattaaattattcaaatgccaaaacacccccggtgatgtaagaggcgtcgtcgctggccaaaaatgccacgactttgccaatttcctccgccgtccctccgcgacccatcggcacgtgatttttgatccaattcaactcgaacttcaacaattgcatgatcaanattgagtggagtgttcactcactcactttgttcgctctgttgtcgtcttcgtccaaagtttcgccgatgataaaaccggggcttaatcagaccaattaattaactaattaattaatgactaatcgattggccaatttgttaggtattttacttaatgttgttcactcgaatgtcgcgctttgcaaatttaacagcgattgagcggcaataattgtctgaattcattcattgtcagtggacaaaatcacaccattttacgcttttcgcaacctaaagcattttttatggtgctgtaataagtgtagtcggacagctgaaaaaaggaaaattaaaaaataatataaaataaattattttaaattcaaaaacattacggaacgctgtgtgccgaaactgctgatgttcactacggcaccctttgtttcttcgagataaggcgcgcacaaacgggtcaatttggcgatactgtggggagagagaaagcgaaaataatgaaaacgataaattaaaaaaataaaatatttaaattataatgagaaaaaaaacaattttattttatttttgcaaaaaataaaaacctcttcaaatttatgttaaacaaaaagtcaaaatcgttgtccaaagctccaaaaattgagcaagtgcggcgactggtcattgccgttgctgaggaagaagtccttcgaaagccgcggaagccgtggtaccgaaaaagagagggcaaattcacagcaaaagcatcgcaaaggcccaattaaatcaaatctccgagtgatccgatcaaagtgatcagctgctgctctctgatcgttttaagcaattaatttgctttgattggacggcatcaatggagaaattgcccggggtaggggatgggattaagaattccgattttagaaggcattaaattccgacgacttccatggatttggcatcggcactttcccaatccgtgccaacattgggtccttcccccaagggcacctcccgcgtcctccgtcctcctcctcggctccgttttgcccatttgtgtagtcgtagccgtaattattgctgctggtgctgttattgctgttgctgttctgccgcgatcgttggtgctgaagaatgctgccggcgttgttcaccttggcatttacttttatttttaaaattccgccatttttggcaattttctcaccaaaacatcgatttggccaaatttattgtacgtccgttcgaccaaatttttcagggtcttaattgtgcaagtcattagagtgtgccaattaatggagttgacttggtcgttgtcaatggcaccctccaccaccaaaatgtcgtcctgcgaaacgtccgccattctgaccatttgcaccaccgtccgctgaatgttttgccaattaaaactcggggtttgcttcttctacatgcaattcggcctcttcagtgccctgaattgtcactttggctccctctttgccgaataaaattgcggtggcccggtcaatgccacaattggactctgtgccgtcgtggccaaaatgttttacggaatccgttttgattatgaccaacccgtgataatggccactttgccctcaaagcgtcgtcttcggtcagtggaggtggcactcgtattcgtgtttgcttcttccgtgccaaaatttgcttcttccatcgaactctcgtcaatactcattgaattcattattattaatttaaaaggtaattaatttattttaaattattttttgattggaataaattatttttgttagtttaaaatatttaaaatttaaaaacaaggaaattccaaatttagttattttgcagctaaatgtcgctcaagatttagagttgaagttggtcgccgagttgtgaaattcgctctgactcgcctccgatcaatttcagactaaaattttggctctaaaatgtttgcgcgtgtgaaatttgactccgtttttgagacattttctgcattttcttcccccgtttcatccgtccgtcttttgtgatttctctctctcccccctcgcgtcaaatccgctcctaaaacgcctgccgattccaaacggagagaaattgggaaaaacaaataaattgcgaaacaaaacaaatcggatgattggcaattgtcttcgttgtgaaagcacgcaaaaataccacagagatactgatactgacattagtttttttatttaaattaatagtagcattttgttcaaagcaattaaaaagttgaaaagtgccattttcggagtccacaaacagcacgtccggagattcaggcgttcagttggtgaaatgtgaccactttggaaaatttatgtctcttacaaaacacatagaaacaaattaaatgttggattagacaatattggaaaatgagctgatgcatttggtttaaacatctcccaaaataaaacatttattttatttcttggcaaaaataactcaaaacaacaatatattattcaacaatgttattaacaggtagccagatctgaggctttagcctcattttgtggttttttgataggtcaatgaggctaaattttaaaatgaggcttttgaggctttttgtggttttttgagaaattttgaggatttttgaggcttctggggaaaatcgtcagatcttttaaattttgtttaaatttgatgttattaccattttttccgaaaatccacaaattaaacttgctcaaaatcgaaaaatatggccatttttatggacaaatccgttaacaaatcgcattaaaaattacaaaaattttcccggaggtgcctatcggcaccgccccccccccccttgttccccaaaagtatttggaaaaagcgccgcaaaaaaaatctgcttcgatttttcatgcttagaatttaataaaatgcttatttctaataaaaaattgcccaaattgatcatggacaatcacaaatgtaacatttgaatattttaaacatgttttgaataaattttgtaaaaatgaggctttttgaccctaaacgaggtttttttgcgtgcaaatgacgcttctgaaaatt

SEQ ID NO: 13903 - DNA, 2694 bp, Heterodera glycines
  unsure (1)..(2694): unsure at all n locations
aaaaaaagttagtaaaacacaaaaaaaaaagntgtatttttacatgccctcctagcaaaattccgacccccctccccctntttatgtagttgcgcattttagaccaatcccttttttaattatttgtttcatcagtcgtgcttatgttcctttcccttgctttgcttcatatcgcaatctcggcgactcgcactcatccattttcgacgctggcgcgtgagttttgccgttaatattatacgattaaatttattcccctctcccatttggttcagttgcatttcgttgaacccgcactttgtcaagctggtcagttggtacaacaacgagttcggctactcctgccgtctggtcgatctgatcactcactgtgcttccaaggcataggaaagatgcgcaaaaaaggaaggatggagaagagaaatatactaattttgactttttgttttctaatcttacattttgggttttgttttaacttgtcgaaacgtggaattgctaatgtccatacataacaggtttcagcctttccgttactttgataaacgatgattgagaaatttatttatttttttttaatcaaaaagagtacatgaattaaaaattaattgtgttaagtgaactgttgagattgtgaaaatgatgggaatataaaagaaatggcatttttcccgtatttattcgactttccaataattggagtccaagtcatgggtgttgtggttgttgttgggccgccaccagcagggcttgctatggaaaaaattgatttccttaaccaaattcaaaactgcttttaaaaacactctaattggtgtaaaaaggatagaatgagaaaaataaaataaggggagcgcatgccctttttagattgaaaaagtgccggatttgagtttggtgactaagaccaatatttaccagatgttgctgcagcccctccaaaagattttgtgctgtttcgattcgccccacggattccgccgcatttccctgctctaacaactcgacagcctgccgaatgtgaccgatggaatcaatgaattgggcaaaatgattgaacatgtgtaaatcgcccaaagaggataaaacatttcgtaaaagagccagagctctttgttcgttgttgttgttgttaagtaaaataacaatgcatggaagagcagagatggcaacggtaaatgctcgaccagacttaaatttgaatttgagacgctgcaataaaagtatttagagagctctgtcgagtttaaaaccattattttatgtcaaaattttcattaaataaaccgtacaaatattccaaatcggcgctacttattgaaagcgtcgcgtccgtttatattaatatacaattttttcgcattcaaattatttttttggactcggtccaataaaattggtataccaaaaaaccttttaacataagattctattacttaaaccattttaaaaaattttgaagacttgaccgggcccaaaagcgtctaatttgactcagacccgacccgaccaaccattcttgcaagttgcaaagcggcaaatggattcgcaaccttaatttggttaaaaaatattatgtatacttatacaaaaagctaaccatttttaaaatgtagaattttttgtttaacggcatgttaatatcttaggataagataggcactccaaaggtactaaaaggacaacgaaactttggcattgtacatgcataaacaaaacaaatcaggcattcgctccaaattaaatataatttaaatctcagcgccggtttagctcagttgggccgagacggttgggccccagcatgcttttccactataacttttttctattttaaccaaatccaacattgttggtatgtatcaatcgaaagcttaatgcttgactcaaatcccgatctacagtccggtctctaaaaactactctttcttttctaaaaaaggaaacttttcaaatacccctgaactgattgttttctcttatgcctcctctaaaaagctatgatcccgacattaaaagaatttttttttcaaaaattttaagaatgtggggcgtgaaaccgtccgtttccattcctccgctaatggtgatcctcaaacattaccatacccagttccattttaattaaattttgaaaaacgccaaaacatttcaaaatttttgaaataaaaaatagagaccggcgcggaacgggccaactccgtctggccaactccgtctgagccaactttgagtcaatataactcttgaatttattgaccgaatcaaacaatcttgatatcattcgaaagctcttcacaggctctattagcctactaaaaattacagaaaatttcgaactataaaaaaagatagaaataaaaaactttgaaaattctgccttttttgcggctttaaactgacaacctttttgagagctgattaatcacgcttataaatatcttctaaacatctagggctttcgaatgatattatgattgtgaagtttgatcaacaaagaaaaaagttatagctttttgaacattgctgagacggagttacggagttgacccttaccgagaccggcggcatcgggactcccgcggccgcgggactccaaaatttcctaacaaaaagttaaaaacctgctagataaaataataaataccctttttttgtttagcctttaagataacataatgcatgtacaatacc

SEQ ID NO: 13904 - DNA, 2613 bp, Heterodera glycines
agtaaaacgaaatggcaaacctcatcctcaaaaacattcgagcagacaaagctcagactgttcatctttttctgctgacgaacgaccgaagaaaagcagagcctggaaaagcaaaagaaagaaaaaacaaataaataaataatggtaactaaatttgcatttgctttcgttcaattgaaactcgatccgccgattttcgcggcatttccccccccccctcattcgccccctccccttttcccccttcgcccttcggctgtttactttgtccacccattgcgctgtttcttcctcctccatccaataatttccttgtttttgttgctgatgttcgccttcaaaacggcccaaatattggaggatccattgagtgaccagcaaatgcggggacgggggcgaaagcggggacagaacgggggaagtgccgctgacattggaaattggcgaaagcggcgagggaatgtcggcgttggtcggcgcagagttcaaagagcgccgagggcgaaatttgggcgaattccgaccatcccaaattggccctgagggcattgagtcgccgcacttttggagaaaaacggacggagggggcgaaaaaaggcggcatttcttggaaaggggaaaaaactcgacatggcaaaggaaatggcattggaaaagtgttcagtcagtgccttgtaacgatccgagcgacggaaaggcaaaggcaaacgatggaagggcaaccgccgccggggagagcccgcgggggacgacgagggacggcccggggacgaagacggacaccgctgaaagggcagagggacgacttggccatttggcaaattcgtaccctgacagtgagccacgcttcacaacgccgtcgcatcactttgcgcattttggccaccacctccaaatggcccaattcggcgacactttcccggtcaatggccaaaagttggtcgttcgactgaattcgtaagttttttcccttcaattttggtcatccttatcaaaatggcgatttgttcaccttgagtccgtttctgtgtgcaattcctccgtcgatcactttgagtttggccggcccggccccttccaaagtgaggccaaagccaaaagaggacgaacaattggaggaggagcagcggaggaagacggtgatcagttttgggggacgaggtaaagggagggggccaaatcgggcggaggaggagggggaagaagaagaggaggaaagcatcggcaaatttaaaaaataaataaaaaagaggaggagtaggaggaagaaaagaggaagaggaggagtaggaggaagaaaagaggaagaggaggagtaggaggaagaaaagaggaagaggaggagtaggaggaagaaaagaggaagaggaggagtaggaggaagaaaagaggaagaggaggagtaggaggaagaaaagaggaagaggaggagtaggaggaagaaaagaggaagaggaggagtaggaggaagaaaagaggaagaggaggagtaggaggaagaaaagaggaggagggggatgaagggaaaggaggagaaaagaatcgaaaatttaaaaaatgagggaaaatggaaagaaaaaaaagtttttttctgctgaatgcccaacagatggaaaagggtgggaaatgacctctccacagaaggaacagaaaagggacggcactgatttattattattttttgcatttgtaagggcaaacaaacgaaaaaagagaaataaataaaaaaggcaaagatcggccgatgggtgggcaaacattgcgcaaattaaacaccaaacggacaaaaacagaacagcagcagacaaacagcgaaaagtaattatttaatcactaattatggtaattaggtttttggttttgtttttccccaaagtcggcccatttgtggcgaattttgagaaaataaataattttataaaataataatgcagtaaagtaaactctcttctacctgagagtttttggtgccattgcacccggacgattcaaggaatttttgtttctgagaaagagaaattcaaaatttaggagagaatgaaattaaattaaattttaatttcattaattggaaatgttcaaaattggacatttaatgaatgggcagatgggtaacgggaaaacatgggagaaatttggaaaaaaatgaaaattgcaaaaaatgcgagtgaaataaatgattttgaaaataaaattaattttaaaatttaaatttacatttcatcgcaccattcgtcttcacaatggaaatgcatttggcttctcttttcctctctttttatactctttcttccatcttcgttttgtgccgtgttttatcatttgtcattctgtcatttttacaataatctgtgacatttccaagtgaaaaaaggcaaatggacaaacgaatgagtgatggacaacagaaaaagggtgactaagggcagagattaacaatcggacgacacaagccaatctgagaaagttaaacaaacatttttgcgggttttaggcaattagtggcattttcctgtgccattggcacgccaacagcgcgaaaatgcgaaacatttgtcgctatttggcgttaaaagtattaaaaaatctaattctgcttcttctgtgtataat

SEQ ID NO: 13905 - DNA, 1166 bp, Heterodera glycines
  unsure (1)..(1166): unsure at all n locations
agaacagcagcagacaancagcgaaaagtaattatttaatcactattatgggtaattaggtttttggttttgtttttccccaaagtcggcccatttgtggcgaattttgagaaaataaataattttataaaataataatgcagtaaagtaaactctcttctacctgagagtttttggtgccattgcacccggacgattcaacgaatttttgtttctgagaaagagccaaagagaacttcaaaatttaggagagaatgaaattaaattaaattttaatttcattaattggaaatgttcaaaattggacatttaatgaatgagcagatgggtaacgggataaacatgggagaaatttggaaaaaaatgaaaattgcaaaaactgcgagtgaaataaatgattttgaaaataaaattaattttaaaatttaaatttacatttcatcgcaccattcgtcttcacaatggaaatgcatttggcttctcttttcctctctttttatactctttcttccatcttcgttttgtgccgtgttttatcatttgtcatttctgtcatttttacaataatctgtgacatttccaagtgaaaaaaggcaaatggacaaacgaatgagtgatggacaacagaaaaagggtgactaagggcagagattaacaatcggacgacacaagccaatctgagaaagttaaacaaacatttttgcgggttttaggcaattagtggcattttcctgtgccattggcacgccaacagcgcgaaaatgcgaaacatttgtcgctatttggcgtttggaatattaaaaaatctaattctgcttcttctgtgtataataattttataaagcaatccgaaattgtttgcttgtgcttctcacacacttccattaaaattaattaccgttaattattcaaataataatgcctaattatgctcccgactgtgcagctgattcatcgcattttaagatcccatttattgtcaatcacaaaaaatttaaaaacaaatagattcatagaatattctataataaattcaacaaatagttggaatttgcgccaattgttgtcaaagcataaggaccaaaaatgtaaaaaaataaaattttcattaataattaatcattaattaatcgcagtgctccaatttttttcgtttggtatttttc

SEQ ID NO: 13906 - DNA, 2270 bp, Heterodera glycines
tgttagtgtttttcaaaatttggcaaaaaaaaatcttcgatttgatcatttccgaattgaaatctctttttttttggaggtctttatgttactttatacatatagttttataataataattgtttgtttcagtccgagttggacttgaagattccgattgtgtgccgtctgcaggggacgcgcgtggaagacgcaaaagcgctgattgcaaactcgaaaatgcggatattggcatgcgactcgctgcaggaggcggccaaaatggccgtaaaggtaggcatcagctcgttttcctcccagacagtccccccccccagaaaattaaataaaatttaccaattttattaagaaaaaatcttagtttttttacaagaaaattccagaaaaaaaataaacttcatgatgaatcaatcactaagatttttcgaaattttttcaaaaaatcgctgaaaaaattttcaagaatttttttcttcgaatttccttacaaaaaattttctaagatttttttctttggacaaattcttagttgataaatttttcaacaatattttccccacattcactgtgcttcttcccctcccccttttcagctcagttcgattgtgacgctggccaaagaagcggcggtcgacgtgaaatttgaactgtcaatttgattaggctttatttgaccgactgacgacgtgtagaaagaaatggacacagagaaagaaagagatgtagaaattcgtaaatttgtaagataaaaaaagcaattattcgatcattagcattaatgatcgccggtatttcctagtgcaaatgaaatgtaacaaccaatcaatcaatccatacggcatacatatgtataaaacgatggacacgctcaattattattattattttattagcaattaaaaataaaacacaaaaaatgcacattagtgctgttcatattttcgggattaatacgttatgtgtgctcgaaaataattctgcttttcccgtcataaaaaaatatatgaaaaaacctctccatttttcgggaaataggtttaaaaataacgtaaatacccttaattaccttttaaacacaaacagaaaaaatggatcgtaacactttattatacatagataaaaaacaattattgttcattattaaaagtatcaaacatttaagaacattgaattgtacaaaaacaatgttgaccttcttttatggttgttttcttcatagttttgggtcaattcccctgtaaaaataaaacttttcgtaaaaattcaaagtttttcttactcaataaatatataataataattttttgtaaaaattgaatttttgctaaattaaacgattattatgtgcttatttacgcttttgcccaccatttttgcaaatctttgcgctcggcgatttccgattttagccaaacattttgaaaaagtccgttttgaaagtcacttttaaccctttcgtcaaatttctttttcaaattggccttcattttgcctttaaatgagttattcggcctttttggctccaattcaatgcccacaagccatagcctcgtacaaagtgcgtttccgctgccattacttaaaaagttaaagtttaaattagaagaatttcataaagtttttttttaatataaattggcaaaatctctattgaaaattaatcaaaatttcaactggattcgctcattggcaccgtcgactggcttttctccctaataattcttcagaatttaatccaaaagcgccctcgaaaattagccattttgactcaaaccctattaagaagtcttaattttaagacccgatgtaaaaaatgtcgatggtgggacgtataataaaacttttttgggacaaaactcaaagcgctttttccatgggaatcgcatcccctgggggtctgtctgtccgttgaaaattcataaaaatgcaataaaaagtttatttaattgccatattaatttctctctttaataaggattgaaaatgtttatttatttattttatattgcgtgaaaatgatttttacccctttttggcggaacattcctcgctggacggagtgatcgcttttgggaacacatggcaaaagcgcacccaaagtgccaacggtttctccacaaattcgagcagttcatagcgcaagcgattgccaacaaaatcgtagaatttgtccacgttatgagttgggcctttgcattcgaccacaatgaaatggtcgtactattgtaaatgtacgttaatttttatttttccattttttaaatttactt

SEQ ID NO: 13907 - DNA, 2376 bp, Heterodera glycines
cattctccattattattctctgctcctcacaatgtttctttccgttggccaaccgaacactttggaggcaaccgctgctgcagcagctgaacgtgttgccgaggacggaaatgccaacggtggcggcactttgcctggcccaatgacttggaacttcgcgtacagtccagatctcttacggaatcgttcgttagagaacgagaggaatcgctttgttgtacatatcttgttgcacattgtgacgttttacttgaaaattctgacattgttaaaaagcaccgaattttccctctttttttgttgttgttgttgttagcctagcccagctaattcctatttttaaaaaatcagcgccaaaatggtaagttcaaaaagcaaacaaatatcatcaatcaacaaattgataaaacgcaacaatgatcggtcatttgtcaaatgatcacttcttcttcttccgctaatcactgggcccggaaaaagagaacactttttcgtcgctttggtctgttggcggagacaacggcctaaattaagcaagcgaaaatagagcctggaatttttgaaaaaacccgggccatgcaggacatggaatccgagatggaccagcagaacaggactggaaaactgaggaacgaaatcctgttttaataggaacccctggccctgccaagaatctgtgaaagtactgtacagaggtatcaaaatcgcaaaatttggtattattgatttttaaatttggaatagaattttacaaaatgatgacttgaccacaaataccgctttttaaattttcaattggcacaccatggttttaggcttctggttccaactgtttcatgctgttttttgctttaatgattttgactattaaatagtaaagaaaaaaattttgctttcgcattttatttttcgattagcggcctaaatatcaaaatttgaaatggattagaaaatttttttgtaagagtagagctcggaatttaaaaaaccgaggatcagggttttcaatacgataagacagggaatgaagtcccgttttaacaggaacccccggccctgccaaaaatctgggaaagtacggtaaagaggatactgtcctccctgtccgttacaaaaaaataaggccttctttccgctcacccaatgcaattttcataaagacggatgtagactcggttcaaatgctccaaattttcgtctttcttctgctgctgtttctgattcgtcttcccaatattttggcatcgtttcaacatccaattattttctgatgattctttgctcagtgtcagcttctctttggtccgttcgttcatcaatttaaattgttcaattggcgttgtttccttataaacagtaatttgaatattgtaactgacagaagtggtggcacggcgaaatgcctaaacaatgaaaaaataaacggatgtcattatttttggctttccaaatcaattgtcagggatttgatccagtcgaaacccatttttccctttaagcaaacgaattccccactcatttgtcagataaatttcactttttttttgtttgtctccctccaagacatatatttcgcaaaaattttctgaaaatgtacaaaataggcaatttttgatggaaaaacatgcaaattttgtctttttttggacaaaatctgttaacaaatcgcattaaaattacaaaaattttcccggcggcgtctatcggcaccgccggattcaccaaaagttttttggaatatgaaaaaagaaaaggtcgtctcccgggtggggtaaagcccccaggccgtaatcctgggaccgtccatgccgtccacctccttgaaattgttgacccatgcaagctttgatccatccaaataatcactgcaacgcattcgcttcggctgaccatctttgctcggcgtgtgcaaccatttcgacagaatttggccagcagaagttgcatttggcccaccaaaatcatcggcaaaaacacccgcggggcacagacaaatcgattcgatgaaactcagccgagtgaaattggtgagaattgttggcgaaatgagactgcgcaaattgaccaaatcatgaacatcgttgaaaatgaaatggcgaatggtcggcgcaaaaatgggcaaaacttcacgggaaaaagcatccaaactttgctgggcatttgtaacacacaattccaatttggtgccaattctgtcaaaaatttgcttgttggcattgagaaaagtgatgacggaatgatcgaagtagctgaacaaatacaaaaaatgcattaataataaatatagaaaatttacggaccaggccgttttcgcgtcgtgtagccctaagtttgctctattaacgtgcaagatttcgaaaaatttcgttaaggttc

SEQ ID NO: 13908 - DNA, 1425 bp, Heterodera glycines
gaaaattttttggttgcaggaggtactgtttcatttccggaaaaatggacagaattttgttctgggcttccgacgaattggagtccttttcggaaatcggttcttcaacaatttcggcacaacgcagtcccaacagatcacaaaattcagactccttgccttgcccgtccatgaaccgttgttgtaaactcacagcaaccttgtcaaaatcctcacacaaacgctgtgaagtttcataaaaagagcacctccgcggcttcgtttgaattcgtcgtcggctgaatcacttatcaaaagataaatggtcatggctcggctgtacaggatgtatgcatcctcttccttcccttcctgcatttgtgtttttcctttccgttcgacttccatcaaaaagttgagccgtgaaaaattgtcgagccgttgaagggaataaagcaatcgtttgtcaatatcggaggcataatttttgagcacttcatacgatttgtacaacaatggatgccaatttgttgatgaagatgaagtcgacataattgtttttcaacacgaaataaaacaaaaatccaatttaaagcaacacgagctttataaaaattgattggcgcagcacaacacgagtgctttagacgaatttgtaagtggacgaaataaggcgaatgaagaaaaacccaacacgagggtattaaaaatttgacgactggcgaatgaagaaacccaacacgagggtattgaaaatttgacgagttagtcgatgaacccaacacgagggttttaaaaaaattgatgagcagtcgataaacccaacacgagggttttttccaaattaggtagtcgctttttttaatgagaaattcactgaagaaaaataaagccgtccgccaccgagctaacctttgttaccaggagcgccatgttggaaaagaaggagaatttgtcggggtttcttttttttacacttccaaattttgtaacgaggggataaatgtcagtgaaattaggcaaaacctgcttttaaaaaccaaacaccaaaacaaaataaatttatccaacaaatgattaaaaagacaattcaaattaaaacaaattcagtcaacacaaaataaattaaacacaaatcaatcaacgaccaataaaacggctaaaattaacacaaacgaccactaaaatccaccaactactctagaagaaaaacaaaatatttgaggtcaattcaaataaacactatgccaaacaaattcaaacaatcaaataaagggtcaaaaagtcgggactgggtcgttttggcgccgacgttttggcgccagcctcagtttttttattataactttttttcttgttgaccaaatctaacaatcttggtatcattcgaaagcccttcagaagctctattagccttacaaaaaacaaacaaaaattttagcttct

SEQ ID NO: 13909 - DNA, 2690 bp, Heterodera glycines
tgaaactaattaatttttttaatataaatggctgtttcttcttttatggccatttttgttcagttttatcatatactttgtcactcattgggtatgtagtaatttaaagttattttttgtttatgttccatgctgataaaataatttctgttattaagttgattaagtcacatttactctcccagataaatgctttttctgtgttttcaattttaccattaaattgttacaatttgtagatagatttcttttacattttgatcgggaacattttatgtaaatatatgctggcactttgtatatatttgcttcctttttcgtcaaattttattgatcaacaatttaatatttttgtatataaatatttaaaataaacaattaattaaattaggcttgcatccttatgtttatttttcttaggttttgttataaaaaacctgtaatatttaaataaatatttacgaaaaaataccgaagtattaagctaatatttaagaaaaatgcaaaaatgtatagtgtaaaaaataattaactgtgcataacacaagcaaaaaaattattcattggctacagttgctaatttttgagattttgaatgcatttttataagtaaattacaaaaaaatgcgttttttaaatttcttcaatgcatacaagcaaatatttaatttaatataattcgcagccataattatgtggttttgtagcatttatagaaaattaaattacataattattcaaaatcaatgaagaaaattgatgttaaatgcaaaagaagtggaattaggggaggagggaggggagcagttgatggataaatgccaataatgtgctgcggaaatgccaatgatgcgaagaagggcaaggcaaatgatgcgatgagacggcgtcgttttgtgttgattggttaagaatgcagcgatagtgagagagagacacagagtgaccaatttgcgacgagaaaaagtgagagagataaagggaaaaagagagagtgagagagacacaaacagagagaccaacgagcgaagagaaagagaaaggaagttgggaaaaaacaatttttcgaagggtccccgccaatcagcatttttgtccaaaaattctttcggatccataatttagaagcctagaggaatcgattgatatcatttgtcgcaattccatgcgttttgagtagtggacggttcagtaattatcagaaatgaactgagaaattaataaatgagtttgttttataattttgtttttcttgtttgacactacttacaaatgtgagatttaaaaaaaattcattttaatttttagtcattttttaataaaaccaaatgaaacagaaatccacttttaatttttttgaatttaatgttatttacatgtttttccattgaaaaataaataaattttatcatttttcactacagaatagtcaacttaacctttacaaattcgtgtacttaaatttacgttgttaattgggttattttggttaatttattggcttttgtggttctttctttacgacttgcctttgccttttgattttatttttattcttttattttattcaaattatacaacctttgaggtgtatagtttttataagaaaaatgattcttatctttcatttttcaattttttaataatataatcttttagcaattgcatttttaatttaatttgtttattttttaagtacattttttattatttaataaatgctcttaatttcaagccagaaggatttatttaaataattttcttcaatttaccgttatgccttttggtcagaaaaaatatcttttatgaaaataaatcggttcacgaaaatggcggcgattcggtcgctggtacaagggtggaggaatggtattggggagggggaaattatgggaaatttaaattaattatgaaagaatttattataaaattgaattgaaagagcatttttatttatttgttgttcttttattaattcacattagtgtatttttaaaccaattagatttaccttttttgtcgcatctaactttaaacatgaacaaaatttatttatttttactatgctttcctttttcttttaaattttaattttcatgttttttttattaaaacaaaacaaattaatgattcttttaatttgttttttttatttagttaataaattgctcctttgtaaagagtttcatttagtttaaattttgcagtgaattcttctatatattatatttgtttttctcaatatgtataatggttttgaagatgaagtaaattttgttattttttccaaacaataatttataatattttagtaatgatttgatttccgaagttgcacggaggatagcaaattaacatgtaaacatacacgaaggttatgagggaggctcttgtcccgggaacaaaaagaataaagaggtaaaaaacgaaaagcaattttttaattcatattgtaattataaattatttttcacctttgattctgtctatttactttttgtccatccgaaattgctatcatttttattcatttgtggtgatcgagtagatttaaaaattattttttaactttgcgtgtgtataatattatttatgaaagaaagtggaattttccacataaaaaaaatataatttaatgcgtaaatagttggtaaaaatttcaagtgtaggggtataaactcgtaaaattt

SEQ ID NO: 13910 - DNA, 2456 bp, Heterodera glycines
  unsure (1)..(2456): unsure at all n locations
gggcaatatttaatttggcagggaaatccggaatcaagaacaaagagcattaattaaactagtgaaagaccaatagaaaaataataaattagaatgggatacttaggtccaaagaaacaatttagcaatgggaattttacagaaaaaatgatatcagctttatcttaaaaagcttaatattataaaaaataattttgcctatttgtttaaaccatttttatcatgaaaaattgaaatttgactgataaaaaaacacaaccaatttcgttccatatcatcgtcttcgtttacataaatgttttttatatcattgtcgcttgccactttttgatttgaacattgattcaagcgtgtctttgtccgcgtcttcagtgaaccatgaagacgggagaagtgaacgtattgagctcgaggcactaaaggtatttgaagaagtgttttgcggcacattggaggagtttgatgggttgaatcgggagttgaatgtggatgaactggcaaaagcatttgaagaattgctctgtggcacgttgaaggaatttgatgggtttaatcgggagttgaatgttgatgaactggcaaaagcatttgaagaagtactctgtggcaatgggaaggtgcctgatgagttaaacccggcggaagttctcgaaggatttgacctcaaaaaggtgtttctggattggaatggtctacttgatgaaccagaagccatcgacggttgttggtccaaaaatgctaacctcattggcatagagcctacgttttgtttcaatgtattactgctagagttgagcggtaatcggtaattgcaaaaaaaccggtaccggtactgaccggtactgcaaaaaccggtaccggtaccggtaccaactttttcaaccggtaccggtaccggtaaaaaccggtaattttccaaagttaaattttttggataaaatttttcaaaattttttttattacttttaacaaaaatcatcatcatttatttccaaataatcaatttctaattcttttccttctgcatcgggctcagtagatggtgccaaaaacaactggtccatatttgctttgatgagtaaaattttttgtgccatttctccgctcaggcttaaattccttggttttacagaaatcagaaatcgaaaataccgatttcttaatgagttgccataaatgagccccgctttcgagaacagcctttccgatgacacagatgtggcgggaattgaatgaataatccgggccagtaaaaacaaatcagggaattgagccccaacttctttccaccacacgaaaatatcagtctcaatagtggttcttccatgtgccttgtaagaagctaattgaagttgaatttgtgattgatatgacgaataccggccagtaccggtaccggtaccgctcaaccctaattactgctcataatgttaccactttttgcggatttatatacactatattgttgttctaccgagagtcgaaggtattcattatcgtccattaactttttcaacatttcaacatcgattttttctcccttctgtttatctttcccatctttcgcgcagtggcaaaggtggcaaatgatgtcaaaaagatgagaagcgcaaaaaggagggcactgatggtacatttcatcttccaaatcgaagatgttgtccaagtgttagtaaaaatcttaaactgaatggattattgctaacaaataaataaaataaaattcgagattatatgaaaaatatttttttttacttatattttccaatatatataggttttcccgggtctaactacattttttgttgaaaaagttattaacaatcgagctcaaagaaataaataaatgatgtcgtcctgaacttttaaaaaaatacaaagcattctttttaggaagacttaatgagtgaaaatttttttataaaatatttattctccattctcaagtctaaaaatttcctgtttcatgggtcaattctcgctctcggactctaagtttactatttttggtcatcttgaatgtcggctattatatgtattaaagcacacgaaattgaaaaagctgattttcctattcatttggtaagttcgaaaaaatgttacgttagattttaaagttataaaaacttcttaaaaaatgtacaatgtgtgaaattttttcaaattttcagacaaatttctattaaagtattttcatgcaagttttcatgtcattctgtcaactacggaatgaacaggaaaaacggctttttaatttggttaattttaatttcattggcattttctgcgccagttttgacaaataaacaaaataagtgccgacgtactcgcattacccaaacattcgagatcggtcgagattctattgattttcaaaaatatccgctttttttatcgggtttttgttttttttctagactatattttaagacaantaaatttaaaagaaataattt

SEQ ID NO: 13911 - DNA, 2994 bp, Heterodera glycines
  unsure (1)..(2994): unsure at all n locations
ttttaccnttttggttgaaatcagcagttcctgacttgagttataaagtgttaaaaatttgaaagactcataacttttttcatttgtatcgaattacttagcattcgcttagaaaaagattctacttttcaaaagctttttttagataccagataccaaacttgttcagtttagttgggaatgaagcgagttatggctgattaaatttaaaaaatacaaaaaaaagcatttaccagtgtaagttttgaattagcgcgcaaaaattacgccaattacgttatttggcgaaggccaagaattaaaaaaggtaataaggctgaggttcggttccgctcaacatcattaacattattatttattttttatacgaaaaacgaattatgaaaattatttttgaagaatatacaatcttggtacatatcattcgaaagcccatgaagcttttctaagcaaaagagcaattcgttgaattaaaaaaatatattggcgttcgaaaaatatacctaactgttgaactagcgcataaacaaaaataattgtctaatcgatcagaaaattttctctatcgatatgcgtatttaacattattctttctttctttttcatatcctatttcatgttaaaatatatggtaactaattgagccaaaatccagccctgttcattataaatatttttttgactcaattaaatgggtgccaatgagagtgtgccaattcctggcggaggttcagaaggttaccatgttctacgggtaattgtttttttctttctttattttttaattgttatttgtttaggtccaggaaaattcaccaggacaaatggctggtttagaacctttttttgactttattgtggccatcgggaacacaagactggtaaaataactccattaataaaaaaaatttatgagtaaaaaatcattaaaattatttttaggataaggacaacgattctttgaaggaaattttgaagcaaaatatcaacaaaccattggaattaacggtttataataggtgagtaaattcggacaataattcgagcaggtgctcatattttaatttttgcatttttggttaaaatgttttaattagctttactggataacgatgaatttcagttagtttcaatgtatttaagcatgttttttaactaataccacccaactcattcagtaagacacaaacggttcgcgagactcaaattgtgccttcgcagaattggggcggccaaggagtgttgggcgtttccatccgtttttgctcttttgagggggccaaccaaaatgtttggcatattatttcggtttctccgaattctcccgctgagttggccgggcttcacgccaacagtgattatgtgctcggtgctgagtcagtgctgcaacaagcggacgatctcatcgcttttgtgcaggccaacattggaaagccattaaaagttagtcttaaccgtcgtaacattccgtacgcctttaaacgagttttggtttattagtgcaatatttttgcactatgtaaattaattctcaattttagctgtacgtttataatgtggacagcgacagtgtgcgcgaagtgattctgactccgaatggctcttggggaggcgaaggctgcttgggatgtgacattggctacggttatctccatcgcatcccaatttccgttgatcggtccaaaccgtgtggcgatatgcagccactgcttccttcgcaccaaatggaaatgccgaagcaatcgtcatcgtcactgcctccgccacaaactgggattccgcaaatggaccaactgatcagcgtaagttgcgagcagtaattaaattgggacgatgggcatataatttaaagatttcaatttaattatattttttgttccccatttttatactttaggcttctcaatttgttgtctcttcttcgactgatgttaagcgttttccggacccaaatgaatttgcgcttcctcagcagtcactcaatggggtttctgtgccaacaattcccagcagcagtgtccctcttccaccccaatcgcaacaattggtttccccgcctcttgttcctgtcgattattcgtctccacaacatcaacaagttgtttatcagtatattcgacaaatatttttgctgcaaattttcagagtcagtcctacgactcgggtaatgccgccaaatttgagcttcatggcttgccacctcatcagccgacacctcggcaggtcgacgaacccattggtcctccttcgtttggccaattgagagagacaccaatttcggctccgaccccctctgtcatgtcaatggttcagccacaactccactcttcctcattggactctgtcccactgtcggttccgccggtgacgcaccaccagcaccaagaacagcaacagccacaaattcaaccacttcatcaaacaccaccgccgccaattcacaccagcacttatcaaccgtatttggcatacggtgcgccaccgatgcatgcctttcagccacctcagcaacaacagcaataccaagtaggtattttgagaaacattttagttgttttctatttttaatttaggctgtgaatcaaacgtctgcttcgccttttatgtttccggcgcaaaatgtgcaacagcacattcaattgggacagcaacaatttcatgcgccaaatcagccgtcttccttttaccatccttcatatccgccccaaccgcaacagaaactgatgtcttcaagtgccttttatcaatatctacttaattcatttttcaattaaatagctatattttttgtgttttattggcgtttaattatccgtaggtttttcagctgctccctcttctgtctctggttataacattgcctctcatccgtcgtttggtcagcctggcggtcagccataccaacaacaattcggcattggtcactcttctcctgtccaaccacaaccgccgcccaatgtgccaatttcgtttccgatgccgcctctttcttcg

SEQ ID NO: 13912 - DNA, 2350 bp, Heterodera glycines
  unsure (1)..(2350): unsure at all n locations
gtaaccagacaaaaaaatcaatcgtgtaaactactatagagtagagcggaccngggactgggtactgaaaagacgggacaactgatacnntacaaataagtccggttttgaccggaaccgggactagtcccggttttcccagccaaaaattcccggttttttaaccctaaaaggttccggttttgcccaaaatttccggtcccgctcttcttctctaggtaaaccaaaaaaataaaagtgtattttatatcccgctccgtttcataatattttttcaagaaaatgataaagtttttctattttttttaattaaagatttcatttaaaggatattccctctcactggctgcgggtttattctgcgtaattcaatttttataatttatttaatgggatcagacaaaaggttgttgcttgttttatagtctaatttattcactgtgcaacgaataaacattattattgttttgttaattttcgtgtttttgataatgctttattcaattaaaaattgccaagatattgacaaaatgtgaactttaataattgtgtttactccatttcttgtccattgttggatattgcaacataataattgcaaatgagttccattgaaattgaggcggctgatgttgttcgacttgtgcaacagtatctgaaggagaacaacttggtacgtactctacagactttgcaggacgagacgaacattactcttaacacgggtgggttcggatgcttttgaaagcccatatttttggaagtgaatgcgtttagttgacagcatcgaccaattctgccaggacatcaccagcggtcattgggacactgtgctcaaatgcattcagccattgaagttgccggccaagaaactgattgacctttatgagcaagtaaaatgttggcgatggtctctcggggggtcgccgcaaaaatttttttagattttttttctaagtttgaatttttattttttttgaaattttttcggcagattttgtctcggcgagattttggggtgtacccctctcacgggggcatcgtttaatccacaaaaaatgcattaaatttacgctattattacccatttgaacagatcatcgtcgaattggccgagttgcgtgagttgggctccgctcgtttaattcttcgccaaaccgatccgatggccttgctaaaacaggccgaccccgagcgttacacccggcttgagaatttgttggccaaaacatatttcgatccgcgtgaagtatatcctgaagggggctccaaagaaaagcgtcgcgcggccgttgcccaatcgctgtctgctgaagttcacgtggtgccaccatcgcgacttctgtctctgttggcgcaggcactgaaatggcaacaacatcaaggacttttgccgccagttgggtgacaaacccatttatatcatccaattttgtttccgtttattcgagtattttcagatgatcatttttaggcacccaaattgatcttttccgtggcaaagcggcaatacgagagcaggaggacgagcgtcacccgaccactttgacacggacaatcaaatttggggccaagagtcatcccgaatcggcccagttcagcccggacggtcaatatttggtcaccggatcagtggacggttttatcgaagtttggaatttcaccaccggaaaattgcgcaaagacttgaaataccaggtcggaataatcaacaagtcatttaaacatatgctagcctaattaaggcacaagacaatttcatgatgatggaaacaacggtgcggttttgccaaaccatactcattgtcaattcgtatttcggcactgttttaggtcctctgtttggcatttagtcgcgattcggaaatgttgataacgggctccaaagatggcaaaatcaaagtggggttaaaaacaatcatcttttttattcagaaacgaattttatttttaggtatggaaaatccaaactggccaatgtttgcggcgttttgaaattgctcattcggagggtaaaagcggatggaacgatgggaattttatccatttctttttatgtgtgaccagtgtttcgttttcgcgtgaccacagtttcgtcctttcctcctccttcgacaaattggtcaaagtgcacggcatgaaaagtgggaaatgtctgaaggaattgcgtggacacaattcatatgtcaccgatgtcaaatacacggaggactgtcaccaatgtgtgagcggatgtgcggacggaacggtgaaagtccgcgcgcggggcatataataaacataaaaaactgacccatatggggatattatttataatggcattttccattgaagattttgattgtttagg

SEQ ID NO: 13913 - DNA, 2915 bp, Heterodera glycines
tatgttcaacacttaaaatttatgagttttaacaacattaggtgggttttttgttagtttcggtcccacctaacgcggtcttcagggtataagtccaaccagaaactagcacacgtttaattatacgtctaaacaaccgtaagaattgattaaataataagattgccaggttcccatacataaattttttgattttcaagaacatataaattttaagaaaaaagggttgctaaaatttactaaattttaatgatttatataacattttatttatttattttgttttatttttttgaaatcccccctctggtgcccaaacttcccggtgcccaaatttctggtgcccaaacttcctggtgcccaaacttcatgtcgccgtctgggtctgcttcctaccgattttcgttcattttccgttctcgtaaaggataatgatatagattaacaaagacatatacataaaaatgaaaaacaagcaattcagatagacaaccaaatcattgaatatgatggaagttgacgaccctcctaatattcaaactccaagttccaaaccgatggaaattgaacgtgaaattgagcatctccctcaagcccaagcgaccaaagatgaaactgagcaactcccccaagtccaagggaccaaaggaattgtttttgtaagtctaatctaaaaaacaactgttaattttaatgggattgcaggaatccgatgatattgcatacgaggaggacatcatacgaaaccctggccttctccgaccctgggaacgttacattgagcacaaagtgaagaccaaggctgaccctaagcaagtgcggctagtgtttgaaagagcgctgaaactgttcaatcggagctacaaactctggtacaattacctgaagtaccgccgcaaaacgattgcgcacaaaccgccgacagacattgcttatgcgcatttgagtgacgcttacgaacgatgcctcgtttttctcaacaaggtaaacaacattgtcattatttgaatagaattcttgttcaacacattgccaattttgtttttccccattgtcagatgcctcgcatttggatcgactattgcatgttgatgattcgtcgtggccaaataacggaaacgcgtcgcgtgttcgaccgtgccattcgtgcacttccaataacccaacatatgcgcatttggcccctgtatattgactttgccacacgacacaacgttcccgagacagccattcgcgtgtaccgtcgctttctgaaggtataccccggcgggcgagaagactttgtggagtatttgaaaagtatcgacaaattggacgaagcggcacaacagttggtcatcttggtgaacgaagacagaccgatcagcgagaagggcaagactggccaccaggtcgaataaatttttatatttaggcccgtatccaggggagatgaggggcgcgcactcccattcctaaaatgaaaatatttttttttagaagaaaatgcagttttgaaattttcagccattttcttaataaatatctcgttaaacatgactaattcctttaaaatggtaagaattttaaactaaaaagatagccatttagtcgttctgtaaaaaatggtgctacttttaattttggacaaattacgctgaaaaaaaaattgtgagactgaagagcgaaaacaaaacaaacttttcgtccgttggtgcctcctcaaaaattattttctgaatacgggcgacacgtttataaaatatcgatactttacaatgtgcagttacttttagctttggactgagctgtgtgatttgatctccaaaaacccaaataaaattttcacgcttcgcgtcgagccgatcattcgccaagggatcggccgttacactgaccaagtgggcggactttggctggcactcgctgagtattatattcgaatgccgaactttgagaaggtcatcatcaatttggccaacaaataataattggtttcatttaggctcgtgacatcttcgaagaagcattgggtgtggtgaagacagtccgcgacttcacccaattgtttgacgcctattcaaaattcatggaacgactgacctcactgaaaatggacgcgttgtcctccgcccggccaacccaagttgatgagcgcgagttggagttggaattggttatgacacgctttgagcatctgatgaaccgacggccattgcttctgaacagtgtgttgctgcgccaaaacccgcataatgtgcacgaatgggtgaaccgagtgcaaatttacgagggcgaccccgaaaatgtaagaaattggcgtatgggaaaattgaaaaacatcgaaggaaatggcatcaaaaacaaaaaaaaaagaagttattattttatttgactcttgcgccaaattccaaagctctcaaaatttggtctgttttagtcattattttaattcatttttacaatcattatattttaaaaacatttcgttgtattttttttctcttgctgctgaatttgtgttaaataatcctagcggaattattttagcaaattgcaactttcgaaaaagcggtggctaccgtggacccgaagcaacaagtcggccgactcggtcagctgtggattgagtttggcaagctgtacgaaaagttagacaaattggacgaggcacggaaggtgttcgacagagcggtgcaggcaaattttgttcgtgtggacgaattggcccaagtatggtgtgaatatgccgagatggagcttcggcacaggtttggcattttttttatttcgataaaaaataaattgctttccattgttcagcaattacgaattggcaactgctttgcttcgtcgtgccactacgcctccaccagtgcgtcgtgacagttactttgatgattcggcaaagtgcagaaccgcgtgttccgatccct

SEQ ID NO: 13914 - DNA, 2119 bp, Heterodera glycines
  unsure (1)..(2119): unsure at all n locations
ccccccccccctacgacgaacgaggggagggtgtccgaggcctcttacgacgagggggggggggggggggtgtctcgagacaccccttgtatatgtatggaggggatggagttttgtgattatttattcgtttttttatttgttcaggtccaatctcagttttgggagagttggaaggagtttgaagtcaagcatggcaatgaggacacaattcgtgaaatgttgcgcgtcaaacggtccgtccaggccacgtacaacaccaacgtgaactacatgagcggtgagggaaattgacggggagggtgttactggacaaacgtgcaaatttgtctttaaattaacttgctaactaatgggtctatggcaactcgtacaaacaattagtacaataggcaactcgtgcaaaaataaataatataaaattctaaaaaatacgaaagcaacgacttttcgttattatgggttgtcacgaatttattaaaaatattttatcttaatctgactgttttctatttttttttaatcacaaatttgtatttttaagtgttttatttacctttactctctttagcccaaatgatggccacattaggcagccagactgaaatggccggtgaactcagtgctgccgactcaatggcacaattggaggcgcgcgcagcacaaattgcgcaggaagaggcattgattgcagcaaaaaaagtgttgccggcgacgggtaagcagtttgatagtaatttgaccacttaaaactttaaaaattgctaattcacagacggacgaatttcgtttgtacgtggcgaaggtcgcacaacgacagaagcacgggctgaaaatccggaagaaattgacattgatcaaattgttgatgatgagggcggggaggaagaggacgatgaaaacgccatggatcacggggatggcacagcggcgaaaagtgcagacgatggacagagggaaacggcggaggcgtaatcgcgagccaattgtccactttggctgtcgttttgcactcatttattttttaaagtgttcataaatttgttttctttttttatgtgaaaagtttctccgaaattggattttcccttttaagaggtcgacttttgtctgtcctctcccctctcccccccatttcccttcctcattttgttgcccattgactctcgcaatgaaaactttttactattattttatcgccacacaaaagggtttcctcccccctcagggggcgggtgctggacaaaaaggcggaaggtgctcaatttaaaaagagagaatgaacggcggctgcactgactttggcacatggggacaatttgccccccccccttcccccgcggggggacaatcgaagggaaaagtccgtccgttgtgtgaagccgtgtgacaagcgaatgaacgggcgaggaatccatgcaaaaagtgccgaaaattttattgtccgcttctcatttgcctcgtcaattccattggcattgtcaggtttagtccaatttcaaatgccattcgctttatcctctcccctttttatagcatttaattacctaattagtcgcccatggacagacaaagcattcggttctaactaattggaaaatagcatcatatcatgggaaattagtcgctgcttttgtccctggcaattcgaatttaaaaagaaaatgctcatcatgctttatacagttcaggtaggaaagggaaatggaagagttaattagggtaatttaacggattatcccatgaattagggtttaattggaaaatgtccccgccctttgggagtctaaagtaataagtgcgtctttggaggtgattaaatgccctaaataggcttaaaattcggctcgttccctttgatctcatcacagtccgtccttctgcaactntctcctcgccgtgggtcgacccgcgggcgccgaagtgcgcccgtcggccgacgcctttcgaagcggacaattcggcacggacagaagcgacggcaaagcgatggatggtcaacagcagaaacaactgcgaaaagacgcaaaatgtgatcatacggacagctcggagaaggcgcaggacttggccatcattctgatgcgcaactattccaggcaaaatgccaaaaatgggt

SEQ ID NO: 13915 - DNA, 4023 bp, Heterodera glycines
  unsure (1)..(4023): unsure at all n locations
tgcttaataattttcaattgtgtcttccgnttgcttacttctcgcatacatgttaatgtgtttaattatgcacttttctacctaaaaatgacaagttcgtgtattttttaaaattgtatcttctattccttaataatttacaaattgtaacttctttctcttaattctgcatatttctacctaaaaacgacgttcccaaatgcttaataattttcaaattgtgtcttccgttgcttaattctgcatacatgttaatgtgtttaattatgcacttttctacctaaaaatgacaagttcgtgcacataataaaattgtatcttccactccttaataatttacaaattgtaacttctttcgcttaattctgcacttttctacctaaaaatgacgttcccaaatgcttaataatttacaaattgtatcttctattccttaataatttacaaattgtaacttctttctcttaattctgcacttttctacctaaaaatgacgttcccaaatgcttaataatttacaaattgtaacttccattgcttaattatgtatgcatttttattaaaaacgtgaataaaacgacaaaataacacaatttttggtataaaatagagaaataaaaggggtacatgtatgtgtatgggtgtgtatggggtatatgtttatgcgtgtggaagagagatataataaatggtgaacaaaatacaaaagggtacatatgtgtatgtgtgagagagatacaatgattggtgaagaaggtattacaatgtgtgctgacaaaatagttacaatgaatgattaagactataaacattataatcggctcctacaatacccttcccaacataaggttgataacatttttgcatagagcttgatattacagatccaccatcacgaatattgggtctaataaagtttgggtatattacattaattggttcaatctctcctgtttgagcataacgtttgacttgctgtttttatatctaaagccttggttgttgatcacatcataattgagtgtcaatccacggagtttaagcacgtattccatttccgcatcatgtagaacatttatacgtcttaaagccaacacatactattttacaccagcagtgtagaattctacgatttccatcaatgaactgcttatagtgtcgatcttattcagctaaaaagcatcgcgtagatgtgagaaaacaagactatccgtgtcggtggagagtacttaacgccgcggctatatcatcatttctgaatagttttattacccactttttttattttcgtaggtgatcaaaacatgatacacctttcaatcctcgatggccattacgtctattgaactattatcccaaatattctccaaaatcaagtacatcattattgaagtaaagtctgttaaaggctgtaatttcgtaaagaaatatgtcgcacaaattgttcaagcatagtttaacaatcctactcttcttggttcacagctatctttgtttggttaagatctctaatttctctttgcactctcttacaaattcagcttccttctcaccatttccttttatgtcagtatcaattggtaaatgggtaaccttcttcaaccgtagtaacattaatttcgattgaaatgcagattgctcagccatctcattgtttgtgtttgcatatgtatttacgtctatcctgcctttttgattgtttttggtgcacttcataaataaagagaatcagagcctaccattcactttgacgggcaaaacagaatatcaaattttctaaagaaatcatccaaaactttgagtattgtcaaggggtagtggttatcttccgggtatttccattcgacttattcattcagcacatgtacattggtttaccaatcgagtagtgtgtagtaaaattaacgaaggggtagagagaaatgaagtcacatagaaatttttcattccgtcttcaaatccgctcatttatttgttgctcattaacattttcgcgatctcgcagcctaatacacttacaactggatggacaacttgacttcgtataaattcataacgttttacattcctctcccgcactttagcatttatttttttcaattagacattaatatacatcttctaggtagcgctaattgcaggtatgctaaacatatccgcttacttctattgcagttctctctgtttccaactattcatccacagaataatgatcaatttgccaagtgttcagttgaaaagttattgatctagaaatatcacaaacaggccttatactagtcatacattcctttagtacatcaatgggtactaaaagacgctgccttctttaataatgccttagttcctttgagacatcaaataattccctcctaaacgataccagcgctgtcattaaaattttcaatgtcattacattttttctcattaattgcctctgtaaatacaaattttccagttgagaagatagttgtggtagaatttgtacctagacccttcattatatttgaaagatttatgtggttgtttttagtggatggggatattaaataaattgaggagaaaagttttactatttattgtcagtaacaccataaattgaatttaattttaggtataatttacttaattttaatcaatactattgtatttattatttttattatattttaatacaactttaatttaattttttaatttagttttatttatttttatttttatttaacatttattttcttttaattttaatcttatttttatttttattttactttttatttgaattaatttgaattttattttactttatttattattcagttaatttaaaggagttgttcagaacctctatccaataaaggctatttcgccgctcagcacagcataaaaggtactttaaccgtgcaccgtttagcattgtatgatatcctcactattttcaatatttttacttgttttaattgtttatttctttgaaatttctattaatattttacttttgtagtgtttaatgcaatcaaataacattttaacttgaaatttttaacaaaatgaacttaaaaaatattagtagttaattattgtaaaatataatttattaataaataagtttaattcatttattaaaatctaaaaataatgataagaatatatgtatacttcatattatatatcattttattaattaatttttcaatataaaatttctttcttccatcattaaaatatttttgcttagcaataagtaaaaaattccatatatgcacgctacccctctccgcctcccatctgatatgaaattcttaacgcttttttcttaattattattatttttttcatttatttccttatttttaactatcatcaccattattattattttactaaatttattttaatatttattttttctacaactcttcatctcttcattaggcttgggttatgacacaagtaccatttgccacccctccagtcgccacatgtcaccacacccctcaaataagttttgggttatacgaccaccatttggcaggttgccaactaaattgttcatgctatgccacactacactaaaatgagcagctgtctcaaccacagaatatctgatgttgggttttgcataggcacaactgtcacaattaatcacccttttgactcacagttgaaagtcaaccggcaatagggaacagctacacactatctgtcccttcgaaaagggtcctttgacttggttgtttgggtttgcatgggcaaactgtctcaattaatcattgactcacagtttgacctctatttccagtggtatattaccgacacttccgtgggctttatacagtcaaaatgcatccaagggattattaattaccattccattggctttggctcggtcagaaatgcaccaaaagaattcccaaggggataattaatgaccactagcttcggttggacagaagtagtatatggccacaaatgtggtgggtaattttacccccacattgtgcccttcgcagcgcgccg

SEQ ID NO: 13916 - DNA, 2603 bp, Heterodera glycines
atcagctcctcaattgtatagatatacattgtttttaggtccgtatttactactatgtgaagcatggcgtaaagctcgtttatcctcagcttccctgtgttcttcaatttggcggtggtgaccattgttctctgtttccgcttgagtgtctgagcgtcataaaagatgcttgattaatacgcatcgggtgttttatatgtgattaagtttgctgtgttattgttgttgttgttgttgttgtttttttttttaatttctcctagataaaaaatgttaattattcaaaattgtaccgcggtgtttaaattacagctgttgcctttcacaaaagagcagtttttgaaaattgcaaaaaatggcttcaattccgagtacgacccccaacgatttcatgcaatcatcatacgactacgtctccccaaaaaacgcactcttgcatgtcttttatttcgatcagcccgtgctgtgttgactggtgtgccttgtccagacagagcggtgcgcgaggcacaaaaaatcagacggagggtgcagcatgcgttgggctcccagctaggaatccacgagttacgtgttacaaatgttgttggttcttgcactttatcacatcgattgtccatgctgaactttttaccaacactggacccacacaggttccgcaacatcaaatatgatcctacaatttttcccgccatgcgttgtaaaatagtcattgacgacgacgatcacactttggtcacttgtctagcctatcattctggaaaaatcattttaacaggatctaaaaggcaggacaatttgaaccacgctttgcattcattcttagctgtcttaaataattgatttgttcatccaattgtaataaacacttttttgtttttgcaactgatttttttattaattccaagttgagcacccaggacggttagaaattaaaaaggcatcatcatcatcatcatcatcaccatcatcggcattaaattgctgtaattcttgcccctgctgatgctgaactgtttgcgcttctcggaatccaaacggggttgtcttcatgccgggtcgaatgcgccccttcacataatggggctgatagtctttgtgagcttcgtgggtgtacaggtccgaacacggagttcgaccaatttgaggaaatttgattcttattgacgcactgcttcccggaacaacatgaacatcttccatgttaagcacatcgtcactgtggcatacaatgttaggcggagtgttttgtgcaattgtaaaaaaaaaattacatttgtccatcaatgttgtaatgttccaaaacaatgtgcttcatggactcgaagtttagcagttgctgggcggaataagaaagacgaaaacttcggactttcagttcagcacgctcatcctccccacttgcgctatcacaatgacgaaagccataattttttgggccacccgacacaaattcatatattcgcctcgaacaatgttccctcttcatttggcccagcgcttcgccttcaggtacgtgttgtctcccactgcttgccacgtaatagattgagtcggtatctttgaaaatgatcacaatgagaaagtagcgtttttttttttttgttgaacttaccacaataaagaagcttatggcccaatgtctgcacctgctccatatagctgtaaagatgtagacgagcatatgaagtgacaaaaattgcaattggcaggcagttggttgacggcgctttcgcaaattccgcttttttcctcacaacaactcggtccatatgaggtgagacgtgatgaaagtcaataatgtcgatggtgtgattttcgagcagtgcatgaaattcagctggagtccgagtataacgtacttccgtaccaccaactcgttgtgcaagttttccccagagtgagtttgccagaattttctgttttttttttttactcgattttatacgaaaatttctctaaattatttaccgcaaccattcgaagcccgggattgtttgaaattttgttggggtccagctgaatgccctcaatccgcttaaattcatcaacatatgctctgcgctgttcatcggaatcacaaccgggtggccagccgcttgcttgtactttaaggcccacaaaagtgttaacgtattcacgaaaaagttcattgtcccactcttcataatgccaaacctatattttttttaaaggctcgatgcactgaacgtaatttttttacctcatataagtcaactactttataaccaagctgtagggctttgttcaattcggcatgagtgtacctgaggcaaaaaaaaaaaaagagattgacagccgcaaaaaattcccaaaattacgcggaaacccatgcccttgctgcatcaacgtgttgacatgcccgttgttgccgattgtcagcacagcgcgcgcaaagcggaaaagttaggcgtccgtctgtcgtccggtatggaagcaaagggattgttagcgggcgtgtaacaggatcgggcggaagaacacggacaaacaacaggcccgagaatgagttagcgtcgggtgagcaccagggaagcggtgacgtgggtgggcttattactgtttcacgagaatgaacacga

SEQ ID NO: 13917 - DNA, 3495 bp, Heterodera glycines
atttttgtgaaaattttttttcaattcttagggggtgtatttttcatttttattgcatttttgttaactatttttccgaaaatcctaaaaaaggcgtaaaaaatggcgaaataggcacaaaaataggcaaatcggcattaagcacaaaaagtccaaaataggcaaagtaaaaatgctaattaagggcattaagaatgatgatcagctgaagcggaacaaaatccgacggaggatggaggagcaaagggaaaggagggcaaacgacgaaggagagaattgggcggagggggacgacgataaaccgccggaggagcagcagttatactgaattcattgacgatgaagaaaaaaaaacaattcagcatatgttttagcattttggcataaaaacaaatgcaaaaattcattttcgctgggacgtgaaacagacacacagattaattttcgaaggaacaacatatttgatcgaacacatacatatatatatataatatcatcatcttcaaaataattatcggcaattcttcgcgctttctttgatcatctctcacagttgaaatgggatgggccttccttcttaaaagtatgcgctgccctttgaagtcggattctaaacaattttaaatataatagcggacgataagtgggtagtgagtgtcttacggagggagaatccatttcgtgtttgcttttcgacgaaccgacatggcttgccattgactgagggcttctgatgcttgctgaaaaaaaaacaatatttgttgttttttatgcggagcaacgacacctgctgcaaatacggaaagccgtacccaacaccgaagtttcgctgggctgactggaggacgaaacctaaaagaagtggaaattttgcgaggggaaaagcgaagaaaattgaaattctgacgagtttcggctgtttggtcggtgctgcacgctttttgctcttcttaaaagtcactgaaaataataattgggaaacattcaatttagacattatttttttcactttttgcgtatccacgcgccgcttccttcgtaaacgtcgcgttgagtgtgtagttttcgacaggaagggcctttggcggcgatggaacggagttttgcggttgcacgacttctgctgctggaggcggttgtggagtcttcttttttgtcatgaagaatttgaagattttcggcggttcctcgtgcgacgattctttgaaaaagccacacggtatgcagcagcagcagagacccccggcggcgacctgttgcttctgttcgtagcgaatctctgaaaatgaaaattgtcaatcgtttttcaacggtttcaatgcttcgtccattcttaccggtcattccaaccatttccattccttcgtctccgtttgattgcactgaacggttcactgaaaaagagtaaaaataagcttttatcaaaatgaatgttgctcggctccacctctgacggaattctctccttttgcgttgccacgtcccgcgatttcgtttgcatttggcgctcccttctgctgatttaagacgggggaaaagggcattgttgacggatacacaattgacaaggaatgtaaaatatgggcaaaatgagtgcttttatatgccgactctgcagtcagaaaaagtccactttgtttgttgtcattcaaaatgaaaaataggtatataaattcaaagatttagcttcctttgactattaatttagaaaaagcacattcccgccagtgtctccatcaaatagaagtgcccaaaaaattttggcaattctttgcttttccacgtcctgaatcattggcatttgtcaaataggtaaataaatattgatcataggccccaaactcaaaaatgcttaaaaacggacagaatcgatgtaagaaggttcgaaatgggtttgaaaaatagaattaggtgtgcgcttgccccttttcaggctgattcaaattcgtgaaaaatgcttagatcacttgtccaagaaaatggaatccgtcaggagttctccaacatctcggacaatctcaccccccaagagttcctccgtagggttaatcttttgttgtaggaccattgttccttcacttttccccttcgcaatgagcgttttttagaaatgaggattttgagcttttttagaattttgaggctttttgggaaaatcgtcaatctgttaaatttcatgattaataaactggcataatgtttgaaaatcatttaatttgtgttttattagagcataaaaactaaagataaacacaaatttttcgaaaaatttttcataaaaccagaaaattatcaattttttccgaaaatccacaaaattaggatttttaatgaaagtctatcccacaagtttttggaaaagcgccgcaaaaaagtgcaatgtgtacttttttatcgaatacaacgaaaaaatttgtttaaatttttaattctgcatctgaaagacaacttttgtcgggattagcacacgggaaaaaacggattttgctggatcccagtctgcaatcccgcatttttattaaagttaaacttattttttcatgcagatttcattcaaaatttgtgaaattttccggcgcggaccccgtccactttcacaaatttttttgaaaaagtgcgccacaaaaaagtgatgtgaaaaaaatcccaaaattttaatccatcgcttacactttgggctatatctttgtttagcccaaaggcttttcgcccgtgtggatgagcatatgtcttttcaagcatgaaggccggtcaaagctctttgtgcaaagagtgcatgaaaagcgttttccgtttgccattttcggttgtgccgtcagtcgctgctggaaaaatagggccataatttggccattggcatttttaatttttggccattggcaacattgtggttttattattgctcaacaaaattgtgcccttctttcctcccaatgcctcctcctcttccgtcgtccgcttctcctcctcctcactgtcaaatagctcctcctcctctccctcttcttccatttcatccgttgtcccttccaattcctccaaaagtgcctccattctatcctcctcttcttcttcgtcctcattctcttctccaacaaactcctctccttcagcctcctgcttttcctcttcctcctctttctcatcgtcgctttgtccattccttcgcccaagttttccagtcaaaattttgtcggcatttccgaatatcttgacttaccttatattctctttttatcccccatatccattaatcccctattccccaattatcccccattatctgaggaggttgaaaaataatcccccagtctctaattatccccatgagggataattagaattttaaaatatgataccaatttttttcaaaaaacaaaagcaacaaaaaatactaataaataggcatgtcaaaaatatgaatataaaatcgcaaatatggccataaatatggaccaaaatcgcaaatattgatataaatggcaaaatctcaaa

SEQ ID NO: 13918 - DNA, 992 bp, Heterodera glycines
gaacagtgcacaagtgcaaatcggcgcgggctcgcgaaacatacgaccctaaaagcaattgatcactggatttactagttattttttaaagggaattattccaaaaaatcgctagaaaatttgtcaaattaaaggggagcaaaatgcacaaaataagtaggacatgataattaggcgctggaaaatagcaattttctaaagcgggatagaaaaaaacaaaattttccccgatgccgtcgggcgacttctctgggacgcttcagcgactttaagtgttatatctaaattctttaaatatcaatgtccttccgggtcggaaacaattgctaaaaaagattttctcgcgcaacaaatctattgagagtttgtcataatttgtggagaaaaatgaatgtgagtcttatggaaaaggtccaatttgccctttggtgttttccccagaaaaggatatttttcaatggtcagtttgtcttggcagataggaatatagtgttaagcggttctgtaaccatattcctaaagagtccatattcagttaatatttgatttcctaactaatggtgggcacttttgtaaggtattattcttgaaatagaaaattatgttgccaaatatatctatatattcaggcagtggggagtcatagtggtgatcataaggctctgcaatatcccataatcacgcatcccagagttcacgggactaaaaaatttttcgtcaaaaaggggggggggtaccatctatagtattacctgatcattttttgatgttgcaataattttggactaaatttaagttgttttggtcaatttatgaacaaaagtgagaattttaatatttcgagttttcgactttttgtgcgaattcgggtccgggaccctaaatttgtcaaaattaatgtgtcaattttaggttttcggagtcggtgaacttattttccggatttttataaaatttaattttgttttttctggacatttcgtgggtcagcg

SEQ ID NO: 13919 - DNA, 1390 bp, Heterodera glycines
attttccatttttgacttatttctgcataaatttccatttttataaaattattttcctattatatttttcgagaaaaaacacctaaaaaatatgatgtaacgacaatgacttggattttgtttttaagactttgattgagtcttaaaattatttacaatattaaaatttttaatactttattattgcgtcatttgaataaaaaaaataccaaataacaaaatacaattttctgtttaaaattaatttttttccggagagatcagatgaatattttttaatattttgtagtttattttatttgaaaaattgtttttatggtaattttacttcatttatgaataaataaatgtataaataaatggccatcaataatcaaaagaaagaattttgtatttttttaaaataattttgagaatttttgataaatgaaaatattattattatattttcttttattttcaattttccaattaaatcaaagtgaatccgaaaataaaaaattgcaacaacaaaagtcatttgacgaaatatttggagaaaaatgggaagaaaaagaagaagaaaaacgaaatgaactcaaaaaaagagaaataattggaaaattttataaaataaaagaaaaaatcaagcaaaaaggaagaaaatattcaagaaaagaatggaataaaattgaagaaaaaatagcgaaaaaattggagacaaatcgaaagaaaatttatgaatggattaaagaattgggattaaatcaaaaaatacagaaaagctacaaaagaaaaactgatgaagaaaaattagaaattgtgcaaaaatttattggaatgtcaaatgaatataagcaaaaagaaagaaattattcgccaaaagaatggcaaaaaatttatgccgaaatttgcaagaaaattggagttagcctttcagtaattaagaaatggaagaaacaatttggaatgagtaaatttataacggagaaggaaaaattggaaaaaatgaaaatttactggaaaataaaaagagaaaatccgaaaatgagtgacaaagaaattgcaaaaatattgaaaattgatagaacgacaatttcaaaatggaagaaacaatttggagaagaattgttctaagaacagtagaagaattttttttcccgccatttttccttcaattattttacaaataaaaaatgattcttattttgtgcccaccctttcaaaattgtttttcgtgttctatcgatggtggcattttttttctttttttttacaaaattttaattatttttctgaaattgagcaattttagcggttgagagcggccagttcagtgttgtccagtgtagggtcgacaactcgtcgttacagtcggtgctgttagttttcgaccagtgttgatctcgac

SEQ ID NO: 13920 - DNA, 2688 bp, Heterodera glycines
  unsure (1)..(2688): unsure at all n locations
acaacaaaagtcantttgacgaaatattctggagaaaaatgggaagaaaaagaagaagaaaaattcggaagaaaaaagagaaaaaattgaaaaatattataaaataaaagaaaaaatcaagcaaaagggaagaaaatacacagcaaaagaatggaataaaattaactcaaaaatagcgaaaaaattggggacaaatcgaaataaaactaatcaatggattaaagaattaggacttaatcaacgaatacagaaaaactataaatcaacaactgatgaagaaaaattagaaattgtacaaaaatttattggaataaaaaatgaatataagcaaaaaagaaaatattcagcaaaagaatggcaccaaaattatgcggaaatttgtaagaaaattggagtaagcaaagggacaattatcaaatggaagaaacaatttggaatgagtaaatttataacgcagaaggaaaaattggaaaaaatgaaaatttactggaaaataaaaagagaaaatccgaaaatgagtgacaaagaaattgcaaaaatattgaaaattgatagaacgacaatttcaaaatggaagaaacaatttggagaagaattgttctaagaaagtagaagaattttttttcccgccatttttccttcaattattttacgaataaaaaatgattcttattttgtgcccaccctttcaaaattgtttttcgagttatatagatggtggcattttttttcttttttttttacaaaattttaattatttttctgaaattgagcaattttagctgttgagagcggccagttcagtgttgtccagtgtagggtcgacaactcgtcgttccatcggtgctgttagttttcgacagtgttgatctcgacagtaaagtttgtttttaaaaacttgttctatatggtaaagtttcgataaattttgaaaaattaaaatcataaggacaggctctttacattgcagcggggtttgcgattttcgaattctgctataagaaagagcttgtagatatttgcatcttggcactcaacgccagcatttgttagcatattttcccacacgattcgagaatcgtatataagattttttaataaaaataatcatacgcatctttattattaccacttactcaattctagattttgtatatgcaaattgtatattaatagtaattcatatgtacaataaatcaagtagaaaatcaattaaaaagtactgtcgaaaccaatcactgtcgaaaacagctggtacggttttatcgaacttaactctttttataattagaaaaatcgcactaaattttacagatatactccccggtacagaactaacttatcctgaaaatatttcaacgcatattgattgtaaaattgttcgaaattctgagtttccaatatttttttgcaacattaattcataaaatattttttgaaaaagtgcctgaaacgcaccaaattttattgtcatgttattaatgaacagggctgcaaaaaatatgcacgaaaaatgaccaaaatcactcgcgcacccattcaaatttggatttaattttaggcataatcaaattttttttcctaagagatattcgaatcggaaaatatttgacgaaaaatggcaaaatatgcaaaaaatcggaaaatatttatatttgacgaaaaatggcaaaatatgcaaaaaatcggaaaatatttgacgaaaaatggcaaaatatgcatgaaatatgcagaaaaagccaagatatgcaaataaaagtcccgacttttatacgcaaacacaaaaaaaagaaagtgttttttatgcaagtagtaacccctgccacaccttcgccgcttgacgctaattagaagtgacaggtggcggaggagggtgtcaattagtcactaattgggggggggggtgtgctaattggtcagcggtcaagagggcactaattggtcagccgtagggtgtggggtggtgtcaattaattagggaaacctaaacctatgcgaggggtgtgtaaaattttcatgtactttttttttgacataaaatttgattgatttaaaaagtgacagccgagggggagggggaatttgattggtcagcgaagtgacagatgagggaaaaattcaaatttctgatgggcggggatcggaaaattatgattgatcaacaatgtgacagtttttgatattattaaattattcaaatgaagtgaaataatttgttttgcatttggactttatcaaacttgttatgaaggtgtaaatttgcaatttgttgacgatttcgcgcaatgtttcgaccgaaattaaattgtttgtcacttataaaataggtcaatttgtgaatatttaaggtttccaaaatggaattcattgtaattgctacatttgttccatacttttcttccaaaaattttccaacccattctattgtttacccaaaatggcaccacgtgatgactccagtaacaataccaatggtcagccagtcattcaatttgatcaacaaattcgccaggaccctggactaaatgccgtttttgactttgttcgggaacagggcgcacgggtaatttgtcacaacaaattaattttttcattttttgattaattttgtttagcatggcattttcaacacacccgccgaaatcgtcaatgttcttcagcaaatggcacagcatcgactgaatgagc

SEQ ID NO: 13921 - DNA, 2166 bp, Heterodera glycines
gacggtcgggcacgccgttgcaaaagtcgccccggcagcaatggataacgcatttcgtaaatacgtcatcagtgtgatcggcacaactcgagctattattttgttgacaatgcgataaagtgaactggttttgttcaatgaactcgctttggacaacttgaaaataaaaatcactattttggcgttttgtcactatttcggaattttttagataatttttctacaaaaatacaacaaacccaaaaatacaccccctaagaatcgacctaaaaaatttcaaaaatcacccctaagaaatgaaaaaattttctcaaaaattcattttcatggcaagaatttttaattttaaaattatttttttaggtacctattttgggttttttcccttaaaaatcccagtcctattcatttgcaactgaaattaatgaataaaaaatttttttgctcaatttttggctgaaaattatgtcactattcgtcactattttgccactattttgtcactcactattttggcatttttactcactattttagttaactattttgaaatttttcgtcaccaaaagtcacgaccctaatcatgactgtatatgttttcagatttttttcaaatgatgacattaatatgattttataatattctaaggaaattgggactcggcgatgctgacggcactgccgaaaagattgggattttggatgagattgataagaaatatcaaatttttctttttattaaaaaaaatactatgtatttggagggggaggaattgatctaacgaaacccacgcaacttaatgcgtcagtggaagatgcgtcagtgatacaaatatgtactttaaaataaagtacagtagcataagtattgccaggggttcggaattggccgaaatggatacagaattcgtgatcagtgacctcgaaaaatttttatgactttaaaactttcactgacgcattttccggcaaccgaccacgcaaccgagaaaagtcgagactcgagacaaataaaaaacacgagacttttcttgagaccgagattctcgagtagcaagcactaccacaaaagagacttttaaaaggatggaatatttaagtactttcttgatacctttatcctggcagtacacagtattgcagaggacagtcccaggaaggcactgttctgctgtcgtgaaataatcaggatgactgcgccaacacttcagtgctaaatcagggtactgtctaattatttaaaataccatttttttcaacaacaaaaaaattcaccattttttagaaacaaccaaaatttaaacgtatttggagtcatatgcttaaaatttttcattttaaaaagttaaatttgaaaattaaaataattttattttgaacattttgcaaaaaaaaaaaattaatacaataattaagagtattatttcctaattttattgatccaaactctctgtatttgctataattactcactgtaagccgaggtcaccaagcatgccaaagcaacagccaaaaaaagggacgatgaagccgccatttttatttaaaaatgattgaagttggaaaataatagttaaaaagggaaaattgaaaaatgaaataataaaaaagacatttttgttgtttcttttcactgtacaaaaaaagggcagtgctttagcctaatattttgaaaaattaattcacatattttataaaaatgaatcaatcggttgggaaattcagaaggaatttagtaaattaattatgattcatttgtgaaaatgtaaaagggaaatttatcaattaatgaattttaaaaaaaatgttttttagtatagaaaattcaatgaaatttttttgaaagtttaaagataaacaagtattcttagagctctcattaaggcttatctcatttgcattcaatagcgactattaaacatttaaagcttttgaatgaggcgcagtgggacatttgcggacggacatttgcggagggacacttgcggacggacatttgcggacggacacttgcggacggacatttgcggacaacatttgcggacggacatttgcggacggacctttgcggacgtacatttgcgggacggacatttgcggacatacatttgccgacgaacctttgtggacggacattttcggacgaacatttggggagggaaattt

SEQ ID NO: 13922 - DNA, 1778 bp, Heterodera glycines
gcaagtgtccgtccgcaaatgtccgtccgcaaatgtccgtccgcaaatgtccgtccgcaaatgtccgtccgcaaatgtccgtaaggcatgagtttgggagctatgataaatggtttccaaaccaaattattattaaaattaaataatatttaatttaatttaattacaatgaagcgaaatgagccgaagcaacaaaatttgttttgttttcatgtgtggacaaacatttattacagttgccataatgtttgttacagtaatcctcatcaattatcaaatcagtgaatgcttacaagaattatttggtgtcaatgttcaaaattgatcaaaatgacttgcatccatattcatgatcagcaagcagagcgactttgataaaacctttttatttttgagtaaaaatttagggcaattataaaaccgggcgggcattcacagccagaaagacttaaatttagaaataatggcactagtctaaaagaggacagttttgaatttatcgaaaacaaaaaagggggggggatcagggatgggccgaggtttcgcttttcgcatttcgcctttcgcattattcgcattttttggcgtttcgcatttcgctttttggcgcgaaatgcgaaatttccacccctaagaaatgaatatatttgaaaatttaatttttaaaacgaatgcttcagtctaaaaaacccccaaaataggtgctaaaaatgggaaaataggtgccaaaaagttccgaatttggggtgtaaaatcgaaaattttcttcaaaaagcaaaatattatgccaaatcattaatgagatagataattttcaaaataaaaaattctcgccaagaaaataaacaaataaattttggagatgatttttgagaaatttttcttttttcataggtatatttttgaaattttcgagtcgattcttaggggtctgtttttcctttttattgcatttttgttaacaaattttgggcaaaacgccaaaataagtgaaaatagttttaaaattttttttaggtttttaggtgctaaaaataaaaaccgagaaaataggtgctaataacttgaaaagtagcttaacaacagcccaaaaaaacatgtttttcgtgtgtttcaggccatggggagctcaggaaaaaaataggtaaaaccctaaaaatcgtagccctacatattacactcaaaattgcataatggaaaaattcttcgaatttctccccacaaacgagaattaaaaaattttatgggtacatttttgaatataggcaatttttcgtaacaaagtgcactcaaattttcaaattttttttcaaaaaatttcacttgggaaaattcccggttggtcccagtcccggacgaaaatcgaggtccccggcgcttatcggcaccgccggacattcattttaccttaatttttgaaattttaaccacaaaatgggtagaatttgtcattttttatctgagaaaaagatcgaaccggaaaatgcagatttttttttgcatcacaacctcaaaagctattggtaaaattttttttttaaatttcgcttttcgcattttcgcaaatttcgcttttcgcatttcgccttttatttttcaatttggcacatccctggtaaacaacttaaagttacattgactcaaagttggtcagacttggccagatgggaatcggcccattccgcccgtcggacccctcctcttcttccccagaacttttttttaaaaaaagcgcgccgcaaaacgaccataaaataaattttatttcgtgcttaaaa

SEQ ID NO: 13923 - DNA, 1769 bp, Heterodera glycines
  unsure (1)..(1769): unsure at all n locations
ttccctttttcctctcattttttgtttgccatcccttcaaatgcaatatttcccccccccccccatttattgtaaatttcttcaacaatctcacattttctttctctttttttgttagttccaatctgttaatgataaattgagcctatttagtaaagcaattagataaataattttcattttgaataaattacataattttcgcaaaatttcagtttccccccccccccccgcattttaacatgaatggcaaatgtttacttacataaataaatggccaaacttccaaagagaaaggatgtctcgagagggcacttatgagaaaaatgattgggatgggacgtacggaagggaaaggggaaagagaggggaaaaaaggggggggggagggttatcaccgaacggtggggagaggggaggggtcgatgatcagacgcacgccacgcttttaattgattaattaaccaatcgctgtgaagacaaaagtttctgtgcttttgatcaattttaattaaaaattgaattaattccttaaaattgaaacaaagcaaaagaatagtcatctatttctctgtttccgtcgcttttcagtttaagggaatgcctttcattaatcacaactttttaacattttatcaccttttttacagtaaacctttcttatttgctttcaaccatttttatgaaatgaattcgactccattaaaaatagattaaataataatttcatgttactacaataatatattttgatttaggcatttattaaagtgaattccgaaaggaaagggaagcttttttgtcgaaaaatttaattaacgaccataagggcatcattatgttggttaatgattgccattaataaacctattaaaatgtttttaactgctatacaattcgagacaaatttaaattttaaatgaattaaaagaattataaaaaaagataagaaagtccagcactaaatgcattccatttgctgtatcatcccatttgacaatgtttcacttcactaattaacaaatgggcaataatgggaggcgatgaacagcagcaaaaacagcgattgggagaaggacaaaaaatgatcgagacaaaaaaggaggaagaaataggacaaaaggaagaggaagagaaaaaggagcaaagtgaagagaaaaaggaggaacaaagggaagagaaaagggaagaagagggagaaaaagaggagaacagagagaaggaagaaccgaaggaggaggaggagaaggaggcacaaaaggaacaatgggaagagaggcagcagaagaggcgcttcgtcaagcaaagaaaatgccaaaattcggtgccacttgcgaactgggcatttaacatttaaatgcccaaagaatttagcacctgaaaatgcctaaagcggccggcggagtgcctttttccgcgacgatcagtcccgccaccaatgcgttcgccaaacagcccctcggtggtcttccgccccaccggcggcatcggttggccatcggcgacggggccctgcgggcgttggccaacacccaaaatgccgtgagcgacgcctttgaagagtattcccttctgctgcatcaaatcggaaaagccgccctcctcgtcggatggcacatttttctttgtgagtcaaaatgccattgccgtgatctgctgatcataattccccagcatttgctgcattccattcgcttcgtcgtgcttctccgctgcttacgctgactgccatcgngtgngccattntcgtttatttccgtctgatggcg

SEQ ID NO: 13924 - DNA, 2192 bp, Heterodera glycines
tcagtgattgatcagaagtttaattaatcactgattacctctgatcagtgtgattgttcgattttctgtctctttcggtcgcgtcaacgccttctcggccttttcggcatgttcttctacttcgtttgcatgttgctctgttcgaatagtccttctgaagttcgctttctctcttcctttccaaattgttcaattcgattcaaattcgttcagattgtgtggcgtcccgtcctgtggggcttcttcctccaattttccatgggattggccgttttgcgttgggattggggtgggcattcccaattttccattatttgatcaaatcaaaagcgatcattttcccaggttccaatcagttcgactccctctccgagttggtgctcacctttttggagtttactcacaatggcactgattttgtgtacggttttctctccacgccaccgaaaatttgtggttctcattaatttatttttgtttttccaaatccgtactttcttaggaatggaccccgttttcgcctttcataccgcacaaattgtcatttattttggcgccgttgtggttagcacgtgggggggggaagaacgaaaattattaaccgatcgaaaaggcgggacacacaatgccaggggatgactaaaatgaccattctttgcacattaatccaaattcatccaaggcattgctctaccattttggcataatgcaatttgtgatcaaaaagatggcatggctcgtccaaattacgctggacacaaccgccaccgaatcgctgaatgcctgcgcttgcattttcctcggtttttgccaaattcaaaaaaccaatgattactgaactgattttcgggatgagtgaggcgcctctgctgatcaggccgtatttggacaaaatgaccgcgtccgaactccacgcggttatgaccacggggtaaaagcgaataatccttcaattgcctactgtttcgtaatgcaaattgattatttcgtttgatcagtttctcgtgcattgctggtgccgtttttgccacttacattaggtaaatatggcccatggcatttacccatctttgaaatgcttgaggccattcaaagcagtgccattttgtcaaattcccggccccgcacagtttcggcgcgtgccctcgctatttgctgtcttccaccgtcatgtccgccccgggctcattggcctgtgccaaaatgctttaccccgagacggagcagtcgcaattggtcaatgtggacgaattggagttgccagcggggtcgttctattcaacaaattgattttcccacggatgccaatgtgttcagagaagaaagcagtgccctcgagtgcatcagcaacggtgccatcatggcagtggaattggtgctggccattgtggccaatatcattgtgttcctggccctgcttgctctgctcaactctgtcctgtcctggcttggccatttggtgggccagtcagattggacttttgaggtgatcagagtggccattggcactgatcactgctgattttgtgctgtcgttttggtgtgattcctcccgttcagctgattctcggctatttgttcttcccgttggcctttgtgatgggcatcactaatcccgaggagacatttcgagtggcccaactgatgggcacaaaggtgcgaaaagaattgtgccgccagtgaaagcaataattaattgccctaccgtttaaatgcttaagactgccctcaacgaattcattgcgtacaaacagttggggcaaatggtcgaacggaacgaactttcggtgttttctctttgaagtgatccgcaatagtcaattaacacagagtcggtctgcgatgatcgcaacgtatgctttgtgcggcttctccaacatcacttccatcggcattcagctgagcattttgggcggcatggcgcccagccgaaagcggcttctctctcggctggcacttcgcgcgctctttgccggcagcatttgctgctttatgaccgcctcattagcaggtaaatgaatgattgattagctgccatttgtaatttatcttattttgaaagggattctgatcgatcagccgtctcaatgtcggcctcggtacaccaacgaaaattgcttcaatgtcagcagttttctgcacattaatcaccaaacgacagccacggcacggatgggctggagcagaacaaa

SEQ ID NO: 13925 - DNA, 2444 bp, Heterodera glycines
ttaagtgcaatgaccttaattaacattaaaaaaatcgccgcccaaaggcccgcgccgtttcttttgtcctccgcctgcgccgtttccgctaaaatcagtcagtgtcagtcaatcattcatcggtcatcggccggtgcctgtgaactctccgcccgggggcattttcgtcctttccccttcggctctctggtgactcatcaaccccaaattgcccttcttccctttgtctgtgttaagcatttctgtcgaaatgcgcatttacgtgacgtaaatggtcgaagggggggggggggaaagaaaagtgaaaaattgggcgacgaaagtgaagggcgacacaaacagcggaagaagctgcggctttcccaattgtgatgtttggcgaacaattaatgatgctgctactcttagctttcacgcggcagaatttaaaggaatttggccataaatttggtgttaggcagcttaaatcagtcgaaaatttgattaaaccggaaaacttgggattttgacagattttttgtgttttatcaaagccctcctgccgtttccatttcatttgtcagtcaaattagtgggccattggcaaaggacggagatttctttggtccgtttatttgatatgaagaaaaattatatataattacacagagaataatgataaaaacgaaaaacaggcaagaatggctacaatcacaacaacaaaaggcttgacatacacacaaatacatatatatgtgacaatacgattacatcaaaatggcgcttgacatccctccaatggcatcatttcttgtcctccgctgtcgtcgacttcagactggacggcacgctcgacaccgccgaaaacttctcgacactcgccgtttgtgatgaagatgatccgccctttgccgcatctttcttcgctccattggcaccagcggccgccggcgcccccttcgctgcatcaccaccatcgacggcgtaggaatcagtgcgcgcttgtcgccgacgccacacaacgaccgccacaaccacagcaaccgccaaggccacaaatacgctgaaacagggagacaaaagttattgcagacttcatcatttattcaacaaaaagttgacagaattcggaacaaaacgcacccaactcctaacaaaatgaacaggagagtgttgccgctgccgccgcctccgtttgcagcggtgttgttcggcgtagtcatttttggcaaagtggtcgtagtggtggtggtggtagtcgtcgttgttgtgctcgttttggtcgttcccgttttaggcctgaaattgggaaaaaaatggtacaaatttaacaatagcaaaaaagagcgatgaaacaactcactttctctccttctgaccatggcaacaggtgacgaggagcgaaacagcgagcagcaagcgcaaaatttgaagaaaaccggcggaagtcatcgagcagcaaataatgattaagagaagaggaaaagtgaattgaaactgaggagcacaggccttttatataaatttaggtacttacttgttaattacaaaattcacatttaaaattaattttcgacttattgttagaaatcgggtcctgggttcggaattgaagtcagaatcgggttttccgaccatgaaacccctaaaaagcgttttttggaacaaaagatgaactttagttaaaaatgaattttcgatttattgttagaaatcgtgtccggggtttcgaaatcgaagtcataatcggttttcctgacccttaaaacccctaaaaagcgttttttggaacaaaagatgaactttagttaaaaatgaattttcgatttattgttagaaatcgtgtccggggtttcgaaatcgaagtcataatcggttttcctgacccttaaaacccctaaaaagcgttttttggaacaaaagatgaactttagttaaaaatgaattttcgatttattgttagaaatcgtgtccggggtttcgaaatcgaagtcataatcggttttcctgacccttaaaacccctaaaaagcgttttttggaacaaaagatgaactttagttaaaaatgaattttcgatttattgttagaaatcgtgtccggggttcggaattcatcgaaatggaagtcataatcggttttcctgacccttaaaacccctaaaaagcgttttttggaacaaaagatgaactttagttaaaaatgaattttcgatttattgttagaaatcgtgtccggggttcggaattgatcgaaatcgaagtcataatcggttttcctgacccttaaaacccctaaaaagcgttttttggaacaaaagatgaactttagttaaaaatgaattttcgatttattgttagaaatcgtgtccggggttcggaattgatcgaaatcgaagtcataatcggttttcctgacccttaaaaaccctctaataagcgttttttgcgacaaaagatgaacttt

SEQ ID NO: 13926 - DNA, 1083 bp, Heterodera glycines
tgaattttcgatttattgttagaaatcgtgtccgtggttcggaattcatcgaaatggaagtcataatcggttttcctgacccttaaaacccctaaaaagcgttttttggaccaaaagatgaactttagttaaaaatgaattttcgatttattgttagaaatcgtgtccggggttcggaattgatcgaaatcgaagtcataatcggttttcctgacccttaaaacccctaaaaagcgttttttggaacaaaagatgaactttagttaaaaatgaattttcgatttattgttagaaatcgtgtccggggttcggaattcatcgaaatggaagtcataatcggttttcctgacccttaaaacccctaaaaagcgttttttggaacaaaagatgaactttagttaaaaatgaattttcgatttattgttagaaatcgtgtccggggttcggaattgaagtcagaatcgggttttccgaccatgaaacccctaaaaagcgttttttggaacaaaagatgaactttagttaaaaatgaattttcgatttattgttagaaatcgtgtccggggttcggaattgatcgaaatcgaagtcataatcggttttcctgacccttaaaacccctaaaaagcgttttttggaacaaaagatgaactttagttaaaaatgaattttcgatttattgttagaaatcgtgtccggggttcggaattcatcgaaatggaagtcataatcggttttcctgacccttaaaacccctaaaaagcgttttttggaacaaaagatgaactttagttaaaaatgaattttcgatttattgttagaaatcgtgtccggggtttcgaaatcgaagtcataatcggttttcctgacccttaaaactcctaaaaagcgttttttggaacaaaagatgaactttagttaaaaatgaattttcgatttattgttagaaatcgtgtcctgggttcggaattgaaggcaaaatcgggttttccgaccatgaaacccctttaaagcgctttttggaacaaaagatgaactttagttaaaaatgaattttctatttattgttagaaatcgtgtccg

SEQ ID NO: 13927 - DNA, 1828 bp, Heterodera glycines
tcaaatttgcggatcccgctgcgggactggaactcaaaattttttgcgggacgggattccgcgggattaatcccgcaaatcccgcatttaaatttgcgggatcccgtgcgggattttggaaaattcgaaaaaatcaattaaattcaaagaatttccaaaatcaaaaaatgctgaaaaataaatttttaagggctggcgagatgcattaaaaggggctgatgggtcgactaagatttttcgattggatccgacggtaaaaagttgctcggaaatcaaattattaacggttcataaattgactatttttttcttttcaaacccacttttttgcggtgcaatttttcaaaaaactaggaacagagggtccggcggtccctatcagggatggcattccgaggccccaaaaattttcggaaatcggaattccgaccccaaaaacgtcggaaatcggaaatttttcaaaaaatatacaatataataaaaaatttctaaatattttaataggctaaattttttaattcttaaccaagtaaaaggtatttcacaaatgtttttagtatacgcttgaaaaaattattcaattattttatcaaattttttttttgtcatttttcattattttagaacatttttgggaaaaggagtgactatttttacacgttttatacagcgcgattttttcaaaaactttttgggaacttggaggagggtacggaggtgccgataggcgccgccgggaaatttttaaaaatttcagtttaatttattattagaaattgtacaaaacttactagtttaattaaaaaatttacgacttttcatcaaaaattcggatgactcaaatattatttgatgtttaaaatgtacaaaacataaacctattcaccatttcaactgtcatatatttttattacctaatttgtgtttttaaatttattatttaatttatttaaaaatatttggcattctgtcttagaaaaattttcaataaaatcaataaaatcccgcataatcccgcacaaaaaatcaaatttgcggatcccgctgcgggattggaactcaaaattctttgcgggacgggatcccgcgggattaatcccgcaaatcccgcattttccaaaaaatgcgggattgcggactgggatcccgcaaaagcccgcgcgggatcccgtcccgcgccggtctctactgacaaatatggatgcgtttttaggcacaaaaaatcgcgaaataggcacaaaaatcctggaataggcaaataaaaattgtttattaacgcttaggaagcaaatcacgtaaaaacttatcaaaaaacttgattttgtttatatttcaattattttaaagttttttcgctaaatatcaatcatatgcccctgaggccaaaatggccgacatatatatcatttgatagcgctcggtctgtaattgaagaatccgaaaaaatatttttgcggaaaccaatccttgaagagttacagacccggaacggaagtggccaaatgcctttgggactgaaccatccaatgccttaaatgcaaaaaatgctacaaaatacatatgaatcgatcggactccgtcagttgggccctcacgtttgagctcaaagggttgtacccccgaggtcggggttggatacggtataacttttttcattgtcaaccaaatccaactttcttgacccgcgacaacagcccgttcctctgaggttaaattgctccagtcgctgtttgagcattacaaaaagttggaagaaaaaatgaactccctaaaaagggaaaaaaaataatttcccctttaaaaattttttatttttccattttttttt

SEQ ID NO: 13928 - DNA, 2589 bp, Heterodera glycines
  unsure (1)..(2589): unsure at all n locations
ttggacagccctcgtagtcaatcgcctgtcagaatgcttccccccnncctctgtctcgccnncaccatcacttttctgtcaaaatgtttttttcgttttatccggtactgaagtgttcaattgtcctgtgctcaaagctcatcaagagctatggaatgataccatatttgttcagattaaatcctttaaaatcccccgtatttcaaaaatggaaaaaccgatctgtcggcacatgcaaatctgggcttttaagttcacccccttcaaaaaattcagctcttttaaattaattttttttttctgtcagacatttgttaaaatattacaaaaaaatggacacggttgaccaactgtccgcttctggcaccgcagcacaaagtgttgttaacccacatgcagccgctcttcaagaaggcaagcgattttcaattaatttgcggcgcgcttaagaaagtcagtttctgaggttatttgtgacgctgatcacgaatatgacatttgttttgctgaattccgaaacttggacccgaactcgagcaaaaattcaaattcattaatacacaaggaaaatcatattttggtagaagttcagtttgtccctccatttttgaattttttatttttattttaagaccataaaaacatgttttaaggggttttagagaaagctgatcacgaatacaacaaaaattttgagcaattccgaactccgaacatgaactcgaacaaaagtcgaaattttaaactttcgagttacgcattttcggttcaaacaaaccagcttaatgcaaggaaacaaataaaaatcatttttcgaaaaaaaatttagtttttaaagtcattaaacatgtttccaagggttttcggggttgctgaccacgtatccggcaaacattcgactaatttcgaaaatctggtccggggttcggattggccgagatgggtgttagaagcggattctctcatcccagaaaacccataaaatgcctttatttcaagaataaaaattgattttcaaaaaagagtgcacccatcgtttactattaccaatgtttttagaatttcagaaagatggagaattacaatttttctagggccactccatctcttaagggctttttcggacattgcggtctagcatttgcggcttcaagtcaaaattctaggatttgtccctcccccgcgccgggttcttactgacaaatatggatgcgtttttaggcacaaaaaatcgcgaaataggcacaaaaatcctggaataggcaaataaaaattgtttattaacgcttaggaagcaaatcacgtaaaaacttatcaaaaaacttgattttgtttatatttcaattattttaaagttttttcgctaaatatcaatcatatgcccctgaggccaaaatggccgacatatatatcatttgatagcgctcggtctgtaattgaagaatccgaaaaaatatttttgcggaaaccaatccttgaagagttacagacccggaacggaagtggccaaatgcctttgggactgaaccatccaatgccttaaatgcaaaaaatgctacaaaatacatatgaatcgatcggactccgtcagttgggccctcacgtttgagctcaaagggttgtacccccgaggtcggggttggatacggtataacttttttcattgtcaaccaaatccaactttcttgacccgcgacaacagccgttcctctgaggttgaagtgctcaagtcgctgtttgagcatcacaaagagctggaggaaaaaatgaactccgtaaaatggagaaaaaataatttccatttaaaattttttaatttttcaattttattttgtggctattcattacttgctgcgtcttcgcatgctcccttttgcgtaattttgcaagtaattattattttttatgcaattttaagcctgggacttatgatggatattttcctgatggatatttaccgttttcttttaacttataaatttcgagtttttgttcgaattagtgttcggggttcggaattttgtaaaataaagctcatattcgtgatcagcgcacaaattaccctagaagaattatttaaaatgtcttttgagtgctttttatagtgcggtcacttgagtgccagctgagtttggcactccaattctggcaccttttcagcctgaaaaagggcaagcacgcccctaattctatttttacaacccatttcgaacctttttacatctaatctgactgtttttaagcatttttgagtttggggactatgatcaatttttaccaatttacctaattaattatttacattttctaactataaaatcatccaaattattttgaggaattccgaattgcaaacggagctttcaaatgccgaaaaggaggcgcgacaagccaaagagaagatgcatagcattgagcagcaaatccaagaggtgggacataaatggaggaagaaagtatgaatatgcattccctggatcatcaaactcatgtcccaaccggtctttggcaaaaaaaaaactcgagaaaagccaaagccactaaataatgttgtgttgcagttacaagcccagcgggacgagcaggaca

SEQ ID NO: 13929 - DNA, 912 bp, Heterodera glycines
aaatcgattgctctgaatgtttgtttcacttctaattagtcatttttcgttaatttttttggcattttgtctcctttaaggcgctttttcatttgcaattccctttttttgcccttttttgtgtgttccggacaaacattattgtgaatcagttaatatacctaaatttgtggtggtgtcaaatggcaatgttcagcccaattttttcgcgattctccgtggaggtgtggcaacgatttgcagcaaatttttaattggacattataaatatatatttttaaataatatattattttaataatccttcatgagcatttttttaaattttttttttaccattaatttttattttctattttttcatatttttattagatgatttttaataaatccgttattcgttttctttttcattagttttttatattacaaaattagttaattgttttttatttttaattattttttttttgtttcttttctgtaattgctcaaaaattcccttttttaattccattgaattgactttgtaaattaattttacatatgctttcattttatttttcatttttcattttttaatttgaatttgattttttcaaaattttccccacattttttgccatgggacaatgaacggaatttattgggaaatttactccaaaaattgttccaccgtcgtcgggggggggggggggggggaagttgaacgaagaatccaaagatttgtgcggattggccacacataaagggaattaccgaatggaacggttgcccttcggtgtaaagtcggcaccaagcatattccaatcaattatggataaaatgctggccggactaattttgccaccgcttaccttgacgacatcattgttgtcagcgggacaaccgaacaaacccgttcgacatttg

SEQ ID NO: 13930 - DNA, 1345 bp, Heterodera glycines
  unsure (1)..(1345): unsure at all n locations
tttttctttcttaggccttacatgcgcaagcagagcatccagaacaagttcaccgcaaaactgggcggacttgcactgttcaaggacgaagatgaggacgacatttcgatggcagccgggggttggccataaaaagggggaatttggagacaaaaaagggggggggggactgagaatgccaaggaaaattgggcgaaaatgcctaaatgtgccgacaaaatggcaagattagatagatcagtaggacacatggcatggcatgattgatcacccggggttgacccctgagactcctaagaaaacttgaacctcggacccggaaaaagctaatttgggatcctaatggataggtttttcgggacaaccctgaaacccggtaaattaagtcttactgacaaaaacccagaatttgatttcagtattagctcactcaatattcgagaccagtgcttactagcattgatacccagtcgcatttgacccgtgagcacaatggcacagaaagctttttcggttccggaccagcagcagatgtcatattttactgctcctctcccacaaacgggagggacccgaattatgcattaataaatttataaaaaaaatttcggcacttttccatcaggcgcttcgtttatttccgcttatacaacgccagggcccaaagagagggcgaccagtgccaagaagaaggccaacttgggcgtcatgttcggcgtttacctgcccaccattcagcacattcttggcgtcaccatgttcatccgtctgttttgggtttggcacttttttccatttttggcattttaactttattttaggttgtcggagttgccggaatttggcacacaatgcttctgctgctgttgtgctgtgcttgcactttgttgaccagcatttccctgtcggccgtcgcaacgaatgtaaaaaaatgccaaaatttttgcaatttttttattaaaattttacaaaaaattttagggcgttgtcgaaagtggtggcgcctattttatgatttcccgaaatttgggtgccgaatttggctccgccattggcattttgttttatttggccaatacggtggccacttccatgtatttggtgcgtttttcgaaaatccccccttaaaaataatgataatacattttgccaaaggttggcggtgtggaagtctttttgctgtacatttacccgggaatgaccatcggaggcgaagcagtccattctgatgtatgcaaatatgaaatggatttaatttttanatagatttaaaataattatggaaaaatatttatttttttatgttaaataaaatttattttataatatttcattttatttatcc

SEQ ID NO: 13931 - DNA, 2445 bp, Heterodera glycines
  unsure (1)..(2445): unsure at all n locations
ttcagaccagcatgttcggcatgatgtcacatgtaagaaacatatgtatataaatttagttttattgcccaattttttattttaatccgtctttttcgtgccaatacaccgtctccccctttcccctcctgtagaattaccgtatctacggcaccattctcctactgttggagtgtgttattgtggcgcttggtgtccgttttgtccaactgttggcgcccgtttcactgctctgtgtcattctgtcaattttggcatgttttgctggtggaattgagaaggcggtggtcggcgacggacaacagtaaacaaaaagaaagagcaattaaagcaaattaataaatttatttactttttaaattatttaataaattttatttttattttgattcaaaattgcaaaaaactcattaatttaaattggctatttgaaaataaaaatatattaataatatttaattcatatattatttctgtaaaattttagtattttttaataatattttgttttattttaattataaatttgattgattttcaatcattttcaatcattttgaattattaaattatttttatttcaattagcgaggcaaatcaaaatgtttttttttatttaattttttaacatttaaatttattaagcgtctgcatgttggaggaccatctgctgaattcgcgcattctgaacttgccgccgggcgaagacattttgaacatttgcaattactgcaaaaagggagatcagtcagtggccatttaaatcatcaaaatttaaattttggcatttttaggcaattaatttttcaattatttttaagcattgccgaccaattctgcgagggcaacaccaccacggaggtgtgccaaacgtacaccggcggcagtctgaagtgtgtgaacgcattccccggcttcaactcggcactgatgcatgccaacatgaaccccaaatatatgcaggcccgtgaaaatgatgaaattttgaaatttcgaaaaatttttgaaattttttaggagggtcaagcggtggaaagagaaccgaaggcggaccggagcagagaagtgttccaggacgtgtccacctcattctttttgctgttggccatttattttccggctgtcaccggtgggcaatttgttttttattttaaatttaaatttgaattttgttttaaggcattatgacgggcacaaatatgagcggtaaaacgggattttaattaatttaaaaaaatttttaagtaataaattattttttctataaatattttaaaataaaaacaaattttaatttattgaaaaaataataaagtagtcaattaatatttaaattaaaaaaggaaaatctttagaaaataatacaatttttgataacaaaaaatttattttaaataataaaacagaaattagctaattttttctttttaattaaatattaaattattatttttaagtttgtcttaaatttttttaaaataattattggcaaaaaatataataaaaaaaattacgctttttttgatttaaaatattaaatttattttctgtcaagttaaatccaaaaatttctttaaataattaaatataaaaaaatggaaattattacgtcgctttattaaaaatttaattacaaaatgaattttcaattattttaggcgatttaaaagacccccagcggagcattccgtccggcacaattaccgccacgctgaccacctccttcatttattatgcattggcaattctgttcggcgcttcaattattgggcaatattttgttgtggaaaaatttttttaccgaaataattaattaattatgggacagaaatcatagtttctctctcaaattatatgtggaagggagcttcgaattgcttccctaagtgccttaattttaaacccgaaaatttttgcttacagttttaagaagcaaatgctataaatatttatttttaaataaagtttcaaaaatgaaattttgcctatttatttagtcccgtcctaagggacaaaaacgggaaaagcattgacgggagtttggtggtcgcttcgctgtcgtggccctcgccatgggtggtcattgtcggctcattcctctccacctttggcgccgcgcttcagtgcttgtgcagtaataaattgcacatttgaaatcgcattaattaaataaaaatatttttataaattaaaaatttcatttttcaatttttaattaattaattaaattaaattaaggtgccccccgcctgctgcagtcgattgccaaggacaatgtgattccgatgttggcaccgtttgcgcgtgtcaccaaaaacaacgagcccttcctgngcctgctgatcaccactgtgatcgccgagctagccattttactttggtggtatcgagtttttcagatttttcattatccccttcacatttcgaattactttttttttgaat

SEQ ID NO: 13932 - DNA, 1410 bp, Heterodera glycines
aaataaatttggcaattttttctgaaagcaattttcataatttctctttctctgtttccacggacccttctaatatgtgcggtagagacgcataatttttaaaaatgtttaaatgtttgttatttgttaggtggtatttttcccgggtccactgcgtttcggcgctcccgtttcggcgccagcatgtttttggcttaacttttttctttgtaaaccaaatccaacattgttggtgtcgttcgaaagcttaatctatttagaagctttttctaagctattgctttgcgattagacaattatcaaaacagttatgcatgaaaattacgaaaagtcgaaatttttgaagttttttcttaataaaatttttacaggcttgaaaaacttttcgtttttgaaaggctaatagagcatgttaagagctttcgaatgataccaagattgttggatttggatgccaaagaaaaaagcttaagtggaaaaacgaactggcgccgaaacgcgtgggtcccatttttcccccaactgtcgaagtttttgtttattcaaccacaccacaaagtcaatcaacaaatcgactctcattcgtgctcatttcgcaaaatcctgtttacatttacatatatgtcttatgcacatttaattcgtaaacaacttttttatatgcatcaacgttgtttttgagtaaaccaaaaccaaaattgctcgaattcgagttcggggttcgaaattgatatgatggcgctatttaaaaggagcactattttgaaaattttttcaacttttttttggtcaaatttttttttttgttttttttacacataatgatgaatattaagtattaacagcacaattatggtgaataaaatgtatattcacgatttttatccaaaaaaaatttacaaaacaaaagggtccccctttgtttttgataaaattcaaaatctatcactttataactagcgccaaatttgcttaataggcccaaataattgtcatattcgtgatcagcgacctttaaaacacccgggtacttggtttcaggactttttaaacaaaaaaaaaatttgaccaaaaaaaagttgaaaaaattttcaaaattgtactctttgcaactagcgccaaaattttcgtttcatttttatttttagaaaagataaatttgacttctttacaatgactgcttcatcccgtcgtttgcaaaaggttgactaattacgggcttttaactttattaccatatgggatcagaacttgaatctcttggctgacctaaaatctcacttcagtgcttttttaaaaattctttttcatgattgaaactattcttctaccttactaaaatatttaactatatttactaacaggaactttccgaaatgcgtgggaacaattcgggcgctgttcgagttc

SEQ ID NO: 13933 - DNA, 977 bp, Heterodera glycines
aattatggtgaataaaatgcatattctcgatttttatccaaaaaaaattgacaaaacaaaagggtcccccctatggtttttgataaaattcaaaatctatcactttataactagcgccaaatttgcttaataggcccaaataattgtcatattcgtgatcagctacctttaaaacacccgggtacttggtttcaggactttttaaacaaaaaaaaatttgaccaaaaaaaagttgaaaaaattttcaaaatagtgctccttttaaatagcgccgataatgtacaaacacccgaaaatccccgagtgcaccacaaaaaagctcaaaattcacgattctgacatccattttaaccaatttgaaataattgaaccgattttgtgcataaaatgtgaattttcttgaaaaatggaatttgacttttttgttcgaatccgggttcggggttcgaattgggtcaaaacagatgccagattcggttttcccgaccccgaaaacctataaaacaagtttatttttaaaaaatttttttgaaaatctgcacataataattggcaagtacccgattttgtgtataaaatgtgattttttgaaaaatgaattttgactttttttgttcgaatccgggttcggggttcgaattgggtcaaaacagatgccagaatcggttttcccgaccccgaaaacccctaaaaaattaaaaaaaaaaatttttttgaaaatctccgcacagataaccgacaagtaccgatttttcagtggtttttgagtaaatttagcttatgtatttaaatcaatttaggaacaaaagtaagaattttgaaaattttgaattttcgactttttgttcgaattcgggtccgggattcgaaattggacaaaatgtgtcagattcgtgatcagcgacactaaaaaccccataaaacgtgttttcacgactttttagaacagaaaatttttttttttgtaaaaagggggg

SEQ ID NO: 13934 - DNA, 2023 bp, Heterodera glycines
  unsure (1)..(2023): unsure at all n locations
aatgtttttgaatttgatatttgccattattattcttcacanaataagttttttgataaagtatgtgcatattatagtatattattattaacaatacacaattttatgtcannatntaattcaattaataaatcactaaattaaattgccagttgttggcctgcaaaaattatgtgatcgacgaattgggctgcacggactccaacaaaacaacagttcctggtatagttttttccaattaaatctaccatataaagaattaaatttgcgcgcgatggcatatttttagacccatactgttttgatggtggatgtgcggtgtgccaatttgtctacggacaaaattgcagcttgaagacgaggtgcaactgcgccgtgtgtggcaccacttttttattgggggttatcattagttgccagcatggatgcgaagactgcattaaagattgacggactgtaacagatatattggatggcatgttattagcattagttaaattgcatctctgtggagagattttatttaattatgtgttaaaatgatgtgatgaaattgcaaaaggcaaaagccatttgggctctattccagtttacgcgtccaatgagtgaccaccctcacttttttagaacagaagttttttctttcttggataacccaaacattcttgatatcattcgaaagcttaaagtttagggaatttataaatacaagaaaagaacaaatatttatattaagaaaaaaatgtaatgagaaaacctgaaattcgcaattttttgcgtatattcaagaataattttttgtctgttgcctttgtcccagaattttgctatacaaaaacttccctaaactttaagctttcgattgataccaaaaatgtatcgattgaccaagtaaggaaaaagttatgatttaaaaaaatgaaaatggtcattgattggacgcgtaaactggaatagagccagtaaaaataaaagtccctggggctctatttcaagaaatattgtcttatatattacatgcacaaagcttagtcaatcacaccgaacataatttgaccacctgaatggccctggtcaattgcaagttaaccttaattgtcaaaaaatattaaataaattgaaatttatttttatttttactaccggtaccggtttttctaataaaccggccggtattggaaatattaattttttggtgaaaatttgttaagaattcgggcgaaaatttccaaaaaaaaatatttcatggcatttatctgctgagctccggagccttccttcctcaaataaactttttttttattaaataatttttaaagcaattatgctttggaaaatttttcaccattttgtaaattttttcaatgtaaaaatttaaatttcctaacttccgattgaaaatcctgtcttgatcccgacttctcgggccccggcacttttttgttacagcttttctggccccgacttttcggtcccggcttcaagacggtcccgacttttcggagccggtttttcggatcccagtttttctggctccgtcttttcttgccctggcttttcagtgcccggtaagtcccatttcgagtttttctcaaaaatttccggccagttgttactcaaataatcaaattcttaatttcgtttttgtacataaaaaaattcggtacttatgtattatctgtgtccagattaaaaaaaatttttttttgagaataaattatttatatggttgattgggttcaaagtggtaaggagaatgataattttattttttttaaagtattgttttggatgtttaagagtgtcactgacttgttaatttttacatttctacattaatcagtcagtcactaattgtctcatggcaatatttcgtttctgacaaagcgactatttaacgagccaaggtttcagattcactaaaaaaatattaaattttttggtaaaatgtgcaggtcccaccgtatttcatgtgtagaattgaattcgcaaatttctgccgtttgtgtctcattttcttttg

SEQ ID NO: 13935 - DNA, 1004 bp, Heterodera glycines
ctggacgatacgagctttggataatacatagtaccaaaaattcgagcgccaacaaattggtctcaaaaaaaaacacatatgcccaaacgttcagactccattcgctttagatcggtaaaaaattccatatcatttgtcggaattcgatcaatgttgctcttaatggcacgtgaagcggagatgcatttttggcctgaaatttttcctattttttaggcaacgcgaccgcgcttcgcggtgactttttgcgcgtttcccgactgcctcaaaacccgtgaccgcgccatttttcggtccgcgccccatcccctggttagacgatgaaaatattttccaaaaatttcacttttaaggtgaccaatgtacagtttgtacaatggaatttcgtacaatttttttaaatttctaataaatatagaattcttttcacaaaaatcaaaattatttttttctgtagaaagttttctgcaaatttcaaatgctccaaattttttaataaattttttaagtttttctaaaatcattccatttttcaagagacaaattcgaagttttaattgaaaaaattgtacgaaactctattgtatgaactgacatggcactgctataggatctgcctaagaaaaatttattttatttaaaaatgaaatttatatgaaaattattcagcggagctgaaatatttttcttggtatggaccaatttttctaagaaattgtagaataaaacccacattttacttttacctattttagtacatattttggaattttggcacccaatttttttaaaaactccaaccaaatttccaatctgtattagccaatctcccttttgattgatcaggaaatgatcaaacacaatggacacacgaagctgtgcccattttttgcggaagagcacaaaacaaattgcttcaaaaagcaattcattagggagacgaaaatttatttgcattttaaggaaaaatgatttcatttgttttataaagctaattaatatga

SEQ ID NO: 13936 - DNA, 2406 bp, Heterodera glycines
ctttcactttttgttcgataaacacacttttaattgtgcgtacactttctttcattttccactttctaaatttcttcttttccatcacaaaatttgggcatttaatgaacaaaaggaaaagtgtcgctggtaagtgaaattcatcttttctaattaacatttagcaaaataatccaatgtttcccacatgttttttatggcttattattatcactttttccaatttgttttatcatttggcctttggcggcggaattcccacggaaaagaaaaagataaaaaaaatgttcaaagtgtcagcaaagaattaataaatggaggtgctttaacacacaaataaaatcaattccattgctatctccgaataatttggctttctttcccatattttttgcccatttttgtgctttttaagtgtccgccgatggcgggacggcagctaccggcagaagcagtccgttgcactgcggggtccaagccattcaatgcgtgggcttcggccggaagaaagtgtggccggccaaagacgcggcaaagtcgcagctacgagacagtctcagttcggtaaagagacggacaaaacggaaaatgaacggaaaaagaaaatggcaataaatggaaaaaatggaaaaacggcaaaggcgattctttgtccttcttcgttttagtcgccggagttatttccctttttttctgttcagtcgtacgttgaacatcatctgaccctcgacgaacttcgcgacgttcaccccgattcgttcattgacgtaaccagcccggagaagagcgacggactgtccagcgaggaggccaagtcagacacactttttataccgtaccctttcgttacggtaggaagcgccttttggacggaggggcaaatgttctggcgccgcccaagcgcatttccaacttgcagttgtttgccaaacagtttctgtacaagttttggcttctcctgatgggtaattagctttttctcatccctccctaattaattcctattaattgctcattaattatttgtcaggtgccgctctgtgcaccattttcacttattttatcaatttgtaccacgggacggaagagttgctcaatttgtactgtgccttcattctgatcgtcatcgtcgtggtgatgtcgttcatgtcattttggcaggaacgcaaggccattcaggtgaaaaagagacgaacggaattggaaattcgaaattcaaatgcacaattattctcagattctttatgattttgggcttcacatgccatccaatataagtgccatttattagcaattaatccattcattaatcaactaattatttgttcactttactgctcggtgattcgagactgtgaggagaagagtctgcagccggacaatctcgtcgtgggtgacgtcataatcatacggtaagcggagaagcacagtccgtatacggtggatgaccccgggaggacggacatttcgccattgaaacaaaattaaacaaaatgtaaatgttttttcaaacagatcaggacaacaagtgcctgctgatattcggtaaggcttctctttatcttaaattatctttcattttgtatataatttaaatttccctaaattgaaattcttaagcattctccagtccacaggggtcaaaattgaatcctccgcaattaccggcgaaccccaacccgtcgactacactcacgaacccgctgctgctcacatttcgctgtttgatgcacggaatgtcgcactgaggggatgttactgtacggaaggagaagctgtgggattggtgatacgagcgggaaagtatacggtgggcaactgtaatcctcctgtctgatcacttctcacttctgctcaccaatttggttttacctctctctttgcattactttttcctgatctctcacttttttttgtccgatcattcttttctttctgttcactccttctcctctttttccctttctgatcactctttctcttcttttttcctttctgatcacttcttcttctcctctgctgctgatcattccttctcttctcagatgctcggcaatttcactcacctccaatcgaccgttaagctgaccgagactcttctgcagaaggaaattgccaagttcgtgcagttcgtttccatcgtcgccttgtcaatgggtgtcattttctttctgatcggttgcatcgttacaaagttagcagtcatttcgcttttcttactcagtcattgctcaatttttggtttgaaaatgtgctctaccatttcgtcaccggctttctcatcattatgtaaattgatggctgattgaaagaaggcaaacccaaactttcctccttcgacagagttgccaatgtcccccaggggcttccggcgatgctaatctcccaaatggcaatcatcgcaag

SEQ ID NO: 13937 - DNA, 1497 bp, Heterodera glycines
tcccccttttccatttatgtatatcgtcgcttcttttctggtgcgtttttccctcttttggtgctttcctttcgtcttttcagtccatggtgaacttaaacaagcacacattaaaatgatgaagcaaagtgcacagcgaagagagttggagaagcctttgcccgatttgttggcagtgatgtgcatgtgcaacaaagtgagggagaatggcaaatagccaattgaaaagggcaaatgtcggcaccaaaatgactcttggcaaaagttaccacttaaatgacccttggaaactgtcggcaccctaatgacccttggaaattgtcggcaccctcatgacctttggcaaatgttgccacttaaatgacccttggaaactgtcggcaccctaatgacccttggcaatgttggcaaccaaatgacccttctcccatgccaaaggcccatttcgaacggacgcgtcgttcgatgcgtcgtgtcagcactcagcgtgcgttggaacgtgaattgcgcgagtttaaaatcgcttctcgtcagacaaagacgttcactgtggtgtgagtattaggggggattgatcagaaggtgccattggccacccgcagcaatcagtcgggccacgagtcggtccgcgtcccctccaacaacaatttgtcacaaatggaggccacggtgaccggcgaatggcccagcgatgacccggaacggtggccgacctcacgcaaaaggaccaacgatctgatcggcagcccattagaggtggcacttctccgttacgttgaaatggtcgccagcgttgagggcattcggaaccgatacaaagtcagactccggaaattgcgagactgtcctttttcatttttttgtttttctctttttcggtgtgcgtggaaatcccttttaattcggtccgtcgttggcaattagtcgtcgtgcgctgcttggcaactttgagcagtcaaagtcagtcaaaagatacaaaaaggcctaaatttggccaatttcttacgccgtcttcatccttcgaacggagtttcgatgagagagcggccaaaaaagagacgacagacacagcaacggaagaaagcggcgaatttgtggtgatgatcaaaggggcgccggaagtgattcttaggtaattggagacggaggaaagagacttggaatgggactgatcggacgagagagatttgaatgggagtgattggaattggactgaatggaatgggagtgattggacgggaatgattgtaatgcgactgatcggacctgcaagatttgaatgggactgatcggatgggaggatttaaggagaagagattggacgggaatgattggatagacattatttggagggagtatatttttaatgatattttaaaaattttttgattttcaaagatgagtcacgaattttccgatttattctagtccgttgtttctgaagtgtctatatagggggacaggtctctcgactcgataacggaagagtttcgcaaa

SEQ ID NO: 13938 - DNA, 3511 bp, Heterodera glycines
  unsure (1)..(3511): unsure at all n locations
taatttcttgcagattgaaagccatccattgcctgccccttctcggcacagcaaagcactaatagggtgtttgactcacttcaaaaaataattcattacccaaaagttttttacaaccacttattgccaatataatttcttgcagatttaaagctatccattgcctgccggttctcggcacagcaaagcactaatagggtgtttgctcacttcaaaaaataattccatacccaaaagttttttacaaccacatattgccaatctaatttcttgcagattgaaagccatccattgcctgccggttctcggcacagcaaagcactaatagggtgtttgactcacttcaaaaaataattcattacccaaaagttttttacaaccacttattgccaatctaatttcttgcagatttaaagctatccattgcctgccggttctcggcacagcaaagcactaatacggtgtttgactcacttcaaaaaataattcatcacccaaaagttttttacaaccacatattgccaatctaatttcttgcagattgaaagccatccattgcctgccggttctcggcacagcaaagcactaatagggtgtttgactcacttcaaaaaataattccatacccaaaagttttttacaaccacatattgccaatctaatttcttgcagattgaaagccatccattgcctgccggttctcggcacagcaaagcactaatagggtgtttgactcacttcaaaaaataattcattacccaaaagttttttacaaccacttattgccaatctaatttcttgcagattgaaagccatccattgcctgccggttctcggcacagcaaagcactaatagggtgtttgactcatgtcggaatttttattcctatcgccgatcaatgatcggcggaattaagagggaggaggcccttcaccaatcccccgcccgccgcgcgacatgttttcgccgttccatccctctgtccccctttccttcaaattgtcaattgtntttgtgtgttcccctccccgcccgcgcacaattaatgaccaatttgtcaaaccgcaacttttcgccccccgtccccaacttggcgaatcgactccaaagaacgatgaacccccaaattcctgttttccgtcaattttgtcccctcgctcattttgtggccccgttttttatcatttccccaatttttggcccgtccccgttctgctcaatttcaccattttttgttcaattttgctcgtatttaatgcgagaaatccccaccaattcccacaatcagaagcaccagcaaaggcaagcaatgcctcttccgtccctctctcagtccccctcatttcattgtccttttcccccggcccaattgtcggttccatttctgtcattcacccggtccccctcattcaatgatcagtgattggcccttcacttctgtcccatttcgctgtgatttgccccaattgtgataatttccagacccccggttttggtctttgttctgtggcccggtgcccttcaattctttcccatcccggtccccaattcatttgtgattaatcccccggtgatggcattttatctgtgatcaattttgtgatattttgttcaccatttttaaattttggtttaattacccaagtttgaggctttttcccggaataaattttgcttaatcaattctcggcatttgatttggccggtcctcgtccctgcctgcccctgacccccgcaccgtggaattcatttggcccgaccccagagcaagtcgggacaaattggcgctcctgggtggatctgtgaaccacggattgactcaacgaatcccggtgacacaggggaagggaaaagcaaattagagagcctagacaaggaccctctgaggcttgtctagtgttcatagtttcgtgtagttattgtcctccgaggcataacttcacgagggacgtagcggacttagtgtttaccctctgaggaagcacttcgtccgaacagagggttgaaaggtgttgtgtagtggacgaagtacttgccctccgaggaagtacttcgtacaaaagggtgttcaagcgcgcacaaggccactgacaaataaggaaaaaggcaaactaacagtcctccgaggctttagtttagccataaggcaaaaggcaaacaccttgtcctccgaggcagctgtttagtcacaaaaggtccaggaccaaggccagactgatcccggaaaaagacacaaaacaacaagtgcaccacaacacacacacacgcacaaccaaactgcacgcaatgtctgggccaatacaaaaagggatcatcaatgcactcaaagctctggataacgccaaaagcgccacctcactcattctacaccccgacccggacctatcaaactgggaaaatgccgtcaacttggaggctcaatttgatcgcgtcgtcaaggaaatccgtacaatggaaatgcagatggacagtctacgagactcatccaacgcttggattgaacttctcgcccgcctgaccggagacgacaaagacaacggcgaaaaagaatacatcaaattcgacaaaaatgagaaaatcgccgaacgatacgacgcagcatcaaccaaacttcgggatttgcgagatctcgaagcaacactcagtgccgcagccaaactgcacagaggcagagccgacagagaagcaaaggcggatcaattggccaatccacagcaacaaccgcccatgccaccagcaatggcagcaccaatgacaatgccaacattcacagcaccgctctaccaattccagccaattcaactggataaattttttggccaaaagcgaaaatggcccgaattctacgaatccttcaaatcggcaatcggcagccaatcaatcagcaaagcgcagaagctgaacttgctccgcaatctgctgggcggagaagcgcgagaactcatagcgggcttccggctggaagacgcaaactacgagacggtccttcagctgttaaaggacacgtacggagctccggaggaacacatcagaagtcttcacttcgaactggccaatctcaagccgtgccgaagcctccgtgagaccaaagactttctgcttcaacttgagcggcttacaagggagctgaacaatgccggagaggacatcgagggaccgcaggtgttcctcatgctggagaagaagctgactccaccattcctacgaagcatcctcacaaagaaaggagaggatccggcaaactggacgacaaccaaattccgggatgtgctaaccgaagcagtccggaaagaagtccaaatccaagaagtgatgggagaatatggccatcactacgtccaaccaaaagcagaagtcgtctcagcagcacctgtacaagcaccgagaacaccaaaccaaaggtcacgaaggcctaaccaaccaatggcactgcgtgatatgacatttatcgcctcatcactggacgagggtcacagacatcaagggtatgtaagccaacagcacacacaa

SEQ ID NO: 13939 - DNA, 3588 bp, Heterodera glycines
  unsure (1)..(3588): unsure at all n locations
taaaaaatttaatttatagtaagtttaactgtaacctttgcaacaaaagcactttcgcaaacatttttaattgaataaaattagaaaaataaatttttagcgctgtaaaaaatttcaaaatctcggagcaaacccagtcagtctgctgtgtattacattcctacgtaattatgagaaaaatctaaacaatttaaaaatggcatatagttaggcacgatgaaagaataaattaaactttttttttggaaactttttggaaattttcaacactggtaccaaaaaaatcaatttataacgggcgccaaatagccgcgccagaaaagcccgcgccaaaaaagcaaaggccaaaaaaaccgcgccaaactgatccagacccactttggtttgatttggtattaccagtgaagaaagcaccttaatcgccaaaagtgcgcctttaattgcgcgcaaccaaagtgatatgggaaatttttgagttccgatcccggtttaataaaatacaaaacacaaaaaaaatatacaaaactctacttaataaattaatgaatattatgatattctgtaaggtagatccgggttttcttgtttgccggccgaagcctatgaatttcacattctcacatttatttcatttcgcatttaatttcccttttgcgtattgtcgcccctttcccgacgataattgatcgatcacattttatttttcacgtgtatttaatgttcgccatttcaagcgaagtatcttcagtctctccggaataaagccacttatcccagtgtgtccatcaaaggcgggatgggatccctgggcttgatcatcccatggggcctttccttcgggagtttatgagttccttcccaatgttccccatctccccatctgccctcccaaattgcccagtcccaacgccagcacgtccaccgcgcacggccgcgctactcaagcatccgtagacatctactcattttagagcactcttagcaatgatttttcaccgttttcacaaccttttcactgcctgagcaaatggttaatccaaacgtactaatcatcattaatcttctattttacttcgtcgttgatgattcacaattgcaaaagttcaatataattattttgatatttttccatctttataactttccttactagaatatttattatcatcatttgaaaagtttttaattattaaacaatcaatttataatcttacataaataggaggaagttttattttagttggaacggaatttgtaccgttttcagtgtccaattcaatttttcttcctttaagctgtatcttgggccttaggattttatttgcttactgaatatgccaatcaatgtccattcatccaattttcacatcttttataagacagactttgtctaccaaaaatgggcgttattcaaaaaccattttaataaaaataaattttacttataactttgctaaaaagcaaacatattaaaataaaatgattttatattttttaaataattaatatagtaaataaatatttgctcatcaaaatgttctatccgaatttttccatctttgccatggccattggaatgttcatttattttgccgttacctccaaaaacaacacaacaaatggtcattaaaattaaaaatccattgaaatttaaaattttaattatctctcataatttaagctttgatggcgccgacgaattgtgccgtcccatcgatggcactccgttccacgagcattgccggcactcggcggtggtcaaacataagggttttgtgccgcgccatttgcgttcgccatggcttaattcgccgctttttgacgacaatgaactgagcagcggagaaaacacgtgctacgcatgttataagggaacaaaagcgagcaatggcatggcaccgggggaagagtactgtgcttgtacggtaggcatttgatacggtaaaactgttaagctgtgccatcttttagtacaaaggtcaagtgccgaacgagaaattcggcattgtttttggcacattcaaccgaagtcggccgatttgtctgagggaattgcaaaaatttgcatttgtaaaaaataataaaaataataattgtatttaaattttattttttgtacagatgccaggctgcggtaacaaatattatgaccatgtgaagcattgtgccatggtatgccaatatcatataatttgtttatttatttatttttacaattttaggtcaatttctatgaaaatgaaccggacaaaaatcctaaagaagatcctccaaatgaacgtcgtaattaatgaatatttttgtgccaaatttttgttcccattttcggcactctcgcactttttgacggatgcatcaccggggcaagcaaaaactgtacggcaaatgtgaaaattgattacaatgagacttttcaattgtccaaatgctattggggagaaagtcgccaaacagcttttgagggcacgtaagtcgtaaaaacccagttttaattaccgtaaatactctaattatctcccccctccacgagtgggagatttttcgaaatcctcagaaaaacttttttatataaactttttataattaaagattttcgagttttatatcattgattacaggttgtccttaatcaaatcagttttttagggaaatgtaattcggagaaattgaaggttttgataattaagagattccttaagttgcaggggatgaacgttacatgattntagttcgaactacccgaaaaatttggagggcataccataattctggttaaaccaatttttttatttttacagtatccaaatcaaagcatccgttgatgggtacggtatgagtggcgcttcaccgttcacttttcccgtggtttttgaaaaccgacacttgctgggacccgattaattactacacttcaccttttttcgcgaatataacgatcacattgagtggcgagtaagtctataaaattgaaaaatgaagacattttaaagaatggaccttgactcggcaaatgatttgttttctgaactatgatcaggaatgaccagcagagtctctgatacataaaaaattttgaaaattcagtggacatggattaaggaaacgaatccataaaatggttttctcctgctgatccgagttcattttcaaaaaaaaaaatccagacaaacccataggtctttattggcaatttttgatgatggttttttaaatagatgcggcacagcaaaatacgagctaacgtggcttgacgctaatcgggttggttcaaattagagagaagaaaaaaaacactttttgaattctgagattaaaaaatccaacatttaattgaaaaataaattattttatcaagcaggcacaacttttttgtaaataaaaaatatacgaagcaaaaatttttacaaaaattattatgttgattaattgtaatttttccgggtcttttgggttgagaggcagggataaaaccgaataaggataccggagtcaattcaaatcactttaatcgcaacacaaaatttaaaagagaaagagaacaaacaatggaggatgaagtcaatcaaaaagaaaagatgagaagaataa

SEQ ID NO: 13940 - DNA, 4530 bp, Heterodera glycines
tttgataagcctcttgtgacccaacgggggtcaacggcttaatggtctgtattaaagggctcctgggtgtcccttttacagaaaatgataagactaagactctttcttaatctttattcaattcaattgcacaattacaatttaatgcaaatgcttggacagaaaactgtcccgacttaatgctgatcaagcagaagtgcttgtagaaatctcacaagatgaagtgaatcaagaagtgagaagcaagaagcaagaagtcaggaaaatggagaatgggccgggcttttataccctcacaaatcaatgggggcggggccaggcacgtgaaaaatgtgcacaaacaaatagaaaaaaatccataaaaatatgaggaagagagaagatgactcataattaacgagcgagcgaatgcaaaattgatcgatgaaaaggattaaaaaataaatgaaaatttccaagaaatttgtgtcgcttttggcgacattctccgggcctcgagggtggcggcaactgttgctgtcctccgccaaaattcttttcatcgtcggttcatctgaagtcgacgagccacccttggaggacgattctccaaacgtccatctggtagctgtgcttggtcaggtggaggaagatgcggttcctccaccactgcaggcgctctccaggcaactccgactcggtttcggatgttgaccaattcgaccaggtagaggtcgacgagcatccctccttcgtgagggctgaagcctacatattcttgtaggcaaggcatgaatgggtctatttcgtgacccattcgttggtaatgatccattaccgatctacctcggaagaggtagagattttccggtccataacatgtgaatccatcaaaatggatgtcacgaattggaccaacatgctctgaaaacaatgtggccccttcgcggagttctccacgaagtcgctcttcgacagcacggcggtcaagtgctgtctcgtaccatctgggttcatggtatcgctcaatccacgaactcagaggctcaatccggccatgaactcgacgttcacgccggagatgagcgtcattcgctctctcttcttcctcctcttccaatcttggatcgcgtagccggcgatcaacatgatcgggaaccaatggtaagactggctcccagtcttcctcaaaccatgggtcccggtggggattctcatcgccaaaaaggcgatcattgagaatctcggcattttcgggtatgacaacccggctagccgagaagtacggcccttctcttatgggaataggcattccgtggaaggatgatttgaagagtgtgtttgggtggcaaatccgccacccttttataccaccattcgatggaagcgatgaatcattccccacaacaagggatgactcacaaaattttttgactgccgagaggataggacgtgattcaacaccacatccgaaggatcctcccccggccaagtacagtattgccaatactataggcacattaccgtacccctttctcgttatagaccaggaaataaatttccaaagtctatagaaaggagaaagtttcatgaaaattgttaggcaaacaatgcctacacaaataatcattatgaagatgagtgatgattggaggccaatcaaagaccaaagggtcgccttccaatcaaaattccagttaggccaactggattggctgtttatcactctttcagagtgatttggactgtaatcttctatttgttcgggttggacatagtgtaatgtccccctgagaacaaaagaagtgtttccagccaaacactttgtttggcattttgtctcaattctggctttatcaaaagccaaaattgtttggtaaattgatgcattggaatcacattttgttgaaaaatgtgttccatcgtcgcaattaatttcggcaagagaattgccaaaatttgtcgagcacacataacggaattgtgctcccgttgaacatctgtaacacccagatatgttcaacggcaaaattgtgcaaaggctttggtgaagttccaaagccatttggagaccttctatttgaaggtttaattggacaggactaaatcctgtcaaggcaattacctttctcccagtatttctgagttggtaatttttgatgtttaatggaagtctcctctcaggactttccattaacttttcaaggttatgtgaacggcaattgcagttcactaaacctgatgaatggtcaggtatgcaatcagtgcatgcctgaacgccaagactgcaattgaaatcaattgcttcttgtcgacttttacagttaaagtcaattgttaatggctctctggttagagccatgttgctcccatcaaaaacaaaatctgagtttaagacgggggcgggcggaaaagttactccgatcggagtaaggctgatgttgttccatctcagggttcttcctggataaagaaacacctgagttgacttgggtttttcgcccaaagtttccaggcgaattattgtatagacaataaattcccaggaattacagcccatgatttcatagactgtcttggatttttttcgagcaaaccaacgataaaataggcaggcactgccgcctaagaggcatttgttgccccaaaaggctgtgctgtccaggcaaaatgaattgccaggataatcgttggcatcttttagctcaggaattgaagtattgtggcgaacttctccacaatactttccttcgcaggagcccattttagggcaccttttgccggccaacacattaattgcgtatgaacgcagccaggctttagtaaagctttggcattccaaagctaaagccttaagcacaacatttattgagccaaggagaacaccttcctctgttttcagaagaagagtgtttgtttggccaactggcagcaacgtcagcgttgccgagttttcgacaatgcatctcatgcttgtcgcatttttaatgcatttttccgatttggccattactgcgatggtctctgctccagtcaaatcctggagagagttagccataaggaccacaaacgccattgttctgtaaacacggcgtgatgtccaattttgagaagctgttgcccttggcctcctctctttcggagggcgatttgggccagctaaataaattattggcctgataaattgaattatcagccaaatgaccatataaagtcctgaaaacaggacttttaatatggaaaaagccacaaagcttatgctcatgaatgataagcaaagtccccctgctaacattgatgaaatcaatggataacaggttggattcgctaactgttcaatgcaaaaatagcattcgatgagttcacactcatcaactgctggacataaaatgtcttttttgaacatgtgtttcgaatccatccagaaatgaccttcgcatttgaagtcatttaggaggatctccttgggcagctcgtaagtgagcttctttacattctcatgaatgtaacagttctctgcacagcagagctcaactttattgatttcttttggatctttgctttaacgcctttgttaaagcaaagaagtttgcattcattgcaatgattggttggataagctcctaccaacgcaaacatagcaaaaaggatggaaagacagttcaaaactgtccccatctttgctttgctgcgagtgatcatgccatgccggttttggtcaattggttgatcaaccaattgaagagtttcagtctccttttcatccattggagcttccaaatgagagatttctttctcatttgttatttgaggagtttcatttgaactctcttcaaatttttcttcattttctataggattatctaatcctacttccaatgggaaaatcttattcaccggacgggtgataatgattttccgaggcatggttccatacctctttgattttatcccatgaattgggagttccaactgaacgcttctaatggcccctggtcggccattaagctcaatgatctttcccaaagaccattggtttcggggagtgaactcctcatgaatgaggacgatcattccctcctttggttctgttttgtcctgaagacggggactcttgtggtcccatttacctctctcccgcagaaggaggaggtattctttttgccacatttcccagaaaaattcatgggattctttagttgcctgaaaaagggcaactaatttttggtgggatgaaagatttcgatccgatggatcgaattcttcaccattcgtgtcccagttaatttggacttccggttgaaggaagtccactggacgaaggggcaggatttcatccatcccttctgacacagaagtaatagggcgatggtttaatgtggcttcaacttcagccacaaaagttatgagttgatcataactgaggacttttctccccaaagtccttttgaagcaatttttgcacaattggacaaggcgttcataaacgccacctgcccaagggctgatttgtggaaagaatcaccacttaattttattaagggcgtaaaa

SEQ ID NO: 13941 - DNA, 1365 bp, Heterodera glycines
tttttatgtaatcacatattttttcctggcttcttcatgctctaattagtaggaaaaacactttcttttttgtgtttgcgaacaaaaattggaacttttatttacatatttcgggttttttttacatatttgatacatgttttggactttttagcattttttctcaaaaacccaaaatgttgttgttgttgtttttaaattgtgccggtttttttagtgttggacaaatatttaaaaaataatttttcataaaatctcattaaaatatttctaaaaattttttctcggcaacgcctttccgcgcaccccctggtcccaaaaccgttcgaaaattttaaaacttgacccaaaaataatttttttttttttttgaaaaatgaataaatttacttttttatataaatattttcttgcttctgcatattttttacatcaaaaattgtaggtttttgtgagcatataaaacattttacgcctttgagaattagaaatttcaaaaatcaaaaaattaatgcaatttttggtgccaatttttgttgtttcctataaattcacacactcacccattattttctaattacgcccctggattagcaattcatcattaatgattgtttaatgattatttttcaccgttaatcgatcccaaaaaaatccctcacaattttgttaatgcgaatgtttctggttatgattgctacataaaattgcttcgtcagcatgtacccagtcaattcctgcttttattttaatgtttctttaataaaaatctgaggattagacaaatcattggcatttttttttgtaatttttcgtgataaaaaacctcccttttttgttaaaattattttttatttttaacgtattaaaaaaaattaaaaaaatcattatttttaactatttaattttttgttaaaataaatattttggtttattattttaaatcaaaaattaaaaaccaatctatgtattaaattaatttctcacgaaaataaaaaaaattgcttttaataaagaaataaaaaaatgaaaaaaattttttaaaattttttgtattttaatttcatttaaatatattaattaattatttatttaaattattccattagattttaaatcaaagcattaacctgacattttttcatctcttttttaccaatttttaatgatgtttagccgaaaataaatagtaaatgaatacaaccaccgctgtcacactaaattgcttttcttaagttacattttttggcttcccaatgtctcccatgtggtctagtggttaggaatttgtggttttcaccccacacggccccgggtcgattcccggcatgggaaagaaatttttttcaaaaattaaaattttaa

SEQ ID NO: 13942 - DNA, 3721 bp, Heterodera glycines
  unsure (1)..(3721): unsure at all n locations
ttttttcaaatatttaatatattttatttattatttttaaattaattatattccanaataaacaaatataaaatatatttaaaatnctttatccatctcccatntaatctaatnnttaanatttntnnttttcacccacaccacccnanttctattccccacataaaaananattttttttcaaatatttaatatattttatttattatttttaaattaattatattcnacaataaacaaatataaaatnaatttaaaatnctttatccatctcccatgtggtctagtggttaggatttgtggttttcacccacacggcccgggttcgattcccggcatgggaagagatttttttcaaatatttaatatattttatttattatttttaaattaattatattcgagaataaagaaatataaaatggatttaaaatgctttatccatctcccatgtggtctagtggttaggatttgtggttttcacccacacggcccgggttcgattcccggcatgggaagagattttttcaaaaaaaattaatttaattttttttataaagctaatttcaatttttattttggcattaagatcttagtaaaataattttaaaataaaacttaaccatatataaaagtaaatctcaaagaatttttcaaaaccttaggccaaaaattcaaaaaaattcctctacccctccaacatttttaattaaattaaaaattattttatatttgaaatctttggcgaaaaaattcctcgacaccaccagcattttaaattctattaaaaattattttacatttaaaatctttgtcaaaaaaaaatttaaaaaattcctcgacaccaccaacatttttcattataataaaaattagttttagcgtatttattatttcgatattattatttaatttcatatatcaaaaatattttcccacatacatactgatgatgatgcaattttttgttttgcctttttactccgtaatgagggtgaatgaatgaatgttttgtttgtttgtgcaaaataacaacaattcccatccgtccgtcaaaacaggttttatgtaacacaattttcgtgtgccaatttcgcctcattctccgctttatagtgcacacataaatcgaaaacaaacaacaatttaacgaacaaaagaaaaacagtggaaaacggacggacggacaaatggacgacggacaaatggcggaaaatttgtgggacaaaacaattttttttaatgttaaaacacaaaatgccaacaacaacaatgtttcgaaagtgtattgatgttgatattgttaaataagaaaagaataaaaattattaaattattatttttttgtaaaatcggacaaaaagcgaaccaaaaaaatcagtttttttcaagtgccatcggcctcgtgctgggacgtttcctaaattccgccatggagtaattgaaaatcaaaaataaaaatcataaaattgcttttatgccatagaaatgacggaaataaaaaaaactatttaaaaaggaccgttcaaacttttaaaataacggaaccataagcttatttttgtcaatgcacctgatttgttcctcatttttcagcttggctgctccatcaacaaaaagcctaagggcacgactattaattgatggcctgagggggtaattaattaattggaaaactgtagtaatttacagtacaggacagggaggcgcaaattttgtgcccaaattgtaaacacaaaattgttgtttttgttcagcgaacccaaaattgccagcacactgtgtgagtgtgtgggcggggagaaaatcgagaaatacctcacattaaaatggtatttgtaatttgatttgattttgatcgacgggtgtttttggggtgatctgataggctgattgataaatatggacaaaggaccgattgatcaaaatttgattgatcacccaaatcacaaaattgtacaacagagaaggggggcatcttgctaccgcccaaacttttgtcaacaaactctcatacattcttgatcaacttgatcaattgatcaaacgacgtaataccatttcccgaaccggctgaaaatttttttttgttttttgctataaaagtgggccgaaccgacgaaaaaaatcattccataaaacggatcgccaaaaacaaaaaccaacaaatccctcaaaaaacaaaaatgtctcctttccgcttcctgatgatgttgctggttgcgctggtcgctgccatggccatgggcagtggtgttgaggccgctgcgccagccaaaggaaaagcgccggcggcagcagcaaaagctgctccggccaagggagccaagaagccctaggcaggcaccagcagcaggtagggaggcgtgggtaagggatttacatttttggactcaacgagaatttcgaattttccccagaatttattttgaatcgtaaaacgaaatcgcactaaaatccttgaaaatttcggctccaattaaatagtttttctaattattactgggtttaagggctgttcgagagtcggattttttctccaaaaatttaagtcgaactcaaaaaagagaccaccaaaaaaaaccaaatttgtcggttcgagaattgaaaaagctcggcaacctaggcattcgctaactgttactatgctctggagtccccatgaattattgcttccgcatttttggtcactcacgaatacagtaaccatactggtcaaaaagagagataataaccgtatgggaaagattttccgtttgagaaatttcgtttttttttaatctttatttctaatttaggtgtagcagaacaactgcggacatgtgtgaagaatgatttagaatagatgaatgttgatgaaaaattcggtgattgttttttagaaagaacaaaggcattggaaattttttgggttttgcggaagtaaagaattcattcaaattcggattgattaattttgaaaataattaaggaattaattaaaaaataaaatttaaataaaaaataataatgaaaatcaacaaaaaaaaaataataataatgaaaaatcaacaaaaaataaaatttaaaatttgattataaatttataaaattgaatttttattcaaaaaattcaaaaaattaaatttaaaaaattaaaaatttcaaacaaattaaaaatgaattatttacaaaccttttaactcctttaatataatttaaattcgttgaaaattaaatttaatgatttttatcgaaaattttttaatctatcaaactaaaaataataaatcatttgttcgatgcaataaattcctgtgggatgtgttccttggcttccttcactttgccggctttcttcaaaagctcatatttttcgccagaaccaagcatcatatgagccggacagaaccacaaagggcctaattaatcaaatcaaaatttaaaaaaataatatttattaaataaaaaaattaaatggaaaataaatttgacggaataaattttttaaaatgtgaaggtcggcccgactcaaactcgatctctgacctcgataatttaggacgacgattttctgatacggacaatctaagccaggatgtcacacatccgttctgtctttttttttcaagggttgtcctttttttgaaatttcaatgcaacctctgttcatagccctcaaaattttccagttttcccgtccaataatacgttttttcccccggtaaatttggacaattta

SEQ ID NO: 13943 - DNA, 1695 bp, Heterodera glycines
  unsure (1)..(1695): unsure at all n locations
atgttacaggtgaaaagaganatcgggcgaaaccgttttctgggacgtatcttcaattaacaaagaacggaatggcatttgcgataagttattgctctatgtttcaccgcttttcaggcttcgcttcgttgtttggcacagcacggacgctttttggaaattggaaaggtcgacttggcacaaaactcggccttgggcatgtcgctattcttgaaaaacgttactttccacggcattctgttggatgccatcatggaccaatcggtgggcgacatggaggactggatggagtgcgcaaggctctttgagcagggcatccaccggggggtggtacgaccactcgacgccaccgtattcccttctgacaaatgcgaggaggcattccggtaagaggagccgttccgccgccggcgacacaatcaaaaattttaattgacctctttttctaaggtttatgtcggccggcaaacacaaaggcaaagtgctgatccaaatccgcgaggaggaacaacaactgttgtgcgcgccgtctccgatgcgcgtgagggccgtgtgcaggacactgtgcaatccagaacatgtttatctgatcactggggggctgggcgggttcggattggaattggcgcagtggctgatcaacaggggcgcgcgtaagctcgtgctcacctctcgatcgggaattcggactggtgagtacctttgggaagactttcaccacaactaaagccccccccccttaggctatcagtcgcgatgtgttcacttttggcgacgtatgaaagtgtcagtcgcggtcagcacacttaacatagccaaaaaagtgaggagggaaagggtttttgtcggcactcactgatcactcaccgccacaggaggacgcggtcgagctggtcagaagttgtcttgagattgggccgttgggcggagtgtttcacttggccatggtgctaagggactgtctgttcgagaatcagaaccagcaaaacttcaaagacgcggcggaggcgaagtatttcggcacgattagtcttgacgaggcgacgcgcaaaggctgcgagcagttacgatggttcgtcgtgttctcctccatcacttcgggacgaggaaatgccggacagaccaattacgggtggtccaactcgacaatggtcagtcatgggaaaggatttggctttcgctagagtgccattggcgtcgaaagtgtcgagaagactcgttttttgagtggcattgtgttgtaccctttcacctcctcccttttaaggagcgaatcatcgaacagcgccgtgcggatggtttccccggcattgccatccaatggggcgccatcggagacgtgggcgtaatccttgagaacatgggcgacaataacactgtggtgggcgggacactgccgcagagaatgccgagctgtttggggtctttggacctgtttctctcgtggaaccatcctattgtttcgaggcaaaacgcgggcaaagcggcgaatgacttactctttctgcttgttcagttacatcaaagcggacaccagtggaaagaagcagtcgggcggcggcaatttgttgcagacgatcgcccacattttgggtgtcaacgacgtctctcagctgaacccggacgccaatttgggcgatttgggcctggactcgctgatgggtgtggaaataaacaggcactggaacgcgacta

SEQ ID NO: 13944 - DNA, 2203 bp, Heterodera glycines
  unsure (1)..(2203): unsure at all n locations
aaatttgggggtcggggaccccgatcgggtagtgatcaactaaattttttaacaaaaaaaaaccatttttttaaatgctcgaaatcttccttttttcactttaaatctcaggttccggtcccggtagggcaaccgagaaccgggaaaaacaagcactggtaagaatggtggtcggagtgtacaattagtgatgaaaattggaattaaaggaaaaaattaaaaaaaaataataatatactttaaaagtaacgcacacaagtatgaaaatggtctagaggctggtcttcttgattttctacttctttcccattgttcaatccctatacagaaattaaaatattttgaattttctttttgtatattcattggtttcctatcgacaaaatatttttttgaatgatttttaaaaaaattctttttatttggacaattttaatttcaattttttcctcatttttttgaatgacacaaattgtatcattttttaaagaaaatccatacaaattgagcctagtaatctcaaaaaccagtcttttttgttgaaaatctgtcaaaatttccctcggcggcgcctatcggcaccgccggacgctaaaaatcctttattttctttaaaattagctcaaaatcaccaaaattggggcaatttttagacaaaatctgttaacaaattgcattaaatttccaaaattttccccggcggcaactttttggaaacttgaggtggggggatgtggtccggcggtgccgatagttccgggaaattttttgaaaatgagtatgatttgttaagagaattttgtccaaaaattgtccaaattttgtgattttcgagccaatttttaggaaaaatttggagttttggggggccggcggtgccgataggcgccgccgaaaagtttttcgaaatttttaattaattttattaagaaaattgttcaaaatttcaaaaattttcaagagtccccaatcccccgaattagtgtcgggggggnnggggggggtcggagggcgggcaaaaagtcgggagccggggacctcggggggcgacatgtcgggggtcgggaataggtccaaaaaacgtctagggtcggggcggggggctcggggtcggggagcaaccctacttttaacattaaaaaaaaaattttttttttaataaaaatatttattaaaaaatgaaaaatttgccgaaattctggatttttttttgaaaatttccaaaaatttacgtaaaaaatcctcaaaatatgtaaaaaaaaatgaaaataagtaagaaaaagttcaaaatatgtaccaaatatgtataaaatcccgaaatatgtaaaatatgtataaaccccgaaatatgtaaataaaagtcccaacttttgttcacaaacacaaaaaggaaagtgtttttcctactatttagagcatggagaagtgtttaaatatgaacacaaatatttttaacgcttagtttaattattagggatgggttttttattttttaaaatattttttctgcagcttatttgttagttatggcgagcgaagcccaaaaatagcattttctccgaataatttttgattcttattaaaacataaaaacacatattttggcgttttggcacataaaaacatgtcgcaaatatttagaggtttggcacatactttggcattttttagaaaaatctgtaagaaaaaatgcaagaaaactgaaaaatacacccctaaaatgtaactttcttgccactgcttataacatttttcaaaatttatttctttatttcgaatgccaaaagtaatttgttcttcaggaaatgacagataaatgacatataaaactgagcaaattcaaaactttcaacaatttttgcaaaaaaaagaaaaacaatggactaaggtgtgttttaatttctatgcaccctccaaatagataaaattcttacaaattcagcgttcaacataatgttttttacggtttttaactaactgtctgtttttttaatatttctgcccgttgaaaagagggttgggcgtaagggtcaccctcgtttgggcgccagccttagtttttggactataacttttttcgctgttaaccaaattcagcattcttggtatcattcgatagcttaacatgtttgaagctatttctaagctattgtttcgcgattagacatttgccaaaaaatttataacatgaaattgcaaaaaa

SEQ ID NO: 13945 - DNA, 2496 bp, Heterodera glycines
ccatcgccatttcgtcacaccggccgtgcttttcatcgctctaatcgtacgccgactcatcacccgtatgcgaatcccgtcgaccgacaccagccccagccttttcggatgccgaatcagcaaggcccgagccgccgacagttccagcgctgaggacatcgcttgtcggagggcgaggatgtcgtaattaataatgacctcattttatttttgattttatgatatttttggcattttgttttaatgtttgtgatttcgtttttgttttcttttttttgtcctcagactttaatttggaattgcctgacataaaataataaggctttattctgtgtgcttcaattgtgtgtaagtgctgaactgttcgacgtgctgctgagtaaaattaaattatttgtacgggtattcccaaaaagtttatccttaggcgtgtatttttctctttttttgcatttttcttatgaaaattaccaaaaaatggccgaaatatgctctaaaagcgcaaaaatggcaaaatatgcttttattctcgtaaccccccaaaatatgcatttatatgcactaaaaccttcaccaaatcaaaaaattttaatgcagaaatgatatttttgagcccctttcttcatagcatatgctcagaaaaaaatgcaaaatcatagaatttgtagcccccctacaaatgatatgacattcagaatttaaaaaaaatcacaaattcgaaattggaggagcaaatttcttttcccatttgtgcaaagttggaattccaattaaaaattaattaagaaaaattaattagtttaataaattattaggcataaaagaatatttttaaaactcggaataaaaccccaaaatctgcgctttactaaataattatctaacaaatttgtgttgaattcgagattttttgggtgagaaaaatagattttttgttaaaaataacagagcacaaattgttaattgcgttaattaaggttttttctttttgggtcaaatgctgaaagcatgtttttttgttgatttattttctaagcaataattcaagaaaattctcatttttccacaaaattgctcgttgtcagtttgattgaactgtccgtgactggccgatggacaattatctgactatagtataaaaatgaaatgcttaacagatctcatgaccatattttcaactatgaattttaaataaagcctaagcataggccttggcccaagcaagcttaagcctaaagctagccttggccttttagctggagctgaatgggatacgtttccatataaatatttccatatttttctataattttagtgcatttttagttttagtccatttgtaattgaaacttaaaatataaaaaattcaaagtaatctggctaatgatcttatccactattaactaaagttaaattagtttttattcgaaatcttttataagaaacatgtatttaagttttgcactttttgtcccttgacatagcactgaattgtcatgagcaccggcagagcaaatgccgaggaaaagtagtgggagtttttttgcacctttttgtcaatattaatttgacaaaaacaaattaatttaatttttattacggtatcactatcactgagggattaaaactaacggcgaaatttgaacagattgtcacccacacaaacaaaggaataaaatgataagaacaaaaattatttttgaaaataaaataaactatttttgcatttttttcattacccggttggaaaaccttggacccggacccggtttttcttgatccggtattatccgaaccctgtttccaaatacctgaacccgtctaaccagcatactttcaatgccaattaaatttgccaacgataaaaattattttaaatttattgaaaacagtgcttgaaaattaaactttccgagcggaattggcacacagcgtgggtgccaccacacagcaacaactcgtgaaagcagaagtaaggctcaggcttattgttgctttgattttcaaagcaccaaagggtaaggatacaccaaacattcatcatattcataaaaatggttatttttctcaaaagatttctaaaaatttaaaaattagtttattttttcttttacatgaaattgaaattattcaatccaatcggaaaaatttaccgattttcaaggatattcttaaatgattaattaaattattataacaaaaaagtttaaaataaaaaattttcggcataaaaataaatttttaaaactctgatattaaatatttgaaaatttaaattttgctttttgtatttatattcaaatcattaaccaattcaattaatgggaattttaatttacataaatggttcaaagcgcattatcagttcgcatttagcaaaggcatattttcaaagaaagcctttcaatctgaacaatgaagacaaatgaaattgaaatgaaatgcaattagaaataataaaaactcgaaatctgcactttcctaaataattatcta

SEQ ID NO: 13946 - DNA, 2166 bp, Heterodera glycines
tctagagtctttttataactaaatgaaatttaagcaaatttatttaaaaaaatatccgaaagaaaaacatataataaagaaagattagttgcataaattgattaaatgaataatgactaagctaataagatcaaaacttgaatgaaaaaaaatttacaataaaagacaaatgaaattaaaaacgtaaaataattctgaatataataaataaaaaataataattaaaataggatataaatgattgggggatttggatttgattatggcggactcgggatttgattatggcggactcgggatttgattatggcggacagggatttgattatggctgactcgggatttgattatggcggactcgggatttgattatggcggactcgggatttggttatggcggacagggatttgattatggctgactcgggatttgattatggcggactcgggatttgattatggcggactcgggatttgattatggcggactcgggatttggttatggcggatttggatttgattatggctttggtgacttggatttgttgtcccttttcttcattcttcttaagcttcaggggaacggaattgcatcatgaatcagttgtggcatttggcgacactgaaaacgaatttaaaatatatgtttattatttatttttattttaatcgctaattttggttattttatatgcaaagctaatttccaattttaaaatgactaatttaaaattttaacattgattttttaaatgaatttaaattcaccatcagcagaggaattcactccaacactcttctccatctgaccattttcgggcttctcctacataagtaaatgttttgaataaaaaaatgaatgtttttttaacattattattttaacaatttcttaattttttaaaatgaggctttcaaggaaaaagtcaaattaaaattatacctcatccagccccgcctttagtgggggaaagaggaggaatcactcccgaaataaaaattaaaaattttcaaaaaaaaaattcaattttcttaataaattagttataagcgccgccggtgaaataatcgggaactgtcggcggagattaaaattactgtaaattgaacagaatttccagccggcaaaaaaacattggcaattgtggttaacaaatgaattaattatgtttatataattaattttctaattgaaaaccaaccaattcatcatcggctggaatttgtttgaaggtcttcttctgctttttgcaggctttttcctttaaatggaaaagagtaaattttgaaaaagaaagattttgagaaaattctaacgatttactactgctgtttcgttaaatatgttttaagccaatcaataaatcttgtttcttgtttgtttataagtgagatttaatagagaaatttgagaaaaatttacctgcattttctcgtatccctccgatggtacaaaaacatatgttgtgttgaaggggcaattattatcgggcttgggtgggcttttcttaaaaagtttttttgattgtttaattttaatttatttttaaattagttattattttcgcaaaccactcaaatggaaaaaagtgaaatttttaaaataatataatatcaattaaatacattccagcaaatgcgattttccgcatcacaatctgcttgcttgttgcctgccacacgttgagtagcagctaaaatagaagaaagtaattaaactgactgataaaatttcgtttcatttttacataaatattattgtgcataattatatataaaacttactcataatgctttgcttcgcacttgcgtgcctcattttcataagctaaattataacagaaagtttatgaattagtattacaaaaattctttgatctttttgactaagaaatattaatttaatttttttaaaataaagacccgaatgtgaaaaatttactttttaataataaatatccatttgaaattgtgctttaaaaagtggtattttttgtccaaatgcccttttttaacctgatgaaatttgtgcagtgcaaattaatttgctaacctttgcattgacagatgtatccctaaattttgataaactttttaaataattaaggtgtgaaaataagagaccgcttttgcaagcgatagtgttattaacatgccttaaacta

SEQ ID NO: 13947 - DNA, 3564 bp, Heterodera glycines
ttatttttgcataattaattcataaatatttttttcagaccttgctctgaaacgcaccaaattttatttacatgctagtttaggcactctgatgctttttctatcaaaaagggagatgaataaatttttaaaaatttttaattcctttttaaacaggccaaaaagtttaggcttaacttttttttcagaaacttatcagaagcgccccaaactttgcagggatactgaaaggaaaagaattaacctgttttatcacattagcttgtcatcagtttttataaaaaattttcaaaattctgagtctcctattattttatttttttttcaaaattttgaagggcgggggggggggggaaaatccaaaagtgataaatttacaaattcttttttttttgtacatttttttggtaaaaatgatgctttttctattactcacaacaatgacaaggattgacaggggttacagtatcctcgtaactaattttcccatgccgaaacgtcaagaactgtccttgcttgccttcaaggacgaacagcgcatggtcgaacgggttgcctactgtataaagcccatcggcggccaatcagcgctcgacacgcacgcgtgcttgctcaggcccgccccttttccactcaataaatactcgcgagcgtgtcctgactccgcccacattccaccatataaataccctgtcaattcaagcaaaacttcttttccgtcttcatttttaaaatttcttcctttcattcccttcatttatattacttaggaaatttctttcttttttttgaaattcatttcgaaattcgggttatttaaatttatatggctcccgagaaatgcattaatgaatatataatattgtaaagtacaatagggtggtaagttactatattttgtctgagaattcagtaccaaatcaccaggaaagtagcattaacttaccaataatttcagtcgatgattttttttcaaacaaattggctgccgtttttttttgaacaaacgactcgaaatgccgtaactctgttcggctaccgtatcaccccgacgccgtttcgcagactcagtttactgtatttttgttgcatcgctaccaaaggctaattctgatcactccccatatgtcgaggagatttattcgtttgaagttacgaaggacggcacttttgcgtcatttggaaaagccgacatgttccggtgtgagctgcttgcgcggattggatacaggtggaaaaactaattttttaggcccgataccccaactcggtattttcccaaattgtgttaagaaaagaaaaacaatcacaatttaaaattagaataaaaaaaagtcgaaattaataagaaattgaaaatttaaaaaatactcccgaagttttctaggataaaatagcaaaaaaaaaaacaaaaaaaaaattgaacacatttttgggaaccaaatgacactaataaatttccaatacccatttggggggtggtcctatatgaaattttctgcatttttgtattaaatgataaacccaaattagttttattggttgacaaagttttctggatatttttattaggcaattaattttcttactacacagctcaatttgttcaatacaattgaatgaagtgaaaaatgcttaaaatatttgttgcctgttcggatgaatccattcataatgagagatataatttggcgaaagggcataaattaaccaaaaaataagtaaaaagctatttccttttgaaaatactgatcattaacgtaactgctctcactgacaaaatttcccagagagccataaaatgcttcatcggcataattacccattgccattgccaactctatcccttttatcatttcgttttgttccatatgctaatacatatttccttgatttaaaaaaaatatttagcaatttgctttaaatttgaaatatttcagaaataatactttaataattactatttaaccgagttcgaactccatctttactcaccggctcatcactcaagttagtgttcggtaaagtgcttcaatgacaattataattaaaattagcacaaagttattattaattaaagcaaaaacaaatatttaattttggagccaaagctcgtttattccctatgaactacacataattttttaaataagaaaatgataaaagtaattaaatttaaacactttcagaattctctgttgaaatgaattcaaaaactgctgaaaaccaaaaggttttgatttttttacacgcattttactaagagagtttagccttcgtcgctgataatgcgtttacatccttgtgcgaaatccggcggctacaaaattgttcaatcggtaaatttatttacagttaattgtttaaaatttttttaggtaaatgggcggccgaatggcaagagcaagaaaataaataggccgaaaaggaatgcaattggaaaagaaaatatcgagccaaatggagacacaaatcggtaaaaaacaaaatgaataaatttattacggaactacttataatatataaggcattattatttaaaaaataaagcaaaatataaggcataattagttaataaatgactaagatagaatatttaattgtttaaacaaaggagttcaagccgcaatgtgcttaaaaattaaacatattcatgcgaatatgtttagatatttacgaccacgtcctttcagtgaaattttgattgaaaagtttagacgatcgtaaatgatcaaaaattgtggcttcttgtagcctttttatgggcttaggatagtatcatccaaatttgcttgacatcgaattagacataaaccatggaatagaaattgaaacccgacgaagctgctttactatactatgacaaaatatttgtcttaaagcagtttctatttctgatattccgaaggtcttacaccgacatcatggcaaggtcgatcttgaaagagttttggtacgctgcaaaccgtgacaaaaatgcaattatcaatggttggacgacggcacgggcgttggttgaccaattcctcatgatgtatccaccgtgcgctgaaataggaaccaaggagccacaaatgcgcaaactgttgttggggtttgcagtacgaatttttctgggtgccaagctaaccaagaaaatgccgcgttgccattttttggaaattgattaaaataatgtaatattttatttttatgtcagttaatcagggctgtcatgtatatatttatcagcgtttttccttcttttaaagggggcaaatttgatgatttttgctcgcgcttttcaataacatttaaaaaatgatcataaggtctggtctaaaaaaaatttcatatgggagccttgcatttatttaatctttgtgtcggttttgctttgttacaaaatttacatacatatttttgaaaacataaacttttgaattcagctcaattggttaaatgaattaaggtatatgaagaaatgggtggaaatgttgtcttttataccaagcactttcctcccaccacctaattttccctcattcgttgacacaccggctcacaatgctattggtcatatac

SEQ ID NO: 13948 - DNA, 660 bp, Heterodera glycines
agggaacatgcggccatttttaaattcagccctctttctgattcaggcctttattggcacttattcaccgtgttgtggaatttcttgtacggagtggccctctttttgaggcaattttgatggccagagaacgtcaaaacccaatgtatcggtaatgtctttttttttaccaaaaagatggcaaaaaacaattgtcggttctttagttttctgttcgataatcatcaccctacccatgtctactaccgatggcgtctttacacaattttacaaggcgatgaccgtcaaaaatggcggctggagaagttcaaaatgtttgaaggagggagttggtggcaggttgtagtaacataactttccttatgagacacatatttacagccaccaccgcactcgctttttgagcagggaatgccgccacaactgtacgacacggcgtatgtgccaaagagacgtcgtgacaaaccctatgaaaagagggttggcacctttgtgtttccattggacatcatagaaccttgcaggtcattgctccccgacgccgttcacgcagacggagtgacgggccgagcagtgaagaagaggaaaaccgaagagtggaccgaaggcggagtcgcatggaaagagagagggaacgagagcaaaagcgaaaggaaatgt

SEQ ID NO: 13949 - DNA, 1432 bp, Heterodera glycines
taaagattaatgactaaaattttcgagtaaaacccaaattaactaatttcagattgctcgtatatatctcatctcggatattttggccaattgtgctgcacggataaaggatgccttttacttccgccaacattttggcgaatatcttttgaaaatttttgttgaactgaatgagactctcgaaggcatcgaaagtcgtcttaaggcggagcaggtcataactattgctggatcatttttctattcggcatgactcagtttcggcaaagggtgatgctttgctttcgcaattgggaggacaatgccgtgtacccgaccgacctgctcatacaatgccaaaatgtatttctcggacttgtgaaggttatttctttacgtggtaactaaaaaccaaatcaaaaaatagcatggagaagaggaagttgtggacacttcatcaatcgacggggaaccattggcctcagaaggcggcgatgaaatggacatcgatggagagccaatggcggacactggcaaaaaatacaatccgtcggaagaaaacatagggatatttgcaggacgagaagacattgatggcataccgatggacggagcggaggaagccgcagcggaggaggacatcgacggagtgccgatggaggagggcgaagcggcgatgtccaaaagcgaggcaaccaaagtgaatttggagagcgacgatcgcttcactgttcgatcgtggaacacagtaacgcattttctttgtcaaagataattcaacgttattttaaggttgaaattgaagcgggcactactgctgatacaaatttagccgttggtggagagattggcagcggttcggacgtaaagtcaaagtgggagtccatcgacctgcacagtcgctgggaacgccacgagggagtggcacgcgaatttgtgcagcagcagcagcgggaagatgaagacggggagaactcgccgagaaggaagagacacaggtggaagagcaaaacattgttttgaattatatatgcactctttgaagactgtctcgtttgtctcccgacgacgagcattcaaagccaaatggagcaacagctgctgattctgtcacgtcatcagctgtctcaactgatgacgaggatcgccgaaggattttgcgtgaaattgaagtcaatgggtggaaaatcggcgaaatttaatgactcttgttaaggtgaaagtgatgaagctgcaggaccaattggagacggagggcgaaatgccatcctcagagattaacgcggaattggcaaaataccgacaacgacttatggcgaaattggacgaaaagacaacaaaaaccaaaggagaacggaaaaaggcaactgaacagaaggaaaacggtggaaaagggcgggaaaaggagagaaggcatgacgagaaagacagagaccacgacagaggaagagag

SEQ ID NO: 13950 - DNA, 1490 bp, Heterodera glycines
cgttggcaaagtgttttcgcttaaccattcattcttcattgttgtcaacacctgctgcctgcttctaaaggctgaagaacaatgggcggtcgaaaagggcggagggattcgaatttaaatggcatttaaaaataatgccaaatgaatcgttaaggctgtgtgttaatttgattcggtcggcttcatcctctttctctatctctcatcatttgaacatttcgacaccggcggggatggcactgatcggcaaaatttctttggtgcctctatttcgaaaaaatttccaaaaaggggagattttgttaaaggttgccaaacagattaattttatttccaacatattttacagcaaaaaaatgaaaaaaaattctaactttatgttaatttattaattttttttctaattgctttctctcccctaatttttttttcatatatttttattgctttttcatttcctctccgcttatcacccattgcttttcctttcaaatgccattctgagcgtctttttggccaaacttttgccaactttggcactccctgccaatcaaagtgccattgtctctaaagaaatcagcgccttatatcaaatttcagcgccattcctttggtttgtcaatgcgatgaaaaatgatcaaaaaagacgaatgaattcccatttcaaaaggccgcaattcaaccgaatgctttcccccccccccccccccgcttttcgtcccattatttcttttccccctttttatctcccattttatcgtccattttgtccgcttcctgtcgatattgtctctatctgcttacttttaacttcgtttatgcttgtttctatgtttttcataatgcttttccaatttcatttcacccctcctttcgctccccaaagtgccaatttgcccccccccctctcttctctttcttctctctctctccactctttcccctctctctcactctctctctccctctctctcttctctctctttcttttcgtccgtactttcattttcctctttcatcctctccttttaccccattcaatcatcttccacctgtttttacttcagtatataagtgccttttttgtctgtccgctctctttgttttccactgtctttcaccccaaaagtgccacttttgttttcgccataaaaaacaaaagtcactaatttgcgagtaaaaggagtcaaaagtaaaaaaggagaaagctttttttctcgactttcttttccttttggactcaattcattttttgaagaacactcacaaccaaatgaccaaataggctttcactttattaaaacacacaaaacaaaataaaacaaagtcggaagacgaggtgggaaccaaacaatcaatcaaatccaaaaattattgagaaacagcaaaacatgacaaaacctttaaggagggagaagaagtgccataaatgtgaatgaataaaacaaatatcaataaaaggttcaaaatgccaaacaattacgcactaa

SEQ ID NO: 13951 - DNA, 2397 bp, Heterodera glycines
tttttttttttttttggtgggggggggggggtttttttttttttttttttttttttttttcccccccccccaaaaaaaaaaaaaatagtgggtgggggggggaaaaaaaaatttttatttacaaaaaaaaattttccgccaaaaaaaattttggaaaaaatttctcctttttgggggggggggggggggggaaaaaaatttttttttttgaaggttttaaaaaaagggtttgggccaaattttttttttaacaaaggggggttaaccgtaatccccaaaagtttcaattgggggggaaaaccccctttggccccaaaaaatgggggggggcccccccaatttgggcggggtatttggcccatcatttttcccgggcccaaaacattttccaggcctggatttccaattgattgcccatcttttcggcccaatcccatcaataaactccctggatttgattcagggggcgggggattaggtaggcaataattcccgcagtgttcaaaattactgacacccaaattcgaaattgtttgacaaaaatctttcgtttgtctctcccaaaccatttcctctcacatttctgttgttcacgcttgaactagaactcacaaccggtgcattcatcgccgttcgctcgttttgttcaatttcatccaccacaatcaccactgagttgccggtgttccttgtcgctggcaacaatctgtttctcaattgctgctcaccgccaaaattttcttgccgtgttagtggtggcgttctcacaaacattcccgtttaaccgtcttggttcaattccaaaatcaattagacaatcttctcagtctctgagcaactttggacaaatttcaacaatttaaaaatttcggcactatctcagtctttgagcaaaatttttatgcaatttctcaatctttgagcgatttgcaatgccgtctgctgcgtttattcccggtcttcgggctctaacaacgccgcagatatgaaagtcgaagtcgaaaaacaaaagccaaatttggtctcctaccaaatttaaaattcaagaaaacctgcagtgagcttacccaaaacgtcaggagcgccacgtaatattattttggtccaccgcacttgaagaacactcacaaccaaatgaccaaataggctttcactttattaaaacacacaaaacaaaataaaacaaagtcggaagacgaggtgggaaccaaacaatcaatcaaatccaaaattattgagaacagcaaaacatgacaaaactttaaggagggagaagaagtgcataaaatgtgaatgaataaaacaaatatcaataaaaggtcaaaatgccaaacaattacgcactaatttaaataatatcacagccccggccgctgacgagaggcgtccctgccgatcagctgcacatcccgcatccggctgtcgaaaggtgaggtccgtttgggatcagctcactgccattgcaccgaagtccgcgcatcattggttgtcgatcagcagaagtcgaagttgaatccggacacgaggcggtcaactcgacccaaccccgatcaaatggcaaagtttcacggctcatctggtccgcttccgctctcattggccagaaaacacattttcgtcgaaacgaattcaaatttttgccattttccccaaaattcgattgagatccgccactggagacatttagtctgactttttcttgctgattctttctgtccaaattcatcctttttctcttcaactcctccccaccttccaaaatttcaattgtccctaattgaacttccgattttttgccaagaaaaattcgtccacatttttccgaattttcaccaccaccctttctcacttcaaaattctttcccagttgttcctttgggctgaactttttgtgccctttctcatcacaatttctgataatttggttctccacattgggcgggatgttctttggtgtccattcaaccttcttccacttttgacgaaaacttggccgatggccgcttttggtggcacaaaattccgacgtccgtttgctttccacttcacttttggtgcccgaatttgtgaaaattgccgtagcgttactcttaaatttcatttgctgggccgagtgaaccaaatttttgttacgagatggtatggtcgcatgataaatgacgtgcacagaattgcgttccacattattaacttccgaaaaactgaccaattcttcatattgcctcgtggaaaagtttaaaacttagtccgagacaatggatttgtcccaataacaaattcgtagccccaaagatgcgtgtgagacgtgaaaaagaatccacacaattttgattctcctgacaattgcgacccacgcaattcccaataccctcaactgcatttccattcatgtcgatc

SEQ ID NO: 13952 - DNA, 907 bp, Heterodera glycines
tcgcaaagtcagaaaaatcattcagccgaaatgaaaccaatggaaatatgcagcagaaaatataattagagaaacaacaaaaacaatcaaataaaataattaagatgcccggaggcgaagaaacggcaaattagggaggaattaatgtccaaatagggggaaagaaaggaccatttgtacagtttttatccaatcggctcccttgaaaattaggcaccaaaaaatgaacaaaaatataagaaatgagaatgaaacaaataaaattgcttatttattagagatagtggacgataatcaaattaattctgaatgagaatttatttaatattctgccattttttgtgccaattatttctttaaacgaaattttccaaatgatgtcgaattttctggcactcaatttttcggcctcattttatcaaaaaaaggggggaaggaaggtggttttatgctatcattggaaagcccacaaaaatgctaataaaaattatttttaaaatattttttcgtttattttcaaaaataactagagatcgacattttgaaaaaagcctggacctggacctggattccatgttggacctggaccttgatttcctggacaaaaatccaggtccaggaaaaatccaggctcctcgagacctggatccagaggcctggacctggattttttgaaatttattttaaaaatcaaaaaaatgtttgaaaaaattaattatttgcttagaagcatctaaaaatatctaataaataataataatgtgtttttaaatttatttaatctgtttttgaaaatttgaaaaaacatcggtcacttgaaaaaataaattctaaaattttgtccaggaaaatccaggttttttcctgttttgcctggacctggatttttttcacatttgacctggac

SEQ ID NO: 13953 - DNA, 2945 bp, Heterodera glycines
ttcagcattttttgatttttggaaattttttaaattccttctaattttttcgaattctccaaaatcccgcaatcccgcacgggatcccgcaaattttaaatgcgggattaatcccgcgggatcccgtcccgcaaaaaattttgagttccagtcccgcagcgggatccgcaaatttgaaatttccggtctctagttaatagtatgatttattaaattccaaaatattgttttttaaaaataattttctaattttaaaatgttaatgttttatgatttcttgctaggccatattcataccagagatagtaattctttaaaataaaattttgaacataagtgttttaatttaaatttaaaaatttgttttaattttttaactaaatatttatgtaaataaaaaaacagctttatgggcaaaaggtactttaatattatttaatttaatgatacaacaccaaacaatgaaaagcggtaaacgaaaaataacacaaatgacggaataaaacgtagaaatttcaaaggtgtacacataagcccctgtgtttatttaagtaatacgcaaatttggatgagatgggagaaaaagcaaaacaaaaaaacaaactgattgttgaaatgaaataagttaaattagcaggcactaaaaggaacaaacgaaagaattcgggaccacccaaaggagggacgaaaggggacgcaatttggtcgaacgaactaacaaagcattggaataccggaagaatgggatcttcaaacattcacaacattaaaagcaactgaattttatgaattacggcaaaactattcgaatttcgaatggaagggacggcggaggcattttgggatggaaagaaagtgagacaaacaatggtcggacattatcaagttacgcaacacaaagtgaagaattgggaagaacacaacgcaaaagggagggaatgaaatgaattggtcagaggcagacggaaattctcttttttggggtcagtcactcctttccgctgctcaccattttatcacggagttcctttagctcgtcttgaagtgccgccaatttgcgctcctgctcctctttgtactggtcgaactcagcccgactaatgaagttcggctgctcatccggtggcaaatgcggcgattgtttgttgccgaagtgcgtgggggagcaggaggaaagtgaacgctgttggggctgctgctgctgctgctgacggtcgtcggagacggcgcaaagaatgggcgtgggctgaagaagtggcgaggacggacctgtccacaatgaacggagttggacagagaaacggggcgacatttgccaaggcattcgccctttgtgaattagcgcgtccccaggtccgtgaccaggggggggcaaagggtgcagttcccccccccccccccgaaatgaaaaaataaataattttccagtaaaaattggcaatcttaaaaacttgttcaacctattttcttaacaaagtaaatgtacaaaaatcccgggggcgcctatcggcaccgaccccacttaacctgatacaaattcctgttttttgctctctggcgctcacattttaattaacatcggagaaaaaaagctattcggttgcccctcccggaatttgtttctggctacgggcctgcgcgtcaaggtccatcttccatgtcccgggtacaattaccccagacaatttcaaaaataataatttcgaaatttttaagacaaaaactcacgggttggaaaaacagtcgttttaatggtcggtgccgcggaagaaaccattgccacaggacaaacactgacagtcggcgaagtgacgtcagacggagcgacgacggaagtgtcggacaaatgatccgaaggagtggcgacttgcgactgtgagggtttggaggagacagaaaccgaagaaagggcattttgtgggtcaaattccgacggattatttacagcttcggccaaagtggcggcggaattctgaagaccgaaatgagagtttcaaagaaggagttagggacgatcccaggatttcggctgggagattaacgacaaccctttttaatttgaagaaatgaattctacaaaatttgtggccaggggtcttggaggagatacgaaaaagaaaaatccaaatttgtaacaaaaaaaatgcttctcttaaaaattttgggtggggggggccttaaaaccaagattaatttttacatcgacaataaacgccccagttggaatatgttttaacacctttgacaatgttgcttaaataaaattgttatcaatatttttttctgaatagtgataagtttttaatgtatattaatcctaataccgccattgggttctgactttcggaattggtcttttacaacttttgacgggggccgtttgttgctgggggcaatgtttgtgcgcgacttgacgatcgacgaggaggagacgaggagtttcgccggcatttccccctccctctgcagcttcggttcggcgttcgcttcaacgcccaccgtcccaattgttggacgggccgcgcccaaattcggttgaggcggtcgcaccggtggcaatttgccattcggaaacaattgcttttgcagcccctcaatgacagagcgacggtttgccgcattcgctttcagagaatcggtggcggagttggccagcagcggtttttgcataacaactaaaaacgacgaggagaaaggataaaacgaaagatacgaagctattgactttggttggccctttcgacgaccatcgattggtgcatttcggtcgccgttcctttggcgttttcagcggggcctttgatcaaagcattgagagaatttctcgatctgatcggaggagctacggcatttttcagcgcattggctgaagggttggctgttgcgctaaatttggagggtttcgccggcagtgacggcgtttgtgcatttgtggaatcctaaat

SEQ ID NO: 13954 - DNA, 1108 bp, Heterodera glycines
  unsure (1)..(1108): unsure at all n locations
attaattgaatttgtaaatattaaaaaaaattataaatatttatgattagcgaaaattcgtttattactttatattttccattagtgagcggaaaatctgatgattttacgtgagccgattttcatttcaaaaatttgttgtagggattttcttgaattcctgaaaattcgccatccgaaatgattcctatggcctctgaattttttttagacgtacttagaaaatagaattttcatttataaaatacatagaaatttttcgatttccctttactacacgcaaaaaaaacaaaacaaaatttatgaaatcgaaaatcggatatttaagataaaaaacttcggatccagatttaattttcaatgatttaccactggaatttttagataatcagaaaaagcgaaacccgaaaaataaatatgtccaaaagtagtccaattccgttcactgttttttactttctcaaattttgattcattattatttttttcaattccttacagcctaaacagcattagataagtgactgaaagaattgtgtctgataccttaatggttgtaaatttttttgaaaaatcatcaattattcaaacagcagaattgacggaaaaaaaacttgatttaaaattttttaatttttctaaaaatttatggccagcatgaaacacataaggaacataaatagttttagaatgagccattaacgtaggagaaaatttgacttctctataaattaatagctcatctaccaagccatttcttcagaaagattacccggaaaaaacccgacgaaaattttttgcaatttattaaaggttttattctaaaatgaaatttttaaagctatcaagaaattctttttgctttttgtcgtaattttatattatttaattgttcagaatgtttttcaaaattatgatcagaaaaatggaataataaactgtgtaaaataatttaatattataggcaatttaattttatcgattagttaaatgaattaaatttattcatttttacaaaaaaataatcaatcaattgagtcatcgtcaaatattgatcgaaataagagtcgttcctgattgctcccgatntccttgtcaccnagcggcg

SEQ ID NO: 13955 - DNA, 1443 bp, Heterodera glycines
aagttcgttgcccatcgggggcagttggtaacggcgcacatttgggaaattttgacaatacagcatataacagcggaatagagcactggtgagatcttgaaaattgtacctgtcagggctggctctgcagttgaaaaaattgccggaatggagaattttcttgcgacaaaaaaattttgcggaatttcggtgccaaaaattgccggaatggagaattttcttgcgccaaaaaaatttcggaatgcggaattctatgccaaaaattgactaacaaatgagcgggaaattatagtgcaaaaaaattcccttatgcggaattctggtgccaaaaaattaaatcggtgtgcggaaatagagtcatccccctgaaataaagcaaaccttctgaggaggttggaaatagagccctcgggggctgtattttaggaaaaacggtaatataaaaatttagagctcatttgcaagacggatttatttgtgttttttttaaattcgtttgtgttaattatgttctttaagaacatttataaaaaaaatattgtaaaggttcaatgatcaaaattgtagcaaaaaaaaagtattgaaatttgaactatgctaatcactgatcaatgaaataataaaaaatttaaaaaatctataaaaaaatttcttgtcccaatgctgatatgcgttttatttgagagaaaaattaaattgagagcacaaacaaattagcaagaaaatcattggctctatggcttactgtacaataataatttaataaaaaataaattagacttttatttttatttaatttaaaatttagcctgatttgtccataaaagaagcagggaataataaaataaaatgtaaaactttcgaatgccaaaattccatgagacttttatattgaacaattatgaaagaaacatggcgcttaattaattttacatttaaatttaagatacatttattaattaaaaataataatgtataaaataattatgttttttctctcaaaatttataatccaaaatagtaaattgtttaaagatcatttttaataacaattttatttaatttggaacgcaaataaaagatgttagagtatttggcgcctttttgcttacccatttcttttaaaatttaaaaaacttgatttgatttttcacttttaataatattttttattttccacttatcccatatttcttttaaaatttaaaataaccaggaaaattctttaatttggcaacaattttccagggattcgttctttatcagtgataaaaaattaaatgaaatgacatcatcgagtccaaattagtataaaaaaatgtaaaaacaatgctttcatgcggggatgtgagaagatcgcatattccgcaatggcacaacaacatttgatccatgttctgttctgcaaacatatttgcgaaatgctttgcggtattcagtgct

SEQ ID NO: 13956 - DNA, 1088 bp, Heterodera glycines
taatcatttaactttaggctaatatattttaaatgggcctttgctcaacagactgtgccgacagaatggacgccgaagatgcgaacggaaaacgcgaggctgaatcgttgcgcgttatcgccttcttcggcgtgtgtctgtccacaatgtgagggggaataaaatttgtttattttttttaattttctatattaatttcctttaattttatgttttatttagaaaaagcaaataaataagaccaataaagaaaatataattaatattaaactctttttcatttttttaaattaacaaatttttatatcaaaatattatttcattgtttgtttttaaaattaattttcagctccatgatgatctgtgtggtcactgtgccgttggcgtaccaacactttcaacagattggttcgctgatgcaaaatgagctggacttttgccagtcacggtccggcaacatttggcgagaggtccaccgataagcgaaagaaatgattaatttataaaataataattttatttttctttgtttcaataaaattattcttttactccattaattaattcatatacacaaaatccctttaatttaattatgcaaatttaatttgaaattcccataataatcaattaataataataaccaatttaagattgcccgtacacaagcttattcccatgcgtccggcggtgtacggtacacgcgtcaagccgctgcttcgggttacggtgccgctccacctccaccagcggcaccttcgtccgcaaccgctggaggcggttacggtggcactgctgctgtctcagccccggcgccgtctcctccacccgctagttatggtggcattgcgccggccgccagtgcaaagccatcatgtaattaataattataattaatattaattcagcaaggaaatgtaaaaagcgatgataaagggttattaatctaaaaacataattaaaagcagatctccatgttttttctaattaagaaaatacggccttgaaaatcagcttttccaaaatagcatgactttttgggcggaaaaattcattgaacggacggttgggggaggggtggataaatt

SEQ ID NO: 13957 - DNA, 1579 bp, Heterodera glycines
gtactatattagtgaagcagtactgtaacatttacaataatgctgagagatcgatcgctgcaataaatttctcgttctttaataaattaaaagaaattaaagaatgcaccaaacaattaactttctgagcttgtttgattttatacatacagccaaaaactaaaaaatctcaaatatagcctaattgaaaatatattttggagcactcgaagccgaaggcgaagcctaatttttattcgaaagctaagtccgaaactcgaagcccaaaagcccgacgttttcgaagccaaagccgaagttttcccaaaaaattttaacaaaaaaatatttttatcccaaaattttcggtgaaaataaatttaacaattgacagaatggctagagatcaacgccttacaatataataaatattttgaatttttttgatcgaaatattttgaatacgaaaaagttaaaaattgatcaatgacccgaaaaaccggtaaaacggtaaatttttcaaaagttcataaatttgtgaatggtatataaacataaactttttcactgattagcaagaattcctaaatcaaaaaattccacccgaagccgaagcacgaagttcgaagctcaaaaaaccccgaagttttcgaagccgatgtttcgcccagcccggctgccgccgtttaatttttttgttcactgaaaagccatccgtcgccacatccttgtcactgcgtacaacaaaaacaaataaggaaaatagaagcagcagtagatgatgcggtagcacagcatttttatgcattctaatttaacccaattaattaaatactaattgccctaattaagccctttaaagacaacaatggattttcttgggcttcactctttatgtttttaaattcaatgtaaaatttaaaaaaaaagtgtgaactctttttctaattctcaaaatttgaaaatgaaatttcctatagatttaagctcgtgctgagtcgtttcgtaaattccgctaacaaaaaataaaattcatttaagtcaaacgttttcttaaaaagtgatattttcaatttaccgatttaataatttaatacatttgagatagagaagaagaagcttccccgagaggaagataatggatcaattgagcgacattgatcctatatgattgaacaaagtggggagctgaagagggcagggtcggtagttcagctggtagaacactggtccggaaagccagagatgccggttcagagtcggcccgctccatagtttttcaatcaaaagcttccccagctcgtttacatatttcacatgtataaaaaaaaccaacctaggcttatttttaagagaaagattgtttttcacgaaaattaataaaatttgtcaacatttcttatctgccaacattatcgcagttaatattaaacaaagtaaaaatcaaaatgaaattttatttacaaaaatttttaattttaatattaaattgtttcctaaggatggtaatttagacacaaaaaatcccaaaataggcacctaaaaaggaaaaaaaatacttcgcaaaataggcatcaattaggtttaaaaataggcactg

SEQ ID NO: 13958 - DNA, 3772 bp, Heterodera glycines
caaaaaacatttttggaagttggccactaaaatagttttttttgccacaaatttagcattttgccacctatttttcactattccgtcatttttttgaaaaatttctcaacaaaatgcaagaacaaaaaatacacccctaagaatgggtccacctcgttttggcgccagcccagtttttggactataactttttctttatcaaccaaatctaacttttggtatcattcgaaagccctaagtgttctctattagagaccggcgcgggacgtgatatgttgaaaagtaattaattaatttatatgaaagtttgcaatgtgtatgctgttgttacggtatgcgtgacgtttgtgaatatactatatgccaaaattaggttactgaaatggagtccaaaaggggacttctagtgaggtttaaatctcttgaccaaattagtttagacgggaaaaaatttctcttccatactgttttttgtttcctctacatacctatcggcaatcgtaaggaatgggggtccctaatttaacttttttattttgggttcaaaaccagtttccgggggttttcgagggcgctgattacgaatctgaactcgaatttgcccaattccgaatcccagacccgaattcgaacaaaaaaatagaaaatttggcgctactgtaaaagtggtcccttttgaaaatttttttcacttttttttcatatatttttattattattttttattacaattatccatccttcctttgacttcgatttatccgagtcatatagtctcaacaattttggcacaacaatttgttttggataagtccgttgtgtgccaaaaattgtaaaatctcttcagtttttggaaaaaagccatctcaaatttatatcgtccaatgttggaaaagcgatgagcggcagattgttgtaatcattagggttgtaaattatatggattaacatattttttctgcgcatatgctataaagaaaggggctcaaaaatagcatttctgcgttaaaattttttggtttgctgaaggtttttagtccatataaatcagggctgcacgcaattacggattacggattgcggattacggaaattacggggtttttagagttacggattacggattacgggttacggatttttgagaattttccgtaattttgatccgtaatttgacttttggattagttttcgagacgatttcttgtaagattattttttataaaaactattttttctattttttatttaaagaaaatatgttcatttctttaaattcttatttctttagcaattaaaaatgtcaaacttaaatcctggtaattggtggtattattttgagcgtcaaggcaaatcaactgctaaatgtaaagccgatggatgttcctactcaaagacattaaatgcttctctcagtacaacagttcttgcttctcatctcaaaaatcaccacccacaactttacaaacagcgtgaagattttgttcaagaagaaaagcaaaaaaccgaaaagaagggacaaagtggaataaacccattaaaaagggcttttgcaaatgcattttgtggttcaagtcaacaaattactgatgatgaagaaaaggaagagccaatttcatcaaaatcacctattttaattgggctaaatgcaaaaagtatgatctgatttttctatccgttattacattttgattaaggccagtggagcacggacggagatgcaacaattggcgcaaatcgcgcactaatggaaatgctggccactcaattactgccatttaatctcgttgacggtgttggatttcgacaattcgttggaaaattacagccaaaatacaaaattcctaggcgcaatcatttcgctcaatatgaattgccaaattgttttaaagcgatgaaagtaataatcaaatttgcgctttcataattctaaaatttagaaaatagtcactgatgaacttctgccagttaacaaaatcgctttgactgctgatgggtggacttcaaaggataatcgccattccttgatttccgttactgggcattttttggaccaaaaattcaagccaaaattttttgtattgagcacaaaaccaataagaggtaattactaaatctggagtcgaaaaaactaaatttttaggacgacacacagctgaagcaattgtgtcatttattagagaagcattaaatgattttcaaattcaagaggagaaaatttcggccttgacgcgagatacagaaaatacgatgaaaaaggttggaaaggacttgggttttgtgtcggtggattgtgcagcgcacgttttgcaattggtctgacaaaataatataattaaatattaaaaacaaaaattttagtgcattaaagagggactgaggtcaattgaagaggaagaacgtttaaaaaatcttttggaaaatgtcaaaagatttgtaagaaaagtgcgaaagtcaagagtgttgacggaacaactcgctgaactccaacaaaaggaggaagtaccaccaacagttttgattaaaaatgtcgaggtgcttttcttctatatttcactattctcataaaggcaattaatttcaggtgcgctggaatagttcatacaaaatgattgaacgttttatcagaaacagatctgcggtgaatttgctgtcaattgaacattaccagcttccaaaatttaacgctgatgattggttgcttttgtcatcaattagcgtactttcaccaatttacgaggccactgttcttttacaagatagaaattcttcttgttcaactataattccgctttttaaagtcagcattaattttttccccaatttattttaaaatttaggcaatttcattcggtttacgtgaggacaaggacaatcgtttttcaaatattaagaaaacaattgcgaatgccatcgaattgcggcttaaacaagccgaagaacaaaaaaacttagttcttgcgactattttggacccacgttttaagaccatttaccttgacagcagtcggctaaatcagtacaaagactggttgataagtgaagttgagagttaccacgcaaagacagatgtgattttattttttctatttctgtaaactatttttttaggaaattgatttacaaaatgacgtaagagactgcagtggttcaagttcgggggacattttttctcgctttgaaaaggacgcagaatttgatcaactaattaataatgtaaaaaactttatttactgctcaaatgattaatttaaggcaacatcccccagtccatctgcattggagacaagacaaaaagccgaagttgaagtgaatgaatatttacgagatcaaaaaatcaaatccagggccgatccatcattatactgggaaattaattcacaaaaatggccaatgattggtgccgttgtacggaaatttctttctccgcctgcaacaagttcagaaactgagaggcttttctcaacggccggtctaatttcagatgacttgcgaaagagtttattaccagaaaatcttgcaaaacttttgtttcttcatcacaatttgcttttaaccggtttctcaattgaatgattttgcttttataaatttgctttttaatatgcttttaaattgctttaaaagatttataggattttttaaaataaaatttaaaattattaaaaaaaatttttttttaattgcggattgcggattacggaaattgcggggtttttggacacccgtaattgcggattacggatttccgcaactgagaaaatcgccgcaa

SEQ ID NO: 13959 - DNA, 1310 bp, Heterodera glycines
ttcgaggggcatctgggtggataaagattaaattttatttagtgtgcaagaaatggagatagaccttttgtcaagctttattaagttataacaaatgtcatttatgttttctttttatatttgaaaaccaaatgctaatacattattttaatctttattttaaccgtacaaaattctaatatcggcaaaataattggagctgaattctgtgagcctttattcagagagccttttgaaaggccaacctttttcaaataaacacatcttagtagaagtacacagttcattatttcgaaattgaacagtaaatttggggagttgaaaattcttttcttgcaacattttgaatcattttttatccggtgacagcttataatattccttattttcatgcattcgagggcatctgggtggataaagattaaattttatttagtgtgcaagaaatggagatagaccttttgtcaagctttattaagttataacaaatgtcatttatgttttctttttatatttgaaaaccaaatgctaatacattattttaatctttattttaaccgtacaaaattctaatatcggcaaaataattggagctgaattctgtgagcctttattcagagagccttttgaaaggccaacctttttcaaataaacacatcttagtagaagtacacagttcattatttcgaaattgaacagtaaatttggggagttgaaaattcttttcttgctacattttgaatcattttttatccggtgacagcttataatattccttattttcatgcattcgagggcatctgggtggataaagattaaattttatttagtgtgcaagaaatggagatagaccttttgtcaagctttattaagttataacaaatgtcatttatgttttctttttatatttgaaaaccaaatgctaatacattattttaatctttattttaaccgtacaaaattctaatatcggcaaaataattggagctgaattctgtgagcctttattcagagagccttttgaaaggccaacctttttcaaataaacacatcttagtagaagtacacagttcattatttcgtaattgagcagtaaatttggggagttgaaagctatattctggctacattttgaatcattttttatccggtgacagcttataatattccttattttcatgcattcgagggcatctgggtggataaagattagattttatttagtgtgcaagaaatggagatagaccttctgtcaagctttattaacgtataacaaatgtcatttatgttttctttttatatttgaaaac

SEQ ID NO: 13960 - DNA, 2523 bp, Heterodera glycines
  unsure (1)..(2523): unsure at all n locations
tgtgtttctgctgctgaccagcagccacgtcatttccctcctcattctttcgttttgttttatgatatttcttcgttttgttttctgctctgaatttaattttttgcctcggactttaaaattgtaaaagtaaattgtttggattttgaatttgggatacaattctccatccccatttggctaattgtgtgtgcggcaattgcttcttctcgccaattcaccgccgaagccttttgttgtgttacgacgcgtgtcctatgctgcactcttggcttcgctgagcagatcggccgactgataactgatcggaatgttgttgtcttagatgaggcgagtcagggctcattcgttcaaatttgttcgactttgtcttctctcgtcgagatgaggaaagttttaatcacaggggaccgttaccaattagccgttaatatgcaaagcatcccagagccagtacgggagggatatggtaatgacaccattttgatcaatctcgacaatgccaagactcacccattttgctgattcaccaggacacaccaatggagcacgacttgaccagctattcggcaaccaaccgcggacaaacacgcacagtgatggaacttttggagttgttggacaaatttcccggcagcattcgcatcatttccttgtatgccggtcaagcggcacaaattggaatcgagctgaaagagcgtggtctcgagtccaaaattgcatcaatggcgtctgatgcaatgcaggcgcacgatgccgacctcaccatcattatagctacagtctcgagacacttggaccgattggcagctatctaaccatgctaaggaccgtaaaagcgaattttgggtgattcccagagggttaatgttgcattaagtcggggcaaacatggaatgatcgtgataggaaatctgcttcagcttggtaacagtgaaatttggtctagattcttggagaaggctctcaattcacagtcgtgacttccccagaggtcattagatcattgaaaaccccaaaatcaaggtatatgcgcggtgtgctggttgacaactttggtgaaattccgtcagtgggcaatccgtcagtgaaggacaatccgtcaataatggacaatccgtcagtggataatccgtcagttggacaattcgtcagcaaattttttttgagcaatgatcaaaaatctacaaaaatgattgttaaatttaataaatataattttttatatattctttacatttctagttactttatactttaattaattgttaaattatcatttaattcttttaaaaatgattatttcataatttttataaaataacacaatttttaattcacatttttagcgacttaaattaattttcacacgatgattttaaataaatcttcgttgttttaatgtttatggaattgtccactgacggattgtctgggagccttgccaataagtaacgtgagataaaggccctcaaaaaaagtccaaaactaaatgttgttattattaaattattatgaactgaattactaagaaaaaaattaaagaatttaaattaattagacaaataaataacattcaaaaaatagtcaaaaaacatctattattacaaaatctaacaaaaaataactcaaaaatatctttaaaaataaacacagaacatacgtggataaataagtaaaaagaacagatattaaaatattggagcagttaatttcaaattttatccagcatgaacatccaatgcaaatggtaaagcttacttactgattggccacctaatggaccgaaaatttgacgtcgcttaaaaaaatcgaagctaatgaagataaatcattttagttagaaggccttttaaaagaatataaataaatgcaacttttaaagtcaaactcaaaaaacagccaatgataattaaaaataataaaactaaatggaaaatataaaaattagaaataaaaaattaattaaataattacaaaattatcctttgcggcctacgcagattttgttaggaaaaagactgaaatgctgccgaaaatttttaaaatataagtctaattaattaaaatctaataattataactcaaatattcgaattccaaggtttttcaggcttaaaggcattaaaaaacactttttcgccactgtaccaacccacggcaagcagaaacaatagtggacatttcagcgactatcggcaccaccgggacctttctattttttgaagtttgattcaaaaaggcacccagaaatcgttaaaacatgatcaattagtaaaaacatatttctgaacttttagataaaaaaaatatagaaatgaaaaaatttattaaaataaatctcaaaaagaatgtattgaaaaataactttacacttttaaacaagagctaacttatttatttcaacttaatttcaacgtataatttaattaataaacatttaaaaacaacagggntaataaaatagttataaaaatttaactgaactatttattatttggatatatttgaaaaaagtttgat

SEQ ID NO: 13961 - DNA, 1933 bp, Heterodera glycines
  unsure (1)..(1933): unsure at all n locations
tcattcgaaagctctttttgagctctacaatatctgtgtatgagttttaacgcccgattaattttcttaaaatttntggaaaaaatcaaatacttgatgaaaaatcatatataaaatcaatgattttgcaaaatcttagctcagattcgtaatcagcacattttttcatcctaggaaaaatgaaattaaaattttttaaatttatttttcgtcgggacctcagttctgcaggattaccggattcttgatcagcgacccagggtggggcaccatcgataccctttgttgttgtcatgttcaccggggatggaattctgacgcccaaaaagaaaaggtcggaaatccaggcatttttttatttcttctctcatgtcagtgttttttgctctaaagtaaaaggtggcggtgttgtggttttttggcgagtttttaaaatgtcgcgagtgtgtattcacaatttgtcaagacaattaaaacaaattgaaatgaaataaataaacaaatgaatggttggatggacatagaaatggagagagagaggatgatgattaattatagtaattaattgctttttgtttgcatcatcggcttttcctcttcctccttcagcaggcggcggcagcgggcggttgcgttttgagggtggtggtggcactgttgttgctgctgttcctggtcaacaatgcccagtgcaaactgtacacaaccagctcatatgtgccgatggtgaacgccgtgttgggcaccgaacggaccaacttttacgggaggaaggggggggggtgaataaattgttgaataaaatttttaaaaattgcactccgaaattaaattaaattgatttgctatttaagtggtttacaaattagcaacgagtgcatttggtttattttcttttttttttttgctttagtgcactgaaattttttgtgatttttcaaaaatgaaaaacgttatgaaaaaacacaaatttttttttgaaagaaacaatgcttcaaacaatggcaccccaagcccgaacaacctaaatcactgtagcgctgaagttcctgtttttttttttgctccagtgctaaaagttttgaaaaaataacacccgagaaaatttttttatgatacgaagagcaaaaaaatccgatttccgccctgacagttcggaatgtgcccttgtgagccatcaatcttaaatgaaaaaatacaaccaaaatttaggttttttgaggccccgtaactttttttcattattaaaaatccgcaatagaactcgaccctgcactatacaatggtatataaaacggaggcacgacatttttggtccagacatttgcgcctatgtccaaaatcggactcaaagttgaattttttcaaccctgatagcctaattagcattaaataagaaaaaaacacggtcattttttttttgattatgttcaataatttgttgtttgacaatttaattttttttcaaaaattctttgaagatcaaatgatccgatacaatcactttcaatcgcatatttaaagctgtttatgcgatcagggattgaaaaaacttaatttttaactcgatttttggccaaaggcgcaaatgtcggggcacgcgtaaaacatatgcattttccgacttcagttcacgcccttcccttgttagcgtaagcagttttatggatttatttatttttgctgaaattggtttcttcaccattattccttttgtgttgcacctgcaaaagaacgccatgccaaagtgtctgccagccctcgtggcgcaaaatgtgccgcagaatgtcacgcaaccgatttgttgagccttcctcacgtaatcgtgtccgaatcacctctaaagaaggcaaaaaacagaaatgttaaaatttttctgtaagaaaatccaaaggaaaaaattttgaaaacttttgggaaacttactattaat

SEQ ID NO: 13962 - DNA, 2548 bp, Heterodera glycines
cgaagatgggcaccagacaacgttgccatttcctaacgttttgttgcgtcgcctttgtcacaattgtctttcttttgttccttttcccgagcgatgaccagcggagagaggccgctgacagtcgaacatacgcccaaaaaaggcattccgccgacggcggtgcgtcgtctgccgccgaggtggacaatttggccccgttcattttcattggtggcattccccgttcgggcaccacactgatgcgggcgatgttggacgcgcatccggaggtgcgctggtgagagggcattggaggagggaagggtaaatgcgtctcaatttttgtggtacagcggagaggaaacgagagtaatcccgcgaattttggcacttcgagcccagtggaagaaaagcgagaaggagtggcgcaggctgcaggtgaacccttttgaatggcggagacacactttcgaattggcctatccaaaaaacaaataattgcctttttcgtcgtctccgaatttcactgctggtttttaaatattttattttttggtgtccaatttgtgtttacgattaattttgctaaaggaagcgggcgtcggtgacgaagtgctcaactcggccatttccgccttcattgtcaatgtcatcgtcggacatggcgccgctgcgccgcggctgtgcaacaaagacccattcacactgaagtcgaccatttatttggcgcagctgttcccgaaggccaagttcattctgatgatcagagatgggcgcgccactgttcattcgatcatttcccgaaaagtgaccatcaccgggttcgacctgaacaatttccggcaatgtatgcagaaatggaatgccgggattcaggtaacggacaaaaaaaaatcgagtcgaatttgcaatggttttgtactttttcagataatgtacgaacagtgcaacgcggtgggccaagccaagtgtttgcccgtctattatgaacaggttggcctaccgtttggaataaatttctctatttcagctgatttcagttggttttgcatcccatgcgggaaatgaaacggttactgaacttcttggatttgccgtggaatgagtcggtgctacatcacgaaaagtttggacaacaaattgtaaactcttatgcgcattggcatttgtttgttttttaggttcatcggaaaggacatttcgctttcaaagtgggctctcaattttaatgaaaaattcaaaaaaaataaccgattttttcaattgttaagggtcgaacgcagcacggatcaagtgattaagccgcttaatttgggtcagacatacgttattcaatcgctaaacatagcaaataatgagagtcagatgcacttaacaaatgggtcggacaagtgcccgaggacgtgctcagccaaatggacgaaattgcgccgatgttgcgggtgttgggatacgacccggtgggcatttgacaaccgtttaatttcattttgtttgttttttcgactgccaatccgccgaattatggacaagcggacgaagaagtgcggaacaaaacggaacagctgcacagagaagagcaaaagtggaggcaaaaggcgcaggaagtgctcggggagcagacgacggagcggccaatttgaacggggagagaaacggccgattgaatgggtttggcacgcactaattgggcattattttgctgttttgtcactgtgtgatattctcctagtttcgggtacctctcatccttcacattcgatgtttttattcttttcttaaccttaactgttcccttctccgccagtacttttcccagttttcatcttgccaatttctctttcaccttttcacatccgccgatcttttcatatttttttgatcttttgatttacataatataaattggctgataattcgtctcatttatcatcggaaacggtgcgcaaataacaaaaatacattttaaattaaaaaattctttatttaaaatcgctagcggggtcagcgccttcggcgcatcccccgctaggtagtacgcttgtattataggattatgaatagggcccggatttttatgtttttacatattttttttgcggcttagttatggcgagagaagcccaaaaatagcattatctccgaacaatttttgatttagagcgacttataaaaacataaaaacacatattttggcgttttgtcacataaaatatgttagcacatattttggagtttggcacatattttgcacatattttggcatttttgagaaaaattgcaataaaaatacaagaaaattgaaaaatacaccccctaaaaatcgacttttttcctaattattaacataattttcaaattaaaaaattttttcttcgattgtagaaactaatgaaatctcgaattcattaattcgtcattggatttcgaagttctctgctggaactttcaatttatagaaatgatttatcaaaaaaagacaattttaccccaaacacttcgaaatgtatttgatttgcgttgtatgggctaaaaatgataaagaatgagatttttgggaatttttatg

SEQ ID NO: 13963 - DNA, 1303 bp, Heterodera glycines
tttaaattaaaaaattctttctattaaaatccattttatacctaaaaattatttatatttaaatttattattaatctgcgtcaatatgtgagataaatatcgaatctcaaaaatacattttaaattaaaaaattctttctatttaaaatcattttatacctaaaaattatttatatttaaatttattattaatctgcgtcaatatgtgagataaatatcgaatctcaaaaatacattttaaattaaaaaattctttctatttaaaatcattttatacctaaaaattatttatatttaaatttattattaatctgcgtcaatatgtgagataaatatcgaatctcaaaaatacattttaaattaaaaaattctttctatttaaaatcattttatacctaaaatttaaatttattattaatctgcgtcaatatgtgagataaatatcgaatctcaaaaatacattttaaattaaaaaattctttctatttaaaatcattttatacctaaaaattatttatatttaaatttattattaatctgcgtcaatatgtgagataaatatcgaatctcaaaaatacattttaaattaaaaaattctttatttaaaatcgctagcggggtcagcgccttcggcgcatcccccgctaggtagtacgcttgtattataggattatgaatagggcccggatttttatgtttttacatattttttttgcggcttagttatggcgagagaagcccaaaaatagcattatctccgaacaatttttgatttagagcgacttataaaaacataaaaacacatattttggcgttttgtcacataaaatatgttagcacatattttggagtttggcacatattttgcacatattttggcatttttgagaaaaattgcaataaaaatacaagaaaattgaaaaatacaccccctaaaaatcgacttttttcctaattattaacataattttcaaattaaaaaattttttcttcgattgtagaaactaatgaaatctcgaattcattaattcgtcattggatttcgaagttctctgctggaactttcaatttatagaaatgatttatcaaaaaaagacaattttaccccaaacacttcgaaatgtatttgatttgcgttgtatgggctaaaaatgataaagaatgagatttttgggaatttttatgcaaaaacacacttattttttcaatttttaacacatattttagcacatattttggcatttttggggggtttttagcacatatttcagcattttttagcacatattttattacctatttc

SEQ ID NO: 13964 - DNA, 4164 bp, Heterodera glycines
  unsure (1)..(4164): unsure at all n locations
ttcactcatttatgtaaaaaatattattaagtaatttattatattaaaaaaatagaaatttagcattaagaatcttcaaggaattgtaattaaaaagttgttaatattttactcataattatgttcatttatttgggcataacaaagaaaatattatgcagtgaccgaacgtggagaaggtcaatggtattttatgcaaatgtcaaaagagacaaatcagaaagggattaaaacatatgtttatacttttgcactaattgtgtttgattctcatatttttgctggttttcaacgacaatttttcagtaaaaggcatttaatcgttaaaattcaaatttcaataatattttttgaaatgggatttgtccttttttgcctttaacaatattttcgatttgaactcttcctttggtcacaatgcttcttcaattcgcctttcgataattttaaattattcgtttttcaaaggctttctttaaatttaaattattctaagtttgattaattgcgaacattaaaaatttatgtaaaaaatacgatggaattggctgatttggcacataaatttcagaaatatcatttttccgtcatttgaatgactgaaaaataaaatttacatttaatttggtatgtttaatttgcgtttttttaatttaaattaaaaatgattgccctgaattaaaatttatttgaacagcttcactgtaattatgctgaattttttttttttttttgctattttggtaatgaaaaccatccaatcttttggtaagtccaaaaattaaaatttaattggaatttgtctattttactatttttttaataaataattaatttaattaattaatgttttgccatttgcaaatgtccataatgagaatcatttgccatttttttatgttccgccattttttgctgtacaattgtcggcacatccatcagcttcaaaagggaaacaaggtgtcattaattaattaactaagtataattattctgttaataaataattaattaattaattacttttctatctttattaccccttttaagctttatgccattgttcgcgtgaagcgctttgagccgtcacaattggcgggctcacaacttggccagcaaatggcatccaaaatgggccaacagatggccacacatattagacaacaattggccacaaaagcgggacaacaaatggctgccgaaatgggcaaaaaaattggcacaaatttgggcaaaaatatagtgaaaaaaggcacttaaaattgaaaataaatttttgtaaatttaaaaatgagcaaagagaagtttaaggcgtacaacacattaacaacatgcagcagaataaatacaatgagcaggaagaaagtaatgaaaaaaatgaaaaaagaaaaattgaaattgaaaatacaattataaatttaaatttaaatgcctatttaggcgatgagttgggaagaataggcagaacgggtgccaaaaatgtgaagaaaaataaaaggaaaaaacaaaatgccaaaaaaggaaaaggacgaaacaacggtaaacagaagaaaggtgataaaacgataatcaattaataaaatcgaaagattttgaacggattaaaacttaaaaaaaaattaaaattgaaaattgaatcacagattttcagataataatgaccaaaatgtacttgacaataaacaccatagagacaatagtcaaattgaggtgaaactgtaaattttgtgccaattaaaaaaaaaatttaaaaggaggattacgatagtgttgtgagagagcgcaatggttaccgtaaccgtcgcagaaaatcgcttaaaaatcggagaaataaaaatttacgtccaaaaaagcgacgaaaacctcgaaaaagccgcagaagaaacggaagtggagaagaagaaaaatacaacgaagaaaagaaaagaaacagaaaaaagagaggacaaaagcagaaaaaggaaaagaaagggtaaaataataaataataattaaaataaataaattaattaaggaggaaaaatgtatggataaataaataattaggaagaatttttcagcagaactcatcggaaagctcggcatggcaccaatacagatgaagaaagcgatggcacagaagagggagaaaacagtggaagagaaaagaacttgaacaatttacggaataaaaaacggtgagtcgaaaaggtcaataaatactaatcattggttaaaataaataataattacgaataataaattaaattagaaaccatttagagatgaagaggaggaggaagaaacggaaggggaaaaggaagaggatggtgatgaaaatgatgaggaagatgatgaaagtgatgaggaggaggaagatgatgaggaggaggagcatcgccggaagcgtcggccaccagccctttccgacaaagaggaggacaacaggtcatttgatgagtttaattggtgggagggaatgaaatagcattgggaaatgaccagaaaacaaatggactaattgatttaagcatttaaatgaaaccaaaattattaatgcgaattgcatgaatgtttaaattttttggttttagtgcgccggcaagtgccccaaatgctgacaaaagcgaagtgatggacaatgaatttgaggaggacaaaagtggaggagaagaggaggaggaagaggtgggaagaaaagtggaaaacaaattaattagaagtaattttcaatttagagccccaaaagaaaaggcaaacgtcgacaatcgtccaaaaacggtaaatttgttggagaatgaggaaaggttttgtagggataagttgcttaagataattcgggtggtgaatcgaagccggcggaagaagaagaggaggaggaggaggaagacgaggatgaagaggaagaggaagaagtgggaaacattaaaaataattaaaaaataatttgaaaatttagcgccccaaaaggaaaggcaaacggcgaccatcgtccaaaaaaggtaaatttggagtgaaaaacaaaacaaaaagaccgtcgcggaggaagatcaattataaatatttgataagcatttgaataaatcttgacacaaaaagagcaaatcccggcagtcgcgcgggaccccgaaaaaaagcctcgggattgaccgggatttggacgggatcccaactcggttatccctccggtctcagttgtccggtttctattgtacatgtgcttaagatgattcgggtggcgaatcgaagccggcggaagaagaggaaaaagaagaggaggaggaagaggaggaaagtgaagagcaattcaaaagcatttaaattatttattaatttatttgatttatttaatcaaaatttattttcagagcccaaaaaggaaaagcaaaaagaaaacgacggaggaaggtgcatactgtaacaattgccctactgtatgcatttaattttgtattgtaaatcgaagattcgaacggagaatcggagccagaagaagaacaatcggaagaagaagaggaggaggtggacaagaaattaaataattaagtaatttaactttatgtaattaaatttaattgtttagagtctaaaaaggaaaagcaaaaagaaagcgtcagcggcggaaggtgaactttatctattttagctataattaatatatattatgttttttgataagatgattcgaatggcgaatcggggccagaagaggaaccatcggaagaagaggaggaggaagaggaggaggaggtgaaaagtgtgacaattaggggttaattgaattttaattaattgtttagagcgaggaaaggaaaagcaaaaagagaccgccggacaaaggtaattttgaaataaaatgaaaatgcataagcaaaatgaattgaatttaattgaagcccaaacaaaattggataacggcaggactttcggggattctgatcctgattatctttcaaaaatccttgtctctataatttgtgcctcattaaattttagatgattctgatggagaatcggaaccagaaaacgacccatcggaggaagaggaagaaaaggaggatgaaaaagaaaaggaagaaaaagcggaggaagaanaggaggaagaaaaagaggaggaagaaaaggaggaagaanaagaggaggaagaanaggaagatgaggaagagaaagacgacgaggaagagt

SEQ ID NO: 13965 - DNA, 3377 bp, Heterodera glycines
ccctcccccattacttttctgtaaatgatgtgttcctcaatgactttgctgcactttcccgagtcaatctccgctttatgcgcgaattgaatgtgcgaagagcaggccgaacggctataagaagtgaaagacttttggcagacggcgcattggtggagaggaagttggagatggcttaaggaaggcaaaggcattgctaacaaaggacagagggattattcaattaccgaacgttgacgtggttgagtcggttgaccgtctgattccacaccatttccccacactttttgcacggaatgcgctgattgtcgccgttctgccgtttctcctttcaatttcatcgttcttcccatattaattactcatttttctgtcgtacctttatcgaattttgttcttcgccgttttgaatttgccgctcgaattccgcaaaatgtctgtctgggcacgaaaccaaaacttaaaagtaaaggaatttatcttcagagccttctcctaacatgaatatttgtcgatcggaggcattgccgcaccgttccctttttctccttcctttttagggcgacaatcgttctaaacggtcgctgattgcttttattttgcaactaaattctgttgttttcacctcattgctgctcaaattcagtttgaaatcgtttttcaaggccactattcctttacattggctttctgaaatttggtcaaaaattgtgagtttttcttcatattgttattaaaacgaattaccatatggattcttttaagcctacttcccaacccttgcattttttgatcattttatttttgtattttttttgctctcagttcgatgtccctttttggtgccttcgttttatttttggggtgcaccccaaaatatcgccgcagaaatttaaaaagaaaattttaataaatttcctaagaatttttttatgaaaaatttctagatttgaaaaaaaaattttaaaaatttctgcggcaatattttgtctcggcgatatttcaggcggcggtattttgtcccgtccccgtattttgttgttcgaccaatgaatgattccttctcacctttccgtccatttttcttcccttccttttccagcggtttcccattcaaatccttgctattaacactttttgtcgtcgattttctgtccgcttttctatttacatttcgctgccctttccctccaaaacattcgtcacgtgcggcatgaagaagggcagaaaactcaaatattgcattattattattttttaatttcagtgttaattcctcccgaatactttgtgataattgttgaccaaatgtttgctgctgcctttgtgctgttcgtgcatatgcttagtaatccgcgtgttggaaacttcgaaaaaatctctaaaagaaaaatgataaagcaaaacaaaattggagcagtgcttttgtttctgcatgcaatatttaccttttgcaaagttcgcaatggaacatcggcaaacgcaaatgcctaagaaattaaaaccaaagggataaaagaaatagggcgggggaggaattgcccgtttttaaaagtgccgaccgtgcgttggtgtggtggctgagacacccgccgctcgcgttcaccatttctttgcactttttgcaccgaattcgaccaaccgttttacttttgcttcgtttccgttcactttttgactgaacaacgcgggtttgaatttatttagtagcgaataaatggttggttaattgaccggcgatggttccatttcgggcgagtcttcagcattttggaggacgtcattctcacaatcagtgagaatgggaataccattgtgaagcaaagcgtacggtttgaagcggttgggacgaagagaataactctgaacgggaaggaaagcgcacataaattggcgagcaaagggacaaacattgttggcagatcgtcgcttatttgtcgggggaatgatttgctttttaggtccaccaaattgggacaccgccgccgcagtggccctgagaatctcttggacgttggcctgaattttggttcggttttcggtctgtccgtctccaattgcctgttgttccttcagctcgtccgttagactgctcccctcgccctccatgtcctcatcctcgtcgtcctcctcctcttcccctccaaatgaaacgacggtcgtttcattcgcactttcgaaattcttcgctgtcgtattaccatcagaattgaatggacgcggacgaaggcacattcctaaaattaatcttgaccaaaaccataatccaaacacattgaggaaaggaacaacaatgcgcaagggcaatttatttaatttatttttttgctgattcataaggttcgccgtttgcttggcattgcctacgctttggcttttcctcctcctttccgtcattgcctttgatttgggcattttttgtctgcccatcttttgcttttcgcttcttttccacttccattggtgaagaagcgaactgttctttttccgctctgaaactttgaaaattactgaagttttatggggctgacttatttaaaaagcgtaattctcgcctcaaagcccctccctccccccacaattttcgtttcctcacctctcatttaaatgtttttccctggtcaaaaattctcgcattttgctgcgtttttccttcacttctggcgtaattcgacaccgaaactaaacaaaagttaattattgagcgattgaagccaaaaattacagaataattacgactgtcgtggtccaattcattgtgtttcatcacagcgaattcggtgggaaactttgcgaattggcaatgttcgcactcatagggcaacagactgaagtgatcagccgcaagatgcgcttccaactgatcaaacgaagaaaatcgctaaaagaccaagcaaaaatggccaactgacagcggaaacttaccggcgaattggaggcattggcaacgcactcactgatgcaaatttgacaattgaacattttggaaatgcaaatcaaaagcccacacaaaaaatgaggagaggaaagtaaaaagaagtaaaatcacagatcacaatgtattaatactaatcgcattccaatgctctaaagtggcaagttgcagcagcagcacaacagaaactttaaaaaatttatcaatcatttaaaaaataaaatcttgatgcgttttttaaaataatttttggttcgaaatatctattttaatctgatttcacggttcctcattttccacttggtcttcttgagaataatccgaaggctttccttaagttagcgggcccctcccaatagccattgagcaaaaacatccaataaagagaaggcatccaatagcgcttcatcagataggcaaatctgaattaaaaaaaaaaaaa

SEQ ID NO: 13966 - DNA, 1777 bp, Heterodera glycines
  unsure (1)..(1777): unsure at all n locations
tcacctcgacaatttgccgttgccccgtgcctttccctttttcgtcgagcaattcgaactccgcctcgtgtttttcggggttcactttcactaaattgtggcgcgggtgaagcccaaccccacgttctttcacaatgcgctcaagggaagcggcatatctgaaaggcatttggttgatttgctgataagtgttgttcgtcgctttactttggtacgccgaatatccgaccaagtgcggtgtaataatgcacggaacaattcgaccggactcccttccttcgtaaaatctgaaattcaattcattttcccctttaaaagacagtaattactcatacttcttccgccaaaaagcaaatcttcagtggagctccagcgcattttatatgcgttgatggaaaggtaaaaactgcctcgccggttgaaaaatttttgagctcttctaatgtcttttttgctccatcgggaaaataaatggaactgatggaaggagaaagaagaacagattctgtcccggatggaagaccttcaatctgaaaaaaattaagccgaattttgtctcaaaaacttactaaatcaaaacgaagttcaagccccgtagccaaaactaaaaaatcataggaaatggcttgaccgttttttaagaaaagttcatttgaatcggagtagttactccccccctttttgggggttgcatttcagccccgccatttcagtcccagtggaaagggacatttcagtaccagatttaaactttaaaaaacacctataataaatatatccaatcccagaagaggtaaataattgaaaaaacatctgaaggataaaacccaaggctaaatcctattagagaaggaaagggaggcagaggataggcgtcagctgtcatgccttatagggaagggaagggacgcatgccacctgagcgcccgcgtgtgtgccatttaagcgctcgcgtatgccacctgagcgcccgcgtgtgtgccatttgagcgctcgcgcgtgccatctgagcgcacgcaggggccttttgtgagcccgcttgttaaatttgagcgctaaaaataaaaatcgagttaaatgaattagaattaaaattgataaaattaaaattatattaaattaataaatgaaattagattaaaataggattaaaattaaataaaagttaaagttcaaattaattgaaataaaaaaaaataaataaaaaaaaaagattaaaaaataaattaaattaaaataagattattaaattaaattaaaataagattaaaatacaaataaaataaaaataagattaaattcaaaattaagttaaaatataagtaaaattaaaattaagtaaataagaaaaaaagttaaaataaaaataaaaataaataaataaataaataaataaaatattaaaaaataaattaacttcataattattaaagccaaatcctattagataagggaaagggaggcaaaggggaggggtcagctgtcataccctttggggaaagggaagggacgccataccacctgagcgccgcatgtgtgccatttaagcgctcgcgtatgccatctggcgcacgcaggggccttttgtgagcccgcttgttaaatttgagcgctaaaaataaaaatcgagttaaatgaattagaattaaagttgataaaactaaaattatattaaattaataaatgaaattagattanaataggattaaaattaaataaaaagttaaagttcaaattaattgaaataaaaaaaaataatanaaaaaaaagattaaaa

SEQ ID NO: 13967 - DNA, 2892 bp, Heterodera glycines
attctgtcccgcgctgtccgtaccggtatggatacactccgcaaattgcgtgatgggaagggtagcatcccttgctgatttgtcgccacgcctgtcgccatgttgcttcctctcgttgcttcgtttactctggcaactttttgttgctcttcgttcgttgaagcgacgggaccatccccgtcctgcacattttcgtcgtgctgtgcgccgttgcgatggtggccctcattcgctgggtccatgttgctttcgctcccgtcctcgaactcgaattgttgcatttgtcgtctctcgaaatgttgagctggagccccctgctaacggcaccagtttgccgttagcttctcgaattcgtgctcgttggtcgctcgtagaccgattggtcgctcgtagaccgattgttggtggctgcagttgccccctgctaacggcaccagtttgccgttagcttctcgaattcgtgctcgttggtcgctcgtagaccgattggtcgctcgtagaccgattgttggtggctgcagttgccccctgttagcggcaccagtttgtcgccaatcttttactcgggcgggccaagtgtgtggcttggcccagctgaggcgggattggttcccgctcctcttcaccgctctcgtccctttttcctctgctcactccgctcgctgtgccgtaaagggaatggccccctctttcgccgttcgtcctgatgggtctgatgctgctgaccgatccgatcagcgccaaagggggacgagaatgggaggggggaggggtgacaaaattgaactggtactgttggatgttatacagcgatttgctgcttgcttaacggcaccaccgacaagattttggtgaagggcttgtcggacccctttgagcagctccgaacgggcgggagttgctcgacaagattggttgtgaagggggcttgtccgaccctttgagctgctccgaacgggcgagagttgctcttcgctcttgactcgatgaaacgggttttgactcccgtttcctgcggcggatgctccggctggcgggagactgagaccgaaccgcgagactccggctgcgggaatctgaactgctcgaacttcgtgacgttcgctctcgacttgatgagcacgggtttcgactcccgtctcctcctgtggatgctccggctggcgggagactgactccggcgatgcgcgcttctccggctggtgggattagcggcgacgaacgggcctgcccttcggtggacggtttggcaccgctcggctcttccttccttctctgccctgcttggtttcgtcgacgacgggaattcgccccgtccctacggctgctccggctggcgggagactgacaccgatccgcgagactccggctgcgggagtctgaactgcttgaaattcgctgacgctccgggccaactcccggattctccaatgccaaagggaaaggaactgggatcgggaggattgggggagaacgacgagggctgccaggaaagggagggggtcaagacgtgaatgggcgcctccgtttggccccgcacgagaatttgccgaatgtgatggagtgtggagggtgcttttccctcctttccgagtcctccaagccgtttcagcacgaatttattaaagcaaaacgaataatgaataaaagcgacgaattgatcgaattgggcgatgggacgggggaattggaggaattggtcacaggcagaccgaatatgaagcgaagggacagatcccttggcaaagaatgaagcggaagaaaaggaggaagagtggtcacaggcagaccgaatatgaagcggaggggagtggaaggaagagaagagagcgaccccttggccgggggcgcttaaatagacaattttcgaagggggcgggcaaaaggccatgcacgtggacaaattgtgagagagacaaaaaatggacagaaaattctagaagcgaattgcgaacaaaggaaatgggcgcacaaaaattgaatgtgaattggcagatgtaaaaagtgagaaattgtgaaaggaaatctgagcacaaagttggccgaagatgagccaaccgatgagaaaagatttgaattgtgaagggatgcgatgtggcaaaaatgggacaaaggaacggacaaatgtgaatggtacgaaatggagaaatgcatatgagaaattggatggaaaaggggcaaaaattaggaatgatcaattttgaatgaattgatgaatcgggactcgccccgatcttctccaagaacatccctcattctttttgcttcgattgagtcccgtcccgttcatttgtgcaataggcggggattgacccgccttctcgtcgccaatgaaaaaattggcgacattgcccgcggcgccccttgacagttgaagctccgaagcgtgtgtccatgaattgtagcaacgggttttcgaacccgttttccgattggcattgcgcctcgttgtgttgaaaggggcattgctcccccaccaggatttgtcatggcaaggatagccatgcatcagctttttcgctggcagtccgtagttcacatccgtcgactttggcattgttgcccagcatccgtcatcgcaacgaatctcgattttgttaaattcccgcccactcacatttgtgactcctcgttctgcacactccgtggtgcatggaactcttgggccctctcgaaatggaaggttcgggtccattcccgatgctcgaatggatggttggcagccgaacgttccgacaatgctgatgagcatgatcagcagtgccatcccagttcttggttgaattgcgcctcgttttcgtggtacatgacgctccggggaccaaattgcccggcttctccgagcccttgccgatttcctgatttcaagtgcacgtactgcttgaactcctt

SEQ ID NO: 13968 - DNA, 2312 bp, Heterodera glycines
tttgatttattgaaaatgcataaacatttaaaataaaacatatacgtttaaaattgttaaattttctactcgcattcctttttgtttctatgtctttgagttaatttatcttaataattgttaattgatgaggaatggggtcgccaagcaaagatattaaaaacaaaggattaattaatccaattagtaattttttgagtaatgtaatggcgcggatagagttgtgagctgcttattttacgatcgtttcatagaccatttgactattttacccatttgctaagtttttaaacgtgggtttaaattccggggcccaataattgcttgtattttaatgtttgtttatagtttaatttcatttctctttttttgtcgcttttgtgttcgtgtgactttgtcacatttttttcctccgcgcaacatcacacgaaaatgtccccctttccatccaaaacaaaacataaaacgcacgaatcaaacgaacaatttttcagctgcgcctttttcagtccgtttttgccatttttgttcacaacagccaacgactcgactgagcacaacgaccaccacactatcgaccagtaaaaccattacagcggtggcgggtcgacgagtctttcccccgccgccgttcgccaccgccgccccttctcttcggctggcctctttttcaccactctcttcgcccgcctcacctctcccgccacttttatcaaaacttatcatcggtgcgtttgttggccgtaataattctccccggcgtttgctctgtccccaacagcgcagcagcagcagggcactaacattggccaaaggtaaatgactataaaagccaccaaccaaactgaattctttaatcatcagacagtttgacttttcagcttaaacttgtgcccctttaattgaatcataaatttattaggcttcttcctctctacatcagccgcttttatggcggaaaggagtggcgccggacacataaatcacaatggaattgccacactttccgaacgtaatgcgcacagaacatcggtgcaacaggtgatttttgagaaacagagggcgccataacattacaaataaaaataaatttatatttcatacaaattttgtatatttttatataatcattatactttaaatcctactttatctatgtttgtatatatcattttgtttgtctttcttcagtgtccttcgtttgcgccgtttaaaccaaatcgggcattaattgtttcaaaatcttcgctgcttgagtatgaatttgatcggagagggcctaaaaatgaatacagcggccttgacgacccgcgttttctcaaggaggtcactgattataaaaaaaaaattgggtaatacatctttaaatttagttgcatatacaacaaataaatatggaagaccttagaatgaggcataaacttcagttacattatttggacacaatcgttgaagaattggagtaagaaaagaaatgaataattaaaattagattttacaaattcattttaggaggcataaaattgagtggaaaattgtccggcgtcggcagtattcggatgcacttgctcaatgggctgatttaatcatttccgcgggtggcgatggcacttttctcaccgcgtccaaacgaatttcggatggccggaagccggtgattggcatcaacacggaccctgtcgggtattctttttcggttttgattttaaattcaataaaaacttatagatcctttcagttcctttacttttcttgtaaacgagtttttaatcaactgctgtaaaatgtttgtattttcttaggtccgagggttttctttgtcttacgggcaaatcgcgtcggccggcggacgaagtgatcagacaatttctcgaggagagttcaaaaccgaacttccaatggatgcatcgccagcgcatccgggtgaccattttgaaatcgatgggagcccacgacgaacggtcactttcctcctcatccatcaaccagcaggtgaactcacggttagccgacatttgcggaccgtcttttgcggaccgacatatgcggatcactatttctgggttaaactgtctaaaaacaaaaaataataatttttttcaaaaatctgtgaccaaattagttttatttgtgattttccgacttgaacaccacccttaaagagtaatctgatcaacttctgcaatcaacatcgaaataacctatttttttatttataagaagtttagtttccattaataaaaatagtctgtagttgaacatttttaattttggatcaataattttataacagcaaattacggacaattttt

SEQ ID NO: 13969 - DNA, 1578 bp, Heterodera glycines
ggaatattatcgcattgacgtttcttcacataatacacacatctatagaggaattgttatccgcaaaagtcggtccgcaaatgtcgcactcacggaactcacaggcccttaaccagaaaacaaaattcggaaagggggggggggcgggggcgtcagacccaacgagcttttttttcttttgctcttcgccccagaaaaattttctttccggatcccaatttagcccactttggagcgaaaattattttttcatccattcgagacaaaaaatgttttcatttcggagtagccctgcccctcctggttacggacgttcagctcttatcattcatgactccttttttaacaataatttttttagtttttcttttcttaaaaattatgttcttttaaaacagaaaaaaacagtttcttttggttaaatcttaaccaaaatttcagatggcacagtgtgagcaaatggaattgccaaggaaagattcgatttgtgatgaccagggagaccaaacggatgacgacgaggtgtcgaacatgtccaaaaaatcaaaattcaggtaattgaaaattgttgggtgtttgatgtaatacgtgtttgtgctttattttagttctgacgatgaagaacaattgaacgaaagagccgacgcttacataaatggggaaacttcgcacagattggcactgaacgaagtattcatcggtgaaagccatgcggcccgagtcagctattacgatgttcaggtaattttccaaaattaattgttaaaataaaatttaaaaaacttagaaggcaatgaaataagcgaaaggcttttattttgcattaccattttatagattctgtttcagtttacataatcaaaattaatgactgcttaaaactgtgcaaagccataataggaaagaggctcttactgattgtgaaaataggccattattaaagcaaaattcgatttgttttcagggggggggagcacactcattgtcgataaataggacggttttcggacaagtaatttgatgaaaatgccaagggcatacacattaaaaagcagaaagaaccatctccaccccttttcaggttgacaacggaccactgacaaagcagaaaagttcggggatgacaatttgtaccggcaccggctcaacttcttggtctgcgattttacgtaaattatttcaaaaaactccgttcataaacacaggcattacaacataaatcggctgaccgaacaaactttgggtgaaattttcacggagatgtcactgatgggcatttcactggacagagaagtggacaatgaaatggtcgaggagatttgtcgccattttaatgccaaactcaaattcggccctgagcagaacagttcggactttatcatatttattattactctaattggatcaatcgctcaatttgttgctaaatgggttcgtttatcccattttcagagatggcgttcagtgttcgtgaccccgtgttcaatgccactttcccaaagacacttatccgtggatttgctcacaaaatttttttaaaggtatttccaaggattgcacttcattttttcccctctg

SEQ ID NO: 13970 - DNA, 2312 bp, Heterodera glycines
ccaaaacccgaaaaaattttcaaaaaatcatttttcgccaaaatttctcgagaatattgaataaatttaaattttcttaaaaattaataaattttggcttttatgttttttttcttttaaaatgattgcacgtaattgccgaaaaaattcgagaccaatttccgaatgttgaccgactaattgcaagacgaaagccgtctttgtcaaagcgccttaccgagtcaaaaaatttggaaatgtatctcatatgcaatttcaaccaataaatttgaagaaattttgcactcaattttgaaaaatttatgtccatattttgacatttttgccatttatttccatattttgagatttttgccattttatgtccatattttgcgatttttggtccatattttatggccatatttcgcgattttatatccatatttttaccatccctattgataacgcttcagttggttctcctcggcgttcatcgtgctttcatcggcggcattttgttcatttctctgtgcacaattgcacttgggtgagtgccagaattgttgctgagctaattacgaattattaaaagataccgtaattaacggataacggttgttcgggtgccgacctttttgagttccttctggtcataacttttttgaaacttaacgaaaattttttaaatttagcctattaatagtaaacacataaagctatcgaacaacaccaagaatgcttaatttgatttacaatgaacaaaattatgatccaaaaagtcttccggcgacgtttcggccggcgacgttttggggtgcccccttaattttctcccccgtttttccccctcagtttgtccccatgctttccgtaatgaatttaggattacgggatccggaatccaggcattaaaaggctaggaattcagggatttattccggaattgtttccaatttcggagtccagtcccactccaacccatggatttttttaattttgtccatttttttgctcagtttgtccccatgccttccgttcggcacgcctttctttgtcggcgttttgcttctccgagtgggcatagcaattggcaatgcttcatacacgaccagctcctgggcactcattggccatttgtttccgcaacggattgtgctgttcacggttgggagacgaaggcattctcatgggaaaggtggccttggcaaattggccactaccattcccattcaaccaattgaatttggtgccaattgtgattttgggctaacattgattgagatggcattgaaatgccataatttgttttttaaatgtcatctctggcactttgagggccttttggaagtggcatacggacttggctatgtgcttgggcctccgttgggcagcgctttgtttgaattcggtggcttcggactgccgctgtactcagttggcctttcattcgttgtcgtgctcgtcccgtccatcattttgttctctaatcgacggcggcattatctctccattggcatgtgtttatccataattatgggatgggaaggccaaaaaatgcaaggatatgaaaatctggcgacaaaaatgccgggataatggcatcccatctctagtctagtccattcaatcagcagggttggagcttagatcagaatgtcacggacgcgacatagccaccattttttgtgtccaattatggcattgaattttcctcttatcagaaaaccaaagtgccgtccgttcggatgccgagtcgggcgaagaagtgccacctcgggtgctccaattgttggccatccccgacctgtttctggccgttacttccctgttcctcaactcaatctgctggtacttctatgagccttcgttgaccactttcatggccgatgtatgtaattggaccagggattatgaattttcaaaaccaaaaatttcccaagattctcgactatccaattttaatgaaattaatgatttttcaattatttttccttaattttcttcggcaagatgattacccccctaattgccttctctcggtccactcctttgatcatttcgaattcctttgcttcactgattggcataacaaatttccaattttcattccctaattacccccattctcggtccgtttcctttgatcagttccgccttgactggtccgcttcaatgatgtccggcattttgatcgctatcactgccgccgtttacatagcatctgccaccatttggactttacttttacaacgatatttgagtgctcaaatgagaccgatgatggtgctcatttcagtgggaatgggtagtgccgtggtttttgatcggcc

SEQ ID NO: 13971 - DNA, 1100 bp, Heterodera glycines
cagcagagccccgccgcaattggcgacaattggccatcgccatgcttctcgtcggctccaatttgttcatcaccattgccgtgtcgtgcattgtgcccattttcccaatcgaagttcggcttttggcaaaaatttgaaaaaaaaacaattagttgtttagtgaaaatcaagggctattcgatagtctcagccaagaaaagtcgccttttcaaggtcctggtttgagaccgaaagtagagagtaaatgttgttcaaaagtatcgagacttggatcgaggcctgatgactgagcctggctttttgaaatttgtttaaaaatctaacgaatgtttgaaaaaagtaaattcaagccgggacctggatttattggacaaaacaattaaccatcattggttttttgtgttttcaaatgaaacaatccattatttacgatttttatctcaagaatcagagaataaatccattaaaatcccaggcaaaagcgaagggactcagcaccactcaggtccggcttggtgttcagcatccaagtgtccggcttcttcttttcgctcgtcttcggcaaatatgtaaactcgggcgaataattgtgagcccggctagttggattcaaatttggggcttgaaactgaccccgatcggatcgtcagactaattgatatgatccatgatcgaagtcactccttttagcacttgacaattattgaattttcattttccatccatttctgtttgataactagggatggtaattatatggaaatccatatttttttcctggaatgtgggaggcctgaaacgcacgaaaaacatgtttttagcttggtttgaagcttctaggaaggatttctatatccatattttccatatttttccatatttcgcgatttatgtccatatttccatatttttccatattttggcattttggtccatattttatgtccatattttggcatttttcaaaaaaacctctattagaacggcccccagcagctaaattagcccttttgagcccaaaacccgaaaaatttttcaaaaaatcattttttcgccaaaaatttctcgagaatattgaataaatttaaattttcttaaaa

SEQ ID NO: 13972 - DNA, 1075 bp, Heterodera glycines
ataaacttgtcaaaccccttttttcgcaccgtgaatgttatttttattgaattctgaaccggtttgagtagattagactagaaaaaattgaaaattttgaaatcatgtttcccactcccttctcccaggggtattattttgtaaagtctttttttccccaataaacttgtcaaaccccatttttcgcaccgtgaatgttatttttattgaattctgaaccgttttgagtagattagactagaaaaaattgaaaattttgaaatcatgtttcccactcccttctcccaggggtattattttgtaaagtctttttttccccaataaacttttcaaaccccatttttcgcaccgtgaatgttatttttattgaattctgaaccgttttgagtagattagactagaaaaaattgaaaattttgaaatcatgtttcccactcccttctcccaggggtattattttgtaaagtctttttttccccaataaacttttcaaaccccatttttcgcaccgtgaatgttatttttattgaattctgaaccgttttgagtagattagactagaaaaaattgaaaattttgaaatcatgtttcccactcccttctcccaggggtattattttgtaaagtctttttttccccaataaacttttcaaaccccatttttcgcaccgtgaatgttatttttatcgaattctgaaccgttttgagtaaattaaactagaaaaaattgaaaattttgaaatcatgtttccccctcccctttccccaggggtattattttgaaaagtttttttttccccaaaaaactttttcaaaccccttttttccccccgggaaggtttttttttttgaatttctgaaccggttttggaaaaaaataaattaaaaaaaaattaaaattttttaaaatcatgtttccccccccccttttccccgggggaattttttttgaaaagttttttttccccaaaaaatttttaaaaccccctttttcccccccggaaggttttttttattcaattttcaaaccgttttgtgaaaaaaaaaaaaaaaaaaaaaaaaaaaatttttaaaa

SEQ ID NO: 13973 - DNA, 1566 bp, Heterodera glycines
cctaaaatgtttttatcgttgtctctctctctctctctcttcccttgtctctcctttctctttcatcttcgacgcactgtcctctctcccctcctctcctctcctcccctctctctctctctctctcaccctccctctctctctctcacttccatcgtttcttttggtctctccgaatttacaattgtcgcgtgtcggtcggtaccattccattcattcgtttgtgtttttcattctttgccccgtcactcaaaaggtcgagaaagccgaaaataaagagttttaactgttaattattggaggcaaagagaaaattgagaaaatggacgaagtcattgaccatttgagaaaaggccaaaaaaagaatggccaaaacaaccaaaaagaaaaaatgaaaccatttttaaaagcaatttaaaaatgaaaagggagtgagggacaagggacgaatgaatgagtttgttgtgtgattgatccttcgcttttccgtccgtttttcttttgtctgttgaacttttcctcttctttttttgttttttccatttttggtaaaaataaaataggaaaaacaaactaaaaaatatctaacagaggtttttcagcctttggtggacagtgtaaacgcaagccccggcggaagtctcagcgacgagccgtcggtgggcggtgtcgcggggtgggacgacagcgccacccgttcgagtcccggctctttcacttcttcgcccgccgctgccaacaggcattctcatttcggcgtttctccccaacaacaaaatgtccgtttatcgtcacacgatggattggcggaacggctcgacaaatgggaagcatttgaaggaaatggcaaaggatggcaagcgaaggaggagagaacggccaacaacgccttggaaatgccaccgaaacagccgaagggactttggtcggaaagggacaacgaagccatggcagcccaatggagttgccaaccaacaaaaacacttcaacagaaagtggctaaggtgatttaggaggaaaggaatggaacgaaaatggcggctcatttccggggggcggaagggacactttcatccatttaaaacgagtcaagccaaagtgccgatgagaatgccaaggagcacaaagaaagtcggaagtccaaagatgaaaagatcactcacagatccaacggcccatccccacgcgattgaggccaatcgttggccaaatccacggcagtgcctgccactccaacggctctcagcccgcttctctcctcgactccgagcctttgttccctcagccgcctctttcgcagccaaaatcactgcttttctctccgatttcgcctccgcctcggcatggaatgcctccgttaattggcatggcaaaggcacccgtgccattggagcagcgaacggaagaccaacaggagcaaagcatacggacaaacgcgaacagttgcgacgaaagcgaactgcgattgtaccacaaacacttggaattgcaacagcacatttacgagcatgtgtacgcacagatgctcagcacagcacaccaacagcagcaaatggacgcgtacag

SEQ ID NO: 13974 - DNA, 1000 bp, Heterodera glycines
  unsure (1)..(1000): unsure at all n locations
tgcaggtnncatgaggaaatgggaccntgaaaccaaaacaaaaagccattcattcgtacagaaaattgcggcattgagcagcacttccaactgcaaccctttgtttttccaacggagtgcagctgcgctggagttgcaccattggctggacgagtgtatggagcagtaccgcctgttggagaaggagcgcaagaagacggaggccgagttggcccgtcaccacctgggcaagcggatcagttcggccaattctcttccaatccctcggcttccgcccgccccttcgcgcgtcgaccgcctcatcgtcgactttttccgtgagcacgcacgcgtggtaacgcttctcgccaaaatggaacagttgagaggcgctccgatgtgcgaagaagtgcaccgtgtgagtggcgtttgcccgcggcgtttccttcactccgtccctccctcagatccatcgccaattcctcgactcaattcgcatgctccagcagagtcgtctcaacgaacgcacggccattctgcagcaattgcgcggcgaagtcggccgatactccgaggacagaggcgagcacaatccaacggggtgaagaagttcaaaatgtgttttcagaaactgccaatctgaccaatgcgttggtttgcgtgtgtaaggccgtgttgcgcagtcgcagtgccaattggtgctctttggcgtggacagtcgaggcgaacggtgccgagcagcaggtgcagttgcagcggattgtggccagcggctttgagttggcaccgccggagattaaacttcggcccatttgagcgatgtgccggggtgggcactgtccgtggactgtccccgcatttccctcgcttggattttcccctcacaatccctccaattcttataatttcgttcgttcgttttgctcctttccgtgccttcgcttctctcctcctttttcctttgtatttatccgccactttcttcactaattaccataacaattcttaaacatttgtcgct

SEQ ID NO: 13975 - DNA, 2028 bp, Heterodera glycines
ctgaaggcggactttggggcggagacaaaaattgccattcaatcgaaaggggcgaattatacggacggacgaatgcacctagtgcgagtgatcagaaaggacggggaagtgcacttgcaggtgggcaccgactgatcaagcgggagcggacaagaacagaatgagtcgacgattgttgcaggtcgacccgccggagggcgaccatttatccatcactttgacggacagcgaagcccttttggacatctccgagtccgatcactttgtcggcggtgttcctcccgactttccgcgcgctcgctttacccaagaccatgacattcattttgacggctttttcggttgcattcaatctgtccagcccaaccaagtggccgagttagacttggcaaatcctgagagagcacagcgcaaaggcaccgattgcacttacagagaggggcgactgagcacaacggagagagtgatcggattcaaagtcggactccccggcccattttcattttgtgccgctgaatttgccccgctttagggattaaacggtggatttttaaaatctcgcgggattttgctggacacttcctccaccttctcctttaaccttcgatctcgacgcgaaaatgccgttttgttttaccaatcgaaggaattgcaccgcgcagaagaggcacaaaaggcacggagaaggcgacggaggacaatgcgggggaataggacgagcggacggaaggaacggcaaaagagacggacagaaggaggggacgaagaaacgccgcaggtaggccatgggacgtacagaaagcgacaggcgattgattggccgatcgatcgatagattaatcggacgattttatcgattcgatcgattgatatccgattcattaagcatagtttttcgttcagtcatttttggccatttacttgctggacggccgtctgtccttccacctcggcttcgaatcgcaacactcttccaagcgtcctttggtcgtctcctcccaccgttacaacgacggcctcctccactcggtgtttttgtcccgtcttggcaaagagtgcgtcaccatccttttgttggccaattttatttggtttcttattgaagagttcaagttcgtattgatgaccgagaagtgttggccacagttttggacgacgaccgaccgattggtggcattgggtgggccatgctaatcggcggctttcccgcccgactcaaagagttggccacgcgcgcattgaatggcaaattgggcactttggagccgatggaaggctgtctgtccgacttccaactcaattacgagtgcattttgttttggttcgctttcccaaatggtttgctcagatggctgcccgttctgctggaggctcatcgcggtgccgttctcggctcgtgtcctttcgaaggcggcgatttgcgcaccccatggtcctccggcggcggcggcggcacttttgccacttcgccctcctcttccctttcggatgagctttcttccgatgaatcaccgctttcgatggatgtcccaatggatgaagcaaaggaagagcaacaaatggaggaaaacggtggccatttccatcacaaaaagtcgcgccaattgctcgagcaggcgactcctcagacgactttgtcgtcccaacaacacaaaacgaatggccaaagtctcccgaaagccttttaattattggctttacgttcccttcagttcacgtgccaaccgaaccgcaggaacttcgtctgaccacctccgaattcgttcatcagtccccgcagtgtttagcaagtgaattgttggccaaaaatggcctcgatgagaatgaaaatgacggcgttcactttgggctgggcgattacagtcactctcggcttaacttcgaccagaagccctttcccgactatgacaagtgcctgccatttttatctctctttctccaatcatttctttcagcttctccataacttttgaaatgcgctcaaaaaagcgcggaatcgacgggttactgtggacatgggccaactac

SEQ ID NO: 13976 - DNA, 1457 bp, Heterodera glycines
cccccccccccccccaatcttaggtggaccaaatgtcagtcgaaaaagtatggacagtccgacgcccaaagtgatgcgtcgacgaatgtatgtggggggagtgatcagcaaacaccggcgaatgttcgaagatcagctgaagggcgacgcattggcaagggcattttcggtgggtacctgaagaattgcaaaagaaatgagaacaaattttgttaaataaataatgaattctttgacttttgcgctaatgcaaaattttgccaccccaaaaatgctaattaattaattacttttaatgataccctttcatttcgtcaaattccgctctctcaaattgcctttagggatgcattcgccactttcgcatcgacggcaaagagcagcgtttgcttcggcacagtcgtgatttggtcccttgcgcggattcgcccgccgtcgcttacatccacgagggcggatacgccacctttggcacggcattccatttttatgagcatcagaatttttgattaaatttcttttcagaatctctgagttcgcatgcaaataaaaaggcgaagtctccgcccgaatttatcgaattgagcgcgcaatttcgcatttttggccatttacgacagaatgccaacggcggcgccaaaacacgccttttgatggctcttttgttcgcctccaaagactcataccaaacgaatcgacttctgctgggtgcggactcagtcagtggggcggtgagtgcgcaaacattcaattgaccagggccaaatcaaatcgcaattggcctattcagctgtcactgtccatccatctggtcaaatggcgtgtccatttcgactttctcttcgacggctccactccgtcgaatgagtccctctctctgtcctctctctcctcttcctctctctcttcccccccatctctctcctcctcttctctctcctcctcgtcctcttcacttcctccattgatcatttgtcctggccattggggccaagtgcgtctccgtctctcccactcccttttgaccctttctctcgacggcttaagtgccgagttggccatgtcacttcctcgtcccgctttggacactttgcgttctttgccggtcaatttgggtggcaccaccggtaaatcactgacttttgctttttttacttttctcttttccagcgcctgtcggcatttcgcttggcgtttattctttgaatggctgcgttaagcttttctcaatgaatggcatgccggtgaatattgagcacgaaaaaacgaaatggcacaaaatggtcgccgacggatgtccgaagccaatcgactgatcaaatgttctaacagagattaattatgcttacaatttgtttccttttttttacctttttttagaatttgttttcgtgcattattttgaaagtgttgccattgttcaaaatggcactttccttccttaccgctatcgtacg

SEQ ID NO: 13977 - DNA, 2330 bp, Heterodera glycines
aaaaaatttgttaagtttaaaaaaagttcgagccccatagttggaaaatttggttttttgaattcttctagcaataactatttttttaaattaacgaaatttttccaaatctttcaggctaatagagaacacttagggctttcgaatgataataacaatgttagatttggttgacaaacaaaaaagttatagtccaattggctggcgcccaaacgaggtggaccctatcagaatgactttgcttttatgaattacaaaaacactccgtttgtgggactttccgcttttttaaagcaatcttttaggtttccggtgttgtgctcttcagttttgctttgtggcttcaatttgaccctgcccgtgaatttcttctccgtctcgtccacttctccgagtccactccctttttcgagatcgctgtttacttaatgttgggcacatcgctcttcatttttattgccgtcgggattggattctcgggaatttggaagttggagcggtgtttgcttagcggagtgatttttttattgcataattaacaattgccataaatttgagttaattgtgttgcctttgctgagaagttgggctttgataacactaaaatcactcttctgaattcagttctctgtgcttcttctgctgttgatacattgcaaattgctcatcctttttcttttggttgcctatcgttttaaggtgactttgtctctttgaatctcaatttttggtttttagttccctgatgacactgtaatgactgagtacctcagtaaaatggcccaacatcactaccatcgcgacaaatgggtgaactcggcaattcacacaaatgcattcccacaaaatgttattttaggcgacacctctgatggattccatccaattctatgtaaattttgtttatccatttcaaagcatattttcatgcacagcacaaatgttgcggaggaaacggtgcgcaagactattcggagtcattttggtacaaagcgaacgcccaaatgggaatgccaacaaacggtgagttcttaacatttactagagttgtttttttcttcagttctcacttattttaagtgccttattcttgctgtctccaggcgcaggacgcccgggcttggcacttgcagcccattgactcgatgtgcaatcagtacaaatacggaagtcgcccattcaacgactcagtgaattggacggtaaagtgtccaacgcgttcaggagagaacattagccccttttagggctgcggtaaacccacctttgaccatttgaattggcttctgcttatgttgtcgatttttctcattgttttaatagtgcttgacgtaagtctttgtcggcccattcattccgaacccttttcccttctttaaggcgcttggacttttccttgtggtgaaatgcctccgtctagttttgtcgttttacacttccatccgaagcctgcgatgatgccaattgtgattgcgttatgatctcacaacaatgccttcatgctttctcaaatacctcactcatttccttcacacatcaatcacccttttgttttttgtgtggctttattttctctgtcaacgattttattcattgtcagtaaaaagcgatggtaaaattacaaaattagtgaatggatagcaaaagcagcatcgacaaagggatttgaagatcaaatgaaagtgaagataacggaatatgtttaagcgaaaagtctaaagtgaaaaacttgtgacaaaaattgcaaagggagtggatataaatgccgtcgaattagggaattttgtccgttgttttcactttctctaaactgggaaaggacattgtacaacaaaaggttcgacttttggttttccgttttcactgtcctttcgtccgtctattccaagctcagcgagtgaatgagtaaaaaaagggagggggggggggagacgaataatcactgaaacgccgtctcaaaggatttcgcacttggacttctccgcccacggattgcgtgctttgtccaccggattgaccagcgggtcatttggctggtgctgctcaatgtacgccttcaattcggcggcggatcgcgaaattggcactcgctgaaggaaaagcaaaaatgttaagcaaaaaactctaaaaaaatttatttttgcgatcatcgaatttcccagcagggcccaatcaagggccacccaattttacatcaaacttttgtttaaaattgggtacttatacagtttgacccacataaaattttttttttgtttttaatgataaaaacgtgtttccaggggttttcgaggccactgatcatgaattgtaactctatttgacgaatt

SEQ ID NO: 13978 - DNA, 3335 bp, Heterodera glycines
ccgaaataaagaacgcatacgtaaatatgattctttattatttgtgcgacatgattggaaaattgcaatttattatcaatatttatgcctaaatccctaattgtatccacaacatttattatatttccatcaattttatatatttctttggggtttttattccccaagtaaagtacaaaagtttttttaattgagattctgatttgccatttatttgcccattctgataaattatgcaatgctttatgcataatttctgtgtcaactctcgctttataacaaatatacaatttaacatcatcagcatataatttaattcttactcctgatggcaaagcatcaggaagatcgttaatataaatcaaaaataataaaggtccaaggacagatccctgggggactccagaggtaacttttttactggaggataaatcatccccaattttaacacaaagtcctattactcaaaaagtcctttatccacatcaaaagtttgccccttatacctattttttccaatttgtataaaagtaattcatggggcactgagtcaaatgctttttgaaaatcaatataaatacaatcaacattttttccatttattattgcctcgtaccaatcttccacaactgttattaattgactcgttgtagacctatttctaacaaaaccaaattgaaattccgaaatttttttgttttttaatagaaaattgtaaatatctttgcttaaaattctttccattaccctgcagagtgagcaggttaatgaaattggcctatagttttcgggattatttttgtcacccttcttaaaaagcggaaaaacaattgattctttccagatgtctggaagtgaaccagtgtctaatgagatcctaaacaagtcagtaataacagttgacagagaagaatggcaaatttttaaaattttataactaatattatcgggagaagtgccatttttattcggaagttttttcagaagattttgggtctcgatgatgttaaaatttatatccgatataaagcattgatcaatttctataatattacccaagcatggattgcttgggtcggtttcactattattaaatgaattggcaaataaggtggcaaataattcacatttctcagcactgttatgatagcatttattttcataaattagattaggtatttcaaagggattgacattgaatttttgtatatatttataaattgaatttcttccctttgaaatagcctttttctcaatttggctatggtatttatttgtttgtatttttatatgtaaagaaatgctatcgtatagtgcttttttggatgggtcagttttagctagcctgaataatttagccttatcacatcgaatactgcaataacacccttctataaataatttatgtaataaaataataaatttggtaaaataccaaatatttaaagcactttttgcgctgactacggaaacactcgaattggtaacaaacaggaccgattggagtccgcttcacattggcaaataggcagactaatggcacgaaactgatcagctcgttgttcaattcagccggcaggagtcgacgaagttttggctttttctcactcattggaaggttcaaaggattagagcgtttcatttttccagaaattgaattaagaatgatttcgatttcttgctgggaataattttggtgcgcaagtgggcgtggccaaagtgcgcgtatcgtacaccctgtcattttccagattcattttaaaaattttgcactttttttttgcacatctgctgtttttctgcgctttatgggcaccgtattatttaattgggaatttagggaaccgtataattaaattttattaaaattatatgagcatgcctaaatgtttattcatcttccgtctttcacctcctttattcttcacactatttccatgctttgcgcatataaataccgaaattttgttcactcctcctcaatccctgcacagatttaaaaatatggacaatcatccccgaaagcgcttcactaacttttccattgaccatattctctccgagcccaaaaaaccccgacaaagcttgctgatcaatgaacatggcatagtacacttccaagccgaaggagcatcgaaagtggtcaaagactacgttaaaaaattggagaaaaacatcgagcatatggccaaattccactatgtcaaagtcaagtcaaaattcatcattaccgacttgccgagcacgcctgaggcaatgtggacctggactttcaaacattatatcgaggaggcatttgctgacagtcgtgagcgcaacatcgaacctacacacctcggctgtatgatcagcagtcctatgttggaaggcggcgacatcccaactccagtgcgacagatgactaacaacactctcgacaccattctcaaccagttcaaaaaagtggcgcagtccaaacaacagaaaaatgtgtcattatggggggagccatttaccgtcaccatcacgactctcgaccgtaatggactaccatccaaacgtcgagtcaacgggggagctcgtcgccctatcaaaacggctgtccatcaccgaattaacgaccaatgcctgattaaaattcgtaataacgacaaccaatactgcctgttctacgcgctgcaggcaacaatggtcgccaaaacgtgcaattggcctcgctggaagtttttcgactatgtgaacgacagaaaatgacagcagggacaacttcacatgatgcagttcagctaatgcagcaggttaatgcaccaatggatttggttggctacgacgcggacacatttgtgcctcaagtcgttgactactggaacaacgcgcagcgacaacaccgctttgctgtgttcatctttggatcgttgggacagtataaaccaatctacaagtacattgacaacacctacgacactccgctgctgttgtacttcaatgaagaccatttcgatggtgtgcagaagcagggcggtttgttcggaaaaccgtactgtttggagtgtgaacggccatacgacaaaatgtcaacacacaacaaaacatgtaaagcgcgctgtatgctgtgctcacgtgttggaccgctgtttccatgtccatcatctgccggcttcatcaaaaagtgtaaagagtgcaacaaaaaattcaccaacaacggctgctaccagcatcacctgctgtcaggcttctgcaagcggtcgaaaaagtgcaaagattgtggtgctgtttgggatgttgtcaacaacactcagaagggcagaaaaggacatgtgtgtggtgaacgcttctgtaagatggtgcaacaacta

SEQ ID NO: 13979 - DNA, 3182 bp, Heterodera glycines
tgataaaattgcttggcatcgggcgggaatcgaacccctttgaccatccaatccgttggcaaaccctgccactgagccaccgaatccctggcgcaattttgtgccaaaaattacacttcatttatcttcagaaactttgccctacgatgtgactttgctcaaaatggattttgagcctgactttggctgcacaatcatatcgcatagccaccgttacattggtcagttttttcaatggaaatgagacgaaaaaagcgcgaaattgcacaatgcctaattaatggcaattaaatttgggccatttttttggcacattttaaatttgggcattttggcacactttctcttcagctgatattgtgcccggaagcgctgcgcaccgttcggcccgtctccgtgtgggcgattgtgtggttgcggtcaatgggcactctgttgccagcatgggccaccaagtgggtgcaattaaaattaattaaaaaaccaattagcgaactaattgggcgagcaatggcaccgtccaattcagtcccataaacgaaatgaccaacaggaagcgattttgccatcttttgttgattagcatgtgaaaataataaaaatacgacgccattttggagtgaaattctttaaaaaattcgacaaaatttccaattattttttcgaacggtccattagaaaaatttttttttaataaattgactcaaaaaaatgcaaaatacggtctttaaaaaacaatatttgttaaaaattggttttttgagtgatttccatggcaaacaaaaaatttctttggtattttttggcatcatttccaaaatgcatgccatcatttgtaacacccttttgacatctgatttcgcttccctggggcaaagccatcgaaaaaatgttttctcgagacgatactcgagaccaagtcttgctaaagcagtactcatccaaaagggttggcgcttgactcaaaaatgggattaattttggagtggttattcgagtgttttttggcacatttatgggcctcaaatggcacgctaattagtcgcgcatggaaagcgtagaattttaatgggttattttggagtaattagtgcaaattacgaaactcccccccccccaccccccctcattcagcaagtgttgcaattcatccgctccaccggcaacacgttgacgctgaccattgagccgacgcttcgtctgatggacccgccgccgtccgccgcttctccgccatcattagcagctgcagcagcggataatgcgcagcaatcatcatcctcattatcatcaaattatgcactgttaaagcagcagcaccgattgtcaaacggtgcggcggccgcggcggagtacggtaatggagtcgttggcggtagtggcggggccgttggtggtggtgggtacggtgttgttggcgcaaggagtactgtagtgcagcagcaacaacaacaaccgcaacaatggcggcaacagcagcagcagcaaaatgtaattttgttttttgccgttaggattctgtcggagagtggttactgtaacaattaagcatttgcccaatttgttcacggttgagttggtgcggggcgagcgcggcttcggcttttccatccgcgggggtgccgagtttggcatgccattgttcatcctcaaggtgggcggcggcatttaaaacactaattaaaatgactcaaaatggtgtgtggccagcaatgaaaagccagagagagtcacaaattgaagaaaaatgacttctagactgggcctggtccccggcactcggggagagaaaagatcggggattaggggggggggggggaaattgtccgacaaaagtttggcacaagcctacaatcagaaaatttcggaggggggggggatccctattttattttattttttgctctttaccccaaagttttcccatgtaattttacatgagggtttttggcagatttgtggcccaaaaatgccaattttgggaaaaaatctaaggcgtaattaggggtaggggggggcggtgccgtgccgaaaggcgccgtaatgggaaaatttaacaaattttgaaattcgtatgcgcatagattgccgaggttggcccagcagcgggtagtgccatgcaaattggcgatcaattagtggaaattgacggcgaaagttgcattgggatgagtcacgagcgagccattggcatgatcaaggagaggcaatgcgtgaggctcacattgagccgacaaaagctgtaacatttgccggacaaagaaagaaaggatggatgaatcgacgaatcatcatcatcaatcacgcgaacactcaattttaataataatttatataaataaatcattaattttcattttgtttcaaatcgattcaaaaaactggcacaacccaagggcgagggaggggggacaatttgtcctggaattgtgaaaagttgtaattgtttgatgattgagggatttggcatttttttttaattttaacaatttattacgagattttttagtcgaaaatatattgttttaaactcaatatccataaatatagaaatttatttgggctttctttcataaatgaaatatttagtatggaaatattttaactttttaaatcaatttttatcattttttataaatatttttgggttttttgaaattttttaacaaaaattcagtagcaacgaataatttacactctaagaattgctaaaaaattggttccaaatggcatccatctcaaatctcgcaatcggaaacccgcaaatttggcattttttgattgggaatgaatgaatgcattagttttttgaatccgttttttatgctaatttaaataccaatacattcaatcattcatcattcgatttcagggtggcaatttgtccctattttgaggacatttgccccattataacaggggtgcgatcgaaaaattttcaaaataagaacatcaaggccaaaaataagatttttgggtccaaaataaggacattttgcaaaattgctttaaatcgcttgtataacaaacactttattcaattaatatagcacatcaacttttgtatttttcgcctccaaccaaggaattttggagaatgggggggggggagatggtccggcggtgccgataggcgccaaaaggggaaaattttttgtaagttcgttatgatttttaacaaa

SEQ ID NO: 13980 - DNA, 965 bp, Heterodera glycines
aaaaaactgttattaattgacaaaattcgggtaggtgcacgcgatgacaatgagattcataaatcaatgagagtcaagagaaaggttcacaaaattcgacactttggctaattgttgcgtcatcagattttttttcgctcattcaaataaatggagggtcagaaaaagtaattttcaataaaaataaaataaataaacgaatgattgacggtggcaaagcataaatttgcgggaaaaacaggcataaaagttcaaaacgtaatcagaaacaaagagtgaaagtgaattgggccggaggagagagaaaaatcaaacaaagtcagacagtcaacccaatcaatcaatatctcggctttcatcatcactgttggctgttccgagccgactcccaattgttgctggtgtcaccgtttcccgtcgcgttcagatctacttcaagctgctgctgctggtagtggcgaactgtgcagcaaaagggaggagcgttttttggtatttcaatgggtttgtgactaaagtttgaattttcgtctttttgttcgaatttgagtttagggctctgaattaatagaaaatgggtaccggtctcggactccatttttcaaaatgaatttgaattaccaaaattgggctgctgtggcgttccgccgccgtccgccaccaccgcactccgtgccgagcgttgcgacggattgcgcacaattggcgtgcccccactgctgctggtggtcagtgtgcggacagaagtgtcggtccagaagtcgtcgttgcctaaccgaagcaattgggctatggcactgacgcagcggtggcgcagcagcggcggacagtcaggacgagcggagccgaaaacgagcggaccgagcggaacggacagcgcgtcgatggtcaacagaccgaacttgaagatgttttcaattcacagatttgcccgaattttgggggtcggtcaaatttatgcaaaa

SEQ ID NO: 13981 - DNA, 2791 bp, Heterodera glycines
  unsure (1)..(2791): unsure at all n locations
ggaataggtcaaaaaagtcagcaaatggaaacacttaccactggcanatcctcgacaatgccggcaaatccctccaaaatgggcccatcgatggccaaacagcggtccaaaagtgcacaaatctccttgccatatgaataggggatcaacgggtcgcggatttgcatcaaaaatttgttgacacaagcggaaatgacagcgggaggaaaagcgtcctaaaaaggggcaaataataattagtataattaagcaagcattgtaccaatttcgggtagcttttgtttggggcgagaaattgctttgtgacggcctccacttcagcggggcttctaaaaatgatgaaattccactaatgatttgtcgaaaatgcaatttttacttatggcacctatcggaaccaatgttttccttggaaattttcaattaaggcccaaaataatcaaatggtcatcaatttgccctccaaatttctttttgcccgtttcgttaaagaattacccctcaatttggtacaagtccctgtacggcatgtatgttttgcagtggtccaagaagtaagtgcagaaaatgaccagcggaggaaccatcgggcgggagtcgggacagaaatcacctgaaaataagcggatttcttgtaaaattggcaattttgagttttctttgatttatgcgtctttacatggcttttaaaggcgtcattaaaatcagtttgacaattttaacgcgtaaaatgccatgtaaccaaaaaacgcaagagaagacatttgactggcaaggcattctaaacaaagacccaccaaggcgaggacgtccagccgatttgttgccattcccagccactttcggcgtgttgtgccgacggacgcagggcaaaggcgcaaaatggcggcacgactcgtgaaaaacttctaaaaaatccgttttcatcccaaatccaatttcttagcttacctttgcaccgcgtgcatttcacataaatgacattgaaaccgatggttttctcgcaacgagtgcacgagtgtttgaggaggttgcgtctcttctgaaacccatgaaccatttggtcggcgaacaaccacggactttcgcacaccgacggcagcaagtcgtccaccgcttcgtccgaattgtttctactaaaaatgggaaacgaacaaattattgcattcgaacggcatctgtaggcactgcggaaccaccaacttcactagaatttgccaaaatctctccaaaaaatcataaattcgtgtccaaaaattccattaaaaacgaaggattctcggataaatcaaatgcctccccttttcggcatttttcttggtccccacccggtcaagtcgccatgcgattggctgatccgactgtttttgaccaacgccggcaccaacgcccgtcggcgtttgatgcccccgctggcgttgacggtcagtgcctggcgtgcggcgccggcggtggtaacgccggcacgaacaacgctctgtcccgcagcgattgtgccgatgatgcccagcggtgtctccggcggtggcatggatcacggagcggcgaaccgccgacgcgtcgccgcccatccgcgagcagtacgcgtcctcatcgttgtcgtccgcgtacggaaactgcgacttgcgcttcttcggagttcgcggatagaattgctgcgattggctgtgctgttggctcagtttggtcttcagctccttgttttcggtcatcaaaacgctaaagtttttgtttattttaaatgctcaaaatatgccatgtgatgggtggttggaccaggcccataaacagggtttatttaaaagttacaccttttctttaccggactgcttaaaatttgcagcatttttctgtttaccgcacaccggtggacgcgaacttcccgagaattattgaaattagaaagccaaaaattgaccaattttggccaaaaatgtcattggccagcccgggtctgtgtgctgtgccctgtactcactcgttttcgcgctcgagttttctgttccgcccggccaattcgtagctgtgtttgcgcgtccgctccaactcggacaacaaatggtcaatggtcgatttaaggaaaaaggattctgaggagtgaactcattttgtttggttcagtggtggacaatttgagaatgaatgtcaaccgtttctgctgttgttgccgatggaggcgtaaaagtggcgaagtcgtaaaatgtcggatgtgtctgagtacaaaaatgttcgttgcattttttggcaaaaaagttgattcctggtggtcaaaagaaacaaattgtcgtaatataacaaatctaaacttttgtttattcgagtggcctcaaagagttacgagatgagtacacatattagttgaaggtaatcatattaatcaacatcatagctcaagcggacactaaaagattccggctctaatgcactttacacaccgagtcaaaaaacgagacatgtgtcaataaagagagagtgcagagaaaaaaaaatctcttattttggcgtactatttctttatctctgttaatagagaaaaactgaatttacttcgtgacgtttaactttttttcctaacgttaaatccacacccaattttgcatgccgatagagaaaaaaattctgcatcgattaatgcaaaaagtatttttgtttatgcgctagatcaaatgttataagaaaaacaaaatttcgaatgctcatatctttttttctaactcatcaaattgcttagcatttgcttagaaaaagcttctccttccncagagctttcgaataataccaagattatcca

SEQ ID NO: 13982 - DNA, 4591 bp, Heterodera glycines
  unsure (1)..(4591): unsure at all n locations
caaggataaaccaaaatatgtagatatcagttacaaatgcnaaactgaccagagaatagccaatttgtccagcccgcaccagtgaccaatacgcgaatgggttgtgaggtcatttggtagaaagtaagtgtaccttttcctaaaaatccttaatttatttaacaatataaaactaataatcgtgcaaataatatgtattattaattcttatggttgttttgttcatttcttagggttgggaggaaagggaaatgaaagaaggaaaaagtcagcagaacacaacagcaaaaggacgataagaaagtgtaatgatcaattagataattaggaaagggcagcaaaaaggctaaggagttggcaatgaggggcgggggagggaaaggtcaaatcaacgtcaaaacagggcaatcaatcaatcaaaacccggacccgaactcgaaaaaattgaaaaatacaaattttctaaaattctcatttttgttccttaattgatcatgtcaagctaaatttagtaaaaagaagattagcatggcccctgcgcaaggatgacacgcaaattcgtgaagcgttccaaattttttttttttttttttttttttttttttttttttttttttcaactagggatagcccaattaaaattttttgttcgaatgtcgcagccctctgattctctattccccaaaacttcttcactcttaaccaacccaaataagcgccttgccaacatcaccccgccacaaacaaaaaaacaacatctctctgataaactggcggcggcacaaacaatcatcgggggacttcaacctggacagtcggacggggcacctcaatgggccaactccctccttggcttctgtgctgaaatgggggaaatctgccgcgagcttctctccatggtcaaagagcagcagaatgacaacatggacacgcgagagactttggaggaagaacgccgactccactctgtcgtggtcgtgaacctgccggaaagtgaagaaactgtgccctctgctcgtgtaaactccgattttgtgaatgctcaatcaatgctcgacacttgtgacatcgaatgccggccatgtcaggtttaccgaatgggaaagaagtccgaccgcccccgtctcatgaaaatcgaattccccaccaaaaaacacgcccaaaattttctgcggaacaagacaaaactcaaaaatcacaataaatttaacaatgtcttggtccgtccgtctctatccaaacagcaactcgctgaacgttccagacttattggcatttgcaaaaatgaccatatgagtaatcccaattcgaattctgtcatttatgccggccatgttatgtttgcctcttacattccccgttacaaatccaaccccgactcttttaaatgtatttgtcatgtgcataatgttgatgactcttaatgtgtaattggtgaccactgtaacacgaaatctcttaaaaagcaagctcttttacaaactaataaaaaatatgaaccccccataaaaaatccaattaccttaaacaaaaaacaagtcttttatactcaacattgatcaatacgcgatccctaaataataagctagaagaattttctgctatcatagctctaaaagattttgaattggtttttgtaactgaaacttgggcaaaagaaaaaatacctttccaaccatatatcactaacaattacaaaatatatgaagctagcagaagcggtaaaaatggtggtggagtaatgatcttgataaaaactaacctaaattctttttctgttttatcctgttctaaattcaactgtgaaatccaaattgtacagataaatggggcaaaaagactaagaatagctctactttatagaccaccaaacacttctgctagtctcactaaaaagattctgaacatcatctgtaattatttagaagaaaattttatcattatgggagattttaacctaaatgcaaaagatataacctggaccagtggaacaccttttgctaaatcggaaaagggaaacattttttgtgaattttttaataagtatggcttattccttatgatgaacggaccaactcgaggcagtgcttggcttgatctgattttctcctctagtcctgattttgttaataatgttttaattgaggatatttttagttctgatcatcttaccactaacttttcccagtaatagaactaaaacaaatacatttacagtacgcaattataattctacaaaacttaatctattaaatttaaacttatcttcaattttaccctacaaattactacaaaaatttactattgaagataagtttaatcatttttaccatctttttagagaatatgtagaattatacttgcctaaaatcactgtcggtcaaaaatccagaaagcctaactacccattgagccttaaactgtcaattaaggaaaaagccagactttataaactacaaaaaataaatcgtgataaatataagcatttgtacgatagcatttcattacatataaaaattcaaataaataacttttttcaaaaaatgaaaataattttttgaataaaggaaaaaatgctatctacaaatatattaataaatttacaaaaaattttgaacaaattcactctattaattacgagaaccaaactatttttgatgattacttaaaagcagaaatttttgcaaacattttccaagaatccttttcaaattcagatgttccacaaattagcagttgtccttcccaatggaccatttatcactgatgttgaatttaatgccaatgaaatctctaacattctaaaaagcctaccaaatcgagaatccacatcccccgatgaaatttcctttaaaatcttacgtaattgccaccttacgctttcacctgtaatttccgaacttttcagaatctcaatggacacgggcaaaattcctgaaatctggaaaaagtctattgttatacctctctctttaaaaaaggtgaccgaaatgacccacataattacagacctatttctcttacttgctgtctatgtagagttatggaaaaaattattgcaaaaaagcatttataacttccttcatcagaataatttaatatccgaacatcagttcggttttgttaaacaccgatctactaatactcaactaattacagtattagaagattggtacgacagcatatacggtaagaaaaatatcgactgtatttatgtggactttcggaaagcttttgattcccttcctataaacattttaataaataaacttcataacattggcattaagggaaaactgctaagttggtttatctgaatttttaagggataggtcttacagagttaaaattaacaataaatcttctaatttacatccgattcagtccggtgttccacagggttctgttcttggcccactgttatttttaatatacattaatgacctcccgcaggtaatcccttcgggagttagcatcaagctttttgctgatgatgtcaaaatttatgtctcttacaaaactcgtgatgaaagaagcaaattaaatattgcattagaaaatattggaaaatgggctaatgcatttggtttaaacatctcccaaaataaaacatttattttatttattggcaaaaataattcaaaacaatataaattatttaacaatattatgtattaatgaggttgaatctattagtgatttgggcattttgattgataataaatagggaagcaacttttagtgaaaaaacttttttttgctcaattgtttgaagaaaggagctcaaaaaacgcatttctgcgttaaaattttttcattcggacgtcacttttcgtcactagaaatcactatttcggcgtttcgtcatattttttcatttcgacatttttcggaaaattctttaacaaaaatgcaataaaaccaaaaaatacacccctaagaatcgacaaaaaaaatttcaaaaagcactcctaagaaatgaaaaaaattttctcaaaaaggtattttcgtggcaagaattttaatttaaaaaattatttttttatgtacctattttgtttttttcgcccttaaaaatcccagccctactcatttgcaatgcaatcagtgaataaaaattatttttgcttaatttttggctgaaaattatgtcactattcgtcactaatttcggactttttgtcactatttcttcactcattttggcatttttactcactaattttagttaactatttcgggatttttcgtcactaaaagttgctaccctaataataaattaagattttctaatcattatactaaaattactaaagctggcttatttaaggattcgcaatatggccaaaattttaaaatcccgtctaacggggagaatttttttttgtttgtggcggaactatttttgggggaaaaaaattttttgcggcgccaacttcttccggcgcccagtcaaaagaactcttggcggcgccgacacttgcggcgccagtcaaaaggacatttgcggcggcgcaaaatcaacgaccccaaaaatatttcaacaatttattanagttaacagaattgttattttaatagtttatatttt

SEQ ID NO: 13983 - DNA, 2927 bp, Heterodera glycines
atcacatctcttcgaatttctgtgtgattccattcagcttataatagagctagagatatactacgccaaccacaatttccctcacctattattgtttctacttctcctggtccatattcagaagaaacgaaattaaactgagctggatattctatagtggctgcgccttaatttttagttatttttttagattttctcaatttttctaattatttgaaatttaattttttttactgtaagtgtaaaaccatgtttgacatagttcttcacgttcgtcctccgtaagtggattaaacacaaagtttaaggtagcccgcgccatggtttcaacatgtttaacttgtgataattttttatttttaaattattttttacttataatattttttattcattttgtttgaattttttagaaaattaaaccttcttggctttcattactgctttggctttttggagatatttcttcttcagaactttttaattttttctttattatttcagcaagaatttgtcccttagtttttattttttctgcagattcttctgtgcgtaattttctttttctctaaaataaaaaatatatggctacttcaagaaaaagttgacctctctgattttttgatcttttcttgttgagatccctttatcatctaatgtaacagcagataagataatctatttaagtaagtttgggtgtgcacaatacaaccataaactttattaactccaaaagtttttattaacgcattaatttctgctgtttcataatccgtatgaattctatcaattcccgaaaaaacttgtgttccccaaaggtcatttaattgaaataaaactttttcgtatgacttgggtactaaaaaatatttaaattaaaattttaaatatgtttttgctaccgtcttttcatcaaagccattaataatggtgcccattcggcgccactagttgtttctatcttaagaatacctaagtagaaatataaatataatctgaccaatccatggattgtccaaatttgctgaaaattcagaggtgctaattcaaaggtgccatcagaaaccaagactttacaattagcgacagctcttttctgtgtatgtgtcataaagagcataacacccatatctttatctcgaaaccgtagccatctttaaaatatgaattttttttagattttttttaatcaaaaattatcagataaaactaactcttacatatcttcagaagtcagcttttattgaagaattaatttaattgtccgcgtttagttagctgaaatttttctcgcacattaaatggatcagaacaatcccctatttggttcatttttcgtcggttgtaggcacgtcttacgctttgccaatttggataattaaatgaaattccactgggatcatcaatttcgatatcctcagctgtatcatgctctctagccctgtcagacccctaaatttatcgtaccaattggattagtttttatgaaatattcaaatcacttctcgccaaatagatttagaatctgctgaacattgaattaattctcttctttgattcctatcaatttgttcagcagtaagttgctctagtggcacacctttgcactgaagatggtgcatgatttgatgagttctatctaattggccctctctaataatagcacttccaataactctataatctaattatatagaagaatcactaaataactgaaaccaacccagcagaattctgcttattatagttctcacagttcatgcaatagagataaatcgtatccgttctttcatttgtttttttgaattttcgatattgattatcatgaccaattataaataggaatttattgtcgaattttgaaaaacattgtgacacttcagcgttttccatgttctctttgtttccttctgttgattttcgattttttatttttgaaatatatctttccagcgtcctgaagcttaggtcaactttaatttcggctagtttttccaacaattctcctttggattttatttcttttttaaggtattggtcaaccaagccttttgcgccattgtttgaaacaaattcatcaaagctaatacaattaataatatttatgaatgaaaagaatataaatggtaataacattggattaatttattaaaggaattaaggcaataatattttttataataaatgtatgttaaagaaatttagctatttataccatttaaattgtaataaaactgccagcctcatatttcctgctgacacctattggtacaaccaaataaaaattaagtaaataattgtaaattaatttaataaagatttttagtctgtcactgctagactaataatatttccggctgacacttacttgcacaacaaataaaaattaatagatattattgtatatttaatttaacggatatacatacataatcatatgagttggcggttttaagaaacgccctagcaccattatagataatattttacctctttcacatttctttttttctaaagattcattttgatatcaaaatgtttccaaaactaacatatagtattttagaattatctttgttaatttttaattttttaaataaagattaaaattttaattgcttccaccttctttgaaatatttaaaaacttcagtataaaaattttagttattttttatataaattaaaaaaaataatcagtgcttttcttttcctctaattacaatttccttgattaatttatgactaatagcaaaaattaattgcattccaatttgtgattttaataaaatataatttaagaaaattaaattaaaaaaaattaagttttatttatataatggaaatgtttttttttcttgcatttatgtcaactcgccaaaatagtaaaagaggatcgaaggtctatttcaagagctgtaaactaat

SEQ ID NO: 13984 - DNA, 1153 bp, Heterodera glycines
aaatctcgccgcaaaaatttcaaaaaaaaaaatttcaaacagaaatttttcaagaaaaaatcttagaaatttttttataagaaaattaagaaaaaaatttgagatttttcagtaattttttttgaaactttatgattaatttcaaaaaattttcaagaaaaacttaacaaataattttttttttcttaaaatattataaaaaaaattttctaataattttttccttgaaaaatttctaagtttgaaatttttgcgacgaaattttgtcccggcgagatttcggcggcgagattccggcggcgagatttcggcggcgagtttttggggtgcaccctgtttttaggtccaaaacgccaatcccatccctagttatgactttgagaaactcaaaaaaccaaattttttgaacttttttcgtcataactttcttgaaacgaaacctaactaaactttttgaaaatttgtaggctaatagaaaacaagaaacttcaataaaaaatttaaatttatattttagcatttttatgtagaaattttttgtgcttttctattgaaaatccaacgatctcaaaaaggagcatgtaaagattagttggagagacggatggcggagtggccagttgagtcccggctgggtctggtactccaattacggcgctttttcagcctgaaaagggcaagcgcgcccctaagtctatttttcctacccatttctaacctttttacatcgattccgaccacttttgagcaattttgagtttgggccttgtgaccggcactttcctttattaataaatcttatttaaattccaaatatttatcccagctgcgcctggcctgttgcacctaaatgacaacgaaaaaacagaaagttgcatgcaagatttatggaaaatgtcgacagtatacgattctcaaaaagaaatgatgtaagaattaatttggtagtaaaaaagtcaatagtcagtcagtcaaatcatccataatttgatagcaaagtttggctcattttcgggcgttggatcgtcgtcttccgccacttttgtttccaccattcatcttaaaagatataatttaaaaaaacatacattaagatatatatttttgattgcatattaaatacctaaatatttatgcaataatatattttctt

SEQ ID NO: 13985 - DNA, 1310 bp, Heterodera glycines
attttttaattaaatttactaaaaattataatttattaatttttactttattaactttgaaaattaattatttgtggaaggaatattttaggaaataaatatttatgaataaatatattttttaaatttttttacaattaattttaataattattttaataaatttaaaaattatatttaaagttaattaattgttatgttaaaattcaggcccaaacaattgatgagctattcggagggtccttctgccggcgcagaggacggaggactaacgaggcccttgtaaaaattgaaaatctccaaaaattttcaatttttttttagttttattgtcagcgcctggggcgaatgttccgccagctgtgggcccggcatccgctcgcgtctcgtcgaatgtatggcaggcgccggcggcactttgcggctgcccgactatgaatgccaaggctcgtggcaaattttaaaatgccaaaaatggcacaatgtgccaagccggaaattttaaaaatgccacaaaactgcctaaaaatagcgccatgccaagagcaatgttttgaaggctccaaaattggatttatggacacaatgccaagcgtggcgattttaaatatgcctaaagagggcacaacgtaatgataaccaattaactcatcattaaagcgcttggaatctcatgttctttaatataagagaagaaatttagaatttcttataatattttcaagacccgagcgcccagacgcgagccaaaatccagcaaatttcagatcaatcgaagccggcacagttccaaccgtgccatttggccccatgtccgatcaaagcgacgcccgcccaatcggccatccgatcgctgtccaaaccgttcgggggcgagccgaatcggtgtttaaaatttaaaaaccaattttaaatggattttaaatttatttaaaataaagcaatggcacgtcgaccgtttttcggtgggagcacggcgattggaccaaatgttccgcttcatgttcggggggtagagaaaattaattttttaagtttgaaagttataaaaattgaggcaagcaaagatcgccggtgatttgtgtggatacgatacgcagggttacggtagcgtggacaaattgtgaggacagcactgctgctggacaaaagccgcaggagctgttgcggacgtgcaatcgccatgcgtgcacgccggactgggaggtacggagagggagcgggagagagagataagggagggaagagagaaggggaggggaagagagagaaggaagagagataaggggagaggaagagagagaagggaa

SEQ ID NO: 13986 - DNA, 3337 bp, Heterodera glycines
tatcaaaggacgagccgctttcggaagcggacgacgaacctgtcggccgcggaaacgtcgtcaagcgagcgcaaacatcgcaatttgacgctcaaagttggcggattcgccaatttatacgaggggtgggtcactttttgagcacactgtgagactcgagagtgccggactcacccttggcgcacagttggcccagtctgagtttgacctcaagagtcccgagccttttttgggccctgctaagcggagggtttgtccaacggcatgttcggcattgaatttgcggcagggtgttgagactcgagagtcttgagccggccaaggccgataatttgcccttggatagcttaggactgagttggcgatgcgttttaaaaccgagagtctcggtcttattctgaataagatctcaagagtctctaacctcgtttggccccactaaattggaagctaggggttttggcactgaatttggggcagggcactgagactcgagagtcttgagctgagcaaactcttgtcacaaatctactgatgattattgatctcaatttggcccataatttgctaatggatagcttgggactgagttgggcgttgcgattaaaatcgagagtcacggtctcacatttgaccaaaaaataggcgcccagactaaacctagattttttgggtaattcaacagtatgcctagcacccaccaaataccgtatcccgtttttcagaacttcggtcaaagtcaaatgcccgctcaaaggtggcggtgaccggcgacgcattgtgtggacaaaggacgacagaagggtggagaacagtcgtaagcaaatttaccgtaattagttccatgggggagtactgtaaaacgaagattacggtattaaacgattttgtagcgcgactcaaagtgagtgccaacggcgcactgcgcattttccacgcaacgctttccgacgcgggcgtttacgcgtgccgaacggcggacggacgcgcgcagggaaatgtgacgcttcgctttaagccacaccagcagcaaaaaacggaaaaagtgaggggaaaagcatgattaaaaaactgaaatttaaatgctaaaacctcgagattcagtctggaaaaatcgaatcccggcaaatggcacaaaattgagtgaatttgaaaatgcaaaattattgtggaatgccaaaaatggaagttaaatccgtaattacgaaaatgatttttttggggaaaaaattatgaaaaaataaattaaatttcagattccatcaactgaaaatcgaacaaaacaacaacgaaagggcattgaattgctgcaggcaaattaatatgcagatgaataaataaatgtgcaaaataaaatattttaatcttttcaaataattgaaaagcggaacatttgaatgattaaattatataaaatatttttataaaaagataattaattatttaagattaaaaatttatttaaaacatcattttacttttaatttgataattaatattcataacgaaatcttagattttttcaataaaactttaaataatttgacaaattataatcccgacattttaaaaggaattttattttttttaataaataatattttttaaattaataaataaatccaacaaattatttttaagcgaaataattgaacttattttaattattttaaatatggttataaaaattgataacgtggaatatgaaaattttattttagaatttgagttttaccatttttaacttcaataaatttaaatcaaatttaaatattgaaatttatcaataaaactttaaaatatatgctcaacaaattataacccctatatttaaaaggatttaaattttttaaataaataaaatttttaattaaataaataattttaaaattataaaaacattaataaattaactgtttaatatgaaaactatcttaattttcattttcatttttctaaattaaagaaattttaatattttcaacaactgacaatgcgtcataaatttctcaaaaaaccttaaatagatgcacaacaaatttaatttatttgcaataaataaatgtttttttcattaaataataaatatttaaaaaaattttcatttattttaaataaataaattaaataataaataatttaaacattttttgccgattttcagcgtgtccgggacagtctcatgcggctgggccctgccggccgagcactgcttcagcgcatgtcctcaatcactgatcctggccaaatccggctcgactatggcacctcgggctgggccgactgtcgccaagcgcaatgcggccatggcgaaggcgttcaagtacggcacggcggatcgagaatttttggcttttttgtcgagagtgaaatagttacatccgatagctgtgggatttgtttcccgcccgggatttcggagcgctgtaatttgacgattcgaaaccgaaaagccgggaatgttcgagagagaaattctgaaaattgaacccaaggggggtgccatggaatttcgtacaatggaatttcatataaattaaaaaatattgcataaagacctgctcgaaaaattggaaaacccgaataaaaaatttccaatttttcatgttttgtattttttgaatacatttgttttggaaaagtttcaagttcacaaaaaattttgaaaatttttaagagaaaattacgatttttttttctgttttttaaaattttatacgaaattacattttacgccacgacattaaatattcccgaattttgttggccgggatcagtaaaaaccggcattcgataatcagtcctatataaaatggcatgctttcatttatttacatatattctcaaaaatatctggaaaaatgaaaaagcaaaattttgatttatcgtattaaaaaaaataaataaaatttaatgccattttataaaaaacggtgccaatctttaactgaatttggcttcctctaggtgcgtttgttgaaatgccaactcaatgtcgacggcaccgcaactgacgccttggcggtggacgaaaacatttgcgaggcgttcggcgtgccgagacccgccgcggcacggccatgcgcggacgagcggtgcccgcgatgggtgaccggcccatggagcgatgtgggtttaaatcaaataaattaaatttgtatacaataattaattaaaatgacaattcattatgtttaattattataaattattattgaaacaatcaattaagaattattaaatgagcaaattaatttattatcattaaatcatcaaaaatttatgaattaagttgcttaattcttaggacaattagaactcaataattaccctaatt

SEQ ID NO: 13987 - DNA, 3489 bp, Heterodera glycines
  unsure (1)..(3489): unsure at all n locations
atgagaaaaattcaatcatttctcaagtgaccgcatccctccacaaggccaaacattttcactccgatttcgatcatttcttcatatccctcattttggtcacaattacgaaaatgtaattatagtttaataactcattttcttttcaatatttttcattttaggaaggatcgcaaagtgtgcaattggctgatcgccttcgattcgctgtgccaacttttcgttgtcgcacctttcggcgtcaatttggtcggcgtcattttccagtacagtaccattgactaccgtatctgtctggccactctcatgggcgctaccatagcctcgtatgcctcaataatggcaatgtttctgatttccgtggagcgattgctgatcattctgtacccgatcaggtgactctttatataggtatgtatagttggaatatataaattttatgtattattgtagaatgaattcgatcaaaaaaacgacagtttgccaatgttcgtttgcttctgccattctatgtactctttttggcttggtcatgaatttggaagtgttcaatgtttggacaattatcaacatctcttacgataggcgattaacatttgaaataaattaaaattagttttgaaatttttcaattttattacgatattcagatgggtttactgtaacagtgggctttattcggatgttctgaactccgtccccgcttttgtcgtcctttcactgtgctctttaaattacgcggcaatttttggcctaattttgtggcgcaattttcaaacaaaaagaaagaatcaaacgaattcacaaagtttggcaatttttttaatttcaattttactctcattttgaacatttagctgctgatcagtcagtgcgcaggatgttgcgctctgtgtttctgctgcttttggtccttctgatcggctggctgatcgcatcggctgcacgcaaccaaatcaccgattttatcagttttatcacaccgcttattgtaaatttgttcatcgctgaacctgtggctcattcggttatgtgtaccaacatcaaaagtgtactgatcggcattgtcacttgcgtgccaattttggcatccgccagtggggcgcccatccttttgctgaacaggtgtaaaaaggacaaaaattcaattaaaaaaatattattaataattttatttatatttaatttagcagcgattatcggactgcgtacaaaaaggcgattatgcgaagaaaaggcaattcttctactgttggaccgctttttcgtccacgccaaattgtggtggtttcgaatgagcgaaaatgatctttttgggcacacaatttttggacaaaatttaacccaagcttaattttactgaatttattgattttcagaaaaatgattcgcttcaaaattttgtgatttgttcgctaagatttttgttgtactattttttaaacatttatcatttctttcaatgtcaagaatgtttaatttggttgactctgacaaaagtcatgggagtttttgttcaaaattttcatttgatgatttttcatataaccctcttattcgagcgtggtggtcgcattctgctgactttaacattacctttacatcatgaggaccggtaaattggacaccaaaggaaaattggacaccggaaaactggacaccatcctaaaataaacccaggaattgagttgaaaaataaatttgggtagggtaaatggattaataattaaggcacttagaagtagatcaggcattcaacatgcaagatgattgatcaatgtgccaaaaaaaatgcaagaaaaagggcaatgattggtcaatgtgctaaaattgcataaacgatgggaatcctatccaaaagaaaacttttttctttatggatgatggttgttttttttgctgaagttttatgtaataaaaacattatttatttccgttttattacgcttataaaaacataagtatgtgcagactaaaaaaatcttttggccaaaccaaaattttgttttatttattttttatttatttatttttatacgatagtgtccacttttcggtgtccaaatttaccggggagcctaaaaagaccagaagcgctcgcttttcttgtcaatacttaatgagtgaaatggtagtgaaaaantatattcgatcccacgtaaactgaaattgcgtttncataatttctgagcaatggcaacccatccaggaaaaaaaagttgtagccctaaatttttaaaaaaatcggatccgggtattgccgggtcccgaaaagccgggtccgggtccaatttttaaaccgggtccgggtatcggctttttactatttgtcataatcatgaccttcaaaattttgtcgtttgtcatctctgcaacaaaaccttcctaatcttctttcaattgatttctttaaataaatagtaattttgcactttttgtaaatcttaaatgctgcattgactatgttgcaaaaacacaaaatgcgaaatagagattttataataattataaaaaacgaacaaaataatccatgaaatgctatttgtgctggaaattaatagaaataaattaataaaaattcggacgttaattgacgaattgaatgtgaactcaaatacaattggactcatcactttaatatattaagaaaatttagaaaattaaatttattttggaattaattcaatgtcttttttggtattttttcccaactccaataaatcccaaaatttattcatctgcagcagctattatgtccttaagatttgctcttattgggtcactgactgtccacaaaaactttccgagaaggaataaataagtattttattgctgattaatataaaaattaaaaataattccattgctttatcgctcgccgctcttctatccgttctccgattcttcgactgactcccgaggaaaaagggaagaatgaagcttaaaaagggggcggataagaagaaaaaagtgataattgattctgctttctacacacaccaacacaattttggcctcaaatgccaaattaagtattatacatggtccaatattctgtttttcattttccccagtcccaatttgttaatttgttttgtcggctttgattcagagctcttagtttgaagatgcctatagatagtatttatccttcaagtggatatttgattatgaattttgaaaatttgtatttttttattaaaaaaccacaaaacatgttttttttatacaatccagaaaattttttgaactaaataaaaaaaacctatcgagtctcccttctaacaattttacagcaaacaaacgtaaaattttttaatttaaaataattataaaatgttaaacggtaatccgaaactgctcggcctgcacactctgccggtttagcagcaacaaatttaaaggaataaattaaaatttaattaatcaaaagaaaatgtttttctttatattcgattttgatttttttggngtttttgtttgactttc

SEQ ID NO: 13988 - DNA, 2785 bp, Heterodera glycines
  unsure (1)..(2785): unsure at all n locations
agttgtatacctcaaaacattaaaatgagtcatatgaatataattaaaccccccagggctttctattttaggaacatgaaaacatgtatttttntaggcaaatntaatataaaaaataaaaaataatttaagttttattaaaaaatttgaaaaaattcttcttttccacccaacccaccccagctgcacatataatctgagtttgatgttcgggttgatacatttaattgtttgacgccgttctttgcaaatccgttcgcatttttgtttctttgtcgctggaatttttaaagcaccatcgtcgaacccaataggaaagcattctttaaaattaaaaaaatttaaattttaaataaacataaaaatttatataattcattaatttttgatttatcgggatgtaaataaaatattcccgaattgaaattcagggcaggaattgtggaagatggggtttgggtagggacgttcaaagaaaatttcgggtcgtgaaaaaatccaggtttttttaaacgtgggtttcggtcaacaatcctggctaataacagttcaatttgatattgattttaattgtgactaattccatttttatttaaaaataaaataaaattgctaaattcatttgaaattgaattgagtttacttacggataagcaatctcgaaaaaggcattgaaaatgtgctggcataaaaactcgaatcaaaaacattcggtacacaatgatgtcgaacagtaaagcaatgaccaaaaaatgaaaaacagcatagtgacagccaagccacagagacggcatgctttctccatgaaaggaatgtacggctcctgaaaatgcaacaaaatttaaattttaatttaggaatttggcaatttatgcaaattttatttaaaagtaatttttgaattattagaaatatttaatttaaaaaaaaatatatagacaaagactcaaaaaattcaggaatcaggagaatggggaagaaaatagctggacatattaaaattaaataagagaaaaaatttcaagaccgaagagcaaaaaaaaaaatcttcatcttccctccggaatttttttaggtctggggcctgcgcacgataccaattttcatagcagaaactcgagcattggcattgagaagaggtggtcatctgcgtggttgatttggcagcactgacagccgacggcacagaaaatcgaatagggacacagaaagtcaaatggctggaaagggaaatggcgacaattagcaaatcaattcctaattaccctctgataattagcaaatactgcctgcccaccgttgtatcaataatccttttccgttggccatccaatggcaccacatatttggcactttctatgtccgttgcgccgccctttgcggcattgatttgttcctgcgaaaaatccgtgccaacggcggaggccttggcgttcagcagccaattcatctcgtaagaacatttcgttgccgttcgcctcaatgccaagaattgggcaccattccaactaatttttatttggatttcatttggttccattctcttttcccaggtttacctattccattgcatttttgctgacattaacccattgaagtgaggccaatccgagcagagcttgcaattcgtagagtccatcgaaaattccaaagggcaaaaaatggaggaaattttgggaaaagtccaactgaaaatggctaaattacataattggtttgtctattcaagttcaatttcctaattttgcctgttttaatgcgctgaaattggccattaatttcggttccatccgttcgattgaaatcgccgccaaactcaaaattttgagggaatgcaattaatgggccaccaatttggtcggcactctgcgcaaggcattggatgaaagatccaatttttcgagggaagcactgcgcagaggcagctgcagaaacaaaaaattaaatttaagttttaaaacaaatttgcctcggcgtctgccgtctctccgccctttgcgttgtctttcgcccctccgccgatggcattggcatccatggaaagttgtcagagccgttccaatgcatgaagaccggctaagaaatgggcactcagacggagcagagaaacaactgctgaaaaatttttcaatgttcccttgaaattttctcggattttttgaaaataaaaaattggaaaaaatttttttagtgttgaaacaaatttaatattttttaatagaaaaacttaagttagacaattgaaaaaattctcattttatttatttctcactttttgtgcgtgccgttgggggatgatcgtgaattatcgcgttgtttgttgtcatcgcaattgttgttgtagttgctgttcgtcatttccttctcctcgtagaccaacacgtaatcgatgatccgtctggcatccgaaaaatactccgttttttgtcaagggtcacgttcgggaagggtgggccgatgcaaagctattggaacaaaaaaaaaataataaaattaaattttgaaaaaaaactaattttatacaccggtgctacttggcaaaacaggacattaattattctcaaaattctgtccaagatttaaataattgatttttttttggacccatttttcatgataagtcaaaaacaagtttttgaatgaaattttcgtatttatttgctcatttaccgagaagtgcacgcttttctcaaccggacgcgaccataaccaacttgcgcgggtgggcagcagaaacaatacgacaaaaggcaacggcgtgggtcttgaataagaaaaaaaaatt

SEQ ID NO: 13989 - DNA, 3925 bp, Heterodera glycines
cggggacctctagagtttgcatttgcgagaaagcaatggaagtatataaatccttaaaacaaagaattttcaatatttaactaatatttttacctttatttctcagtgatgaaatgatcggacacctttctttttcgtaatatagcgacttattggcaattataaaaaaaactacaaatggtactaattaacggcaaaataggctttcttcgcgtcaacagtaagatttttgcgcttttacctgttcaacacaaaaaaacgataaacgaactgaacacacaatccaaacaatgaaaagaattgcaaaattagcaagcagacgagcattagttgtccaaactttgccgaaagtgacaaatattcggagaattgtgaaactgaaagaatcatggtccaaccgttggttgatagagtaaacctataatccaatataggaagaattacttaattagtatcaaaattaaatttgtgcgtttaatactcacagcttgtaatagaaaggaaaaaacagacaaaacaatgtccacaagcgcagtttggagcaaaattcgcttgtacactttcatttcctttggcgaccgcttcaaaaccaacaaaattaaaattgcatttaaacacaatgccataaacaggctgattgaatgaatttggattagcattttaaaggttgtgaatttttggatgcgtaaagtcacaatttgtgttctaaaatgagttttttgagttcattaatccatagagcccggttcgggacgggattccgtgcgggattttgcagggtcccagtccgcggtcctgcattttttggaaaatgtcggattttcaggatgagtccctgcggaatcccgtccagcaaaattctgagttccaataccgcagcggaatccgcaaatttgaaatttccaatcttgacacattttcgccaactagactaaaaccaatttttaattgtggaaacaataataaaaattcaatataaaagtgcataaatgaatggaaatctttatattataaaaaataacaaaaaacgtaaaataaaaaatttcaaaagaaatttcattatataaaaaacgtttaataaaaattttaaaatcaatttcagtagtgacccctgtacttttgttacaatttttggcgctaaattcaaatttgaattttcgcgtcaatactcggtgggtggagggacgcttgctgggggtatgggggggggggtgtgccgtagggtttaagtgttgattttgcacattaaaattggttatttaaatttatattatttaaatgtgttatttttattgtacataattgtttttaatttagatattccaataatgtctttttcccatgccgcactgcttttcatcgtgttcgccatttttgatggacaatccggggaaacctttgcgtttcaagcggagattgcgcagttgatgtacaatatggacaacgccacgaccaaggtttgtttgacagaattggtgactaattttttacataatttttgtgaaactttttttaaaggcgcatgacatcgaaaacgacccgagcaaagccgataaaacatggaccatcattgacactggcattggcatgaccaaagccgacctcgtcaacaaccttggaaccatcgccaaatccggaacgaaggcgttcatggaggctcttcaggttttgtttttcgtttggtcaacccccccccccccaatctaaaaaacacttgttacttaagaccggcattgtcgctttaatgcccgggcattttggcgccggtttctactcggctttctctgtggccgaccgcgtcacatcaaagcacaatgacgacgattgctaccaatgggagagctcagctggtggctcgttcatcattcgcaattgtgccgatcctgaagtcacccgcgggacaaagatcgtcctccacctgaaggaagaccaaacggcatatttgcaggtttgttgtactttggttcaaaaagtgcgtttttgacgctcaaaaattttacatttttctttcgcagtaaatgcgcaattgtcaacaaattatatttttaattaaaaatcatcaaatttttattgagttcaggtgttggtgctggtgttgtgcgtgttcatctgtgaatgcggtgtggggagaaagggcggccaagcagatggtgaaaggagcagccgcggacgaccaaacaatgacggcggggggacaagcggcggagcgggacagaaacggggaggaggacgtgtcggcggtcgcggtggtggaaaaggcaatggccgcggtggtggacgaggcggcggcgggcggggagggcggtcgccgcagcccccacaggaggctgatgaggaagaggtgggggcaaggatgagaaatcaaatctcatcaatttgaattgaagaaatggtttttttacaatgtgccgtattttcccataaaaaatcgttttatgaatatggttaatttggtaatcggtgagggacggggggggggggggggttatcgagggtgctgatcccgaatctcgggttatcgagggtgctgatcacgaatctcgggttatcgagggttctgatcacgaatctcgggttatcgagggttctgatcccgaatctggggttatcgagggtgctgatcccgaatcttgggttatcgagggtgctgatcacgaatctcgggttatcgagggttctgatcccgaatctggggttatcgaggtgctgatcacgaatctgacatctcatttgcaatattttaattgtatctattattttcgcagtacctaacatgctaattctgtaggtatgataacaatgatatgttaaagttaacatggtaaatgaatgaggaacaaaaagagaaacgactttcccatgtgcccttttatatgagacgggagcgtggccatctgtgtagcgaaggtccgacgcttcggtgaccgatgcgaacggggtcagattaaataacaaagggatgtgcggcatttctgcatcggcacaaaagagaaactaatgcatcatgctgctaaccggcgatgcgctttcacatttacgggtatattcaaacaccaaaggggattaaagaaatttaaagcacacgaattaatattttattagaacaatatgaaatggtgattaaatgcaatatttagcaaaatgattagtctgttataaaataagtaatcaattcatccatccggcattgttgttatgtaccatttgtccactttcattaccattgttgtatgggttgttttggttagtcccagcgctggaggagcacaagtcaaagtgcgtgcgattgtttccgaaattgccaaaagttgagctattattagtaaagctgcttctaaagccattgttgttgtaatcgttgtttttatttgcacaattcatgtcgctcaacctcatattaagcgaaacacacccactgcacatatcaaattgcacttttacccctcataaggagtcgaactcaaaagcataattaccgccgctgttgttgttattgttttttgttgaattgaacaattattgtgagtagcaatgacaaagattgaaagttagaatatacttttttcgtaaaagtttccataactgagcattagcattgacgctgttattgttgctggtggtgttgttgttgtttttgttctgttctgctggcgcgttttgttgattattaaaagtattcatttttatattgcaaaaaaaaatttcttgtgattaaaatgaaattttgcgtcatatttgcgtgcttttatatagcggaaatgtacagtgcgcgcttagagaaggattaagttacggtgctcttacgaacatactaaagcgcttaaaatgagcacaaaatctcacttgcgcgcaatgcatttgcttatcgcattctctcgcattttgggctgtccccctggtgaagtgggtgcgcgaatttgctgta

SEQ ID NO: 13990 - DNA, 2127 bp, Heterodera glycines
  unsure (1)..(2127): unsure at all n locations
catcagtggcgcctccgcaactttggacagactaatttcatcgatgggttcagaatttgaggtggtcgaacggcgcattcacccgggcgattgttcgtcttgaagagattgagcagcgatcccgaagcttacgaatgagcgaaagcgaaaagcaacgcaaggaaatggcatggcgcgggtacactntcatcagtgaggaacagagtcgaattgtgctgggcgaaggggtgacggacgacgcattggcggaggaggaggaggaggctgacatggaacgcgtgtgngagcaggacattcgcacaatgcgcaaaatgggagacggcggaagcaaaaacaacgccgaatgagggggggacggaaatggcaacgccgagtcgggtgagagttgctaacgaagcgaaggataagaagcggaaggcatccgttgacccgtgcagaaagagaaaggcggcccaaacggtttttgcgcaccgaaccctttggccaactccgtctgctgaacccgtaccttttcgccaaccaaatccacgacggtgcggtgctgcgacgagtcgcactttcgccgcgtgcgttcagttcctccattctgtcgcccgagtttgggcaggtaatgccaattttgttatttttatttaattttgttgctcatttgtcagctcgaggtgctcagtcctcgcgcttttttggccattattttgtcgccccgtgctgccattgccaacattttgtccccttccgcgttctctctgcgcctcctttccccgcaggcgtttatggccgaagtgctcaacccgaaggcgttcattgcgcgggaatagcactttttcactgtttgccctgcgtttctctgctactgatgctaattgcatcctttttccctttgcttttccgatcctttccccccgggcgatgtccgccttcgttttgtctccccgggcattgatcaccacaattttgagtcccaaaatgttagagcttcgcattctttctccgaccactctcgccttcactgtgctaagtccaagtgagccaatcttaccagtgttttgaccaattgttttatttgactgatggccaatattattttgtcattatttgcagcgattggaggtgctaaagttgcgtctccccaaagtttttcgatgtccgtcctcagtccgagcattttgtccccgtctttcctcaacaaaggcaccggcaatatcaaagtcagcttattgagcaatagcagcatttattcacatttgagctgactaattagtccccgttcagattctctccccgagcattctgtcgggcggtgggggcggaggagaaaaatgaacggaaaaccattttaagagaaatgatcagtcaaaacattgttttctttttttatgtgtcataataattggttatatttacaatgaattaaattcgtttcaaactgaaattgaataatgaatgttcaatcatttatactgtatgacgtaccgttctcatttctcggcttctgaggggaataataataatatttacttaattttcacttttcttttatttgtaccctttgatgttttgccgactatccctgcggcggtttgcccttttgttggaacggactttcgaagatgttcacagccactggtcccccaaagggattcattaatgccgatcccttccgttcgccgttctctgacagttttgctgcatgtgccggatggaaggtattggcattagcaaattgtgccggattggctgagtaatgcggcggtggctcattgcccgaacttcgtccgccgatcgtttcctttttctttttcaccaccgtcactttgtgcgccgttcgatcggtgagaaaaacgatcagctgaaagagcatcaaacaaaatttgagtaaatgttgtttctagtcgcttcacctgtatcagactaagcatggacagtcccaaccacatgccaatggaaccgccgatggcggcgatgaaagtccaaagggaccacacgtaacactgctccaactcgaggtactcgaaggcgccccagatcaacttgacagaagtgaccgctggggagggcaaaaacaatgattaatccatcaatcaatgatcagcaatcctaactctttgccgtcccctcccttctggt

SEQ ID NO: 13991 - DNA, 1547 bp, Heterodera glycines
tgaactgatcagctgatgggtgctcatccttcagcctcttcacctgatcttcgatgggttgaaagctctcttcgtccaggaaaatgggccgaaagcacaaatgcgtattggacagccaattgaccgaagttttcatatggaaagtgtccgactcatttagggattggcgcgagaacagtttgattgaccttaattaggcaattaattacaaatgaacaccagaataaattgactgttcagtctcgttttcagtcaccttcgcaacacttcgagtccgactttgtttgtgaagtcggctaatgacacgtttcttttgtcgatcgcttccacccatttctaaaacgcaaatcctattcatctaatgtctttcaatcgtgttaattaatcacctttacgagtgtccgcagtcgctgctttttgccgctttttgcgaatctgttcaagtcccgcaccgcctgttgtgccacactttcgcgctccaatccgttcagagtggcaatcgcctgacgaaattcgaaaaagagcaatttaacttcattattttcaaatcactgtatcccagcaaattgcatgttcattatggtatacaattcttttatattattgagaccagaattttttaacaaattttgaattcgtttgaatttgatgccggtcatctccaaattgtattggataattaggaattctgatgttcaaaatgtttttgtcacttttatataattaatgatcttttggcattttaacacacctggtacgcactcatcaccagctcaggtggccattgactgctcatgaactccgttcggttcttcagtgccgccaattccttctgcgctatcgtaccccgttgaattccgtttgtacagtacccaatccccaccgtatcacctcaatgttcggcccccactgttccaccttttccattgacattttgtctccgatattcaccccaaaatgactccatgcttgtcttctcggcatgcaaaaggtaatattgggaaaggtcactgagccattaaacttcacattctgtgagatggaaaaatacactctgttttttggtctgatcactgatcaaattaccatattcgcctgctttgggttgctcgcgtattccaaagtctgtagtagggttacggtagatttgggaatgagtgccattcgaaactgaccaagctgatcacgtcgtacagtgtcatcatggccagaaagaagatcaaaatgtaaaaggcccagcgttggaacgactttccgtacaaaaagctggtgaactgtctttttcggtcaaccattttcagaatataaacaataaaaataaattaataataaatgtaaaataaaaatataataatgatttttgggatttgaataaatctcataatttaactgattataaaagaggtgataaaagaagcgcgacaaaattaagggataattatgaaatatgaaattaattttaaaataaagtaatttttagggcaataaaatgggcgaatgagtttataagaaaatagagaaaagtgttgacggacggacgaactgat

SEQ ID NO: 13992 - DNA, 707 bp, Heterodera glycines
ctcctctcctctcctcccccccccttcctccctttttcgcttgctttggtttttcgcttttccatttgctccaattgccacttcatcgcctcccattcattggcttctctcaatgcttttctccttccgctctttgcccatttgcatttactcccttcgatgaattggaggaattaacaagcaaatggtccgagaaagcccactcccctccctctctccttctgttttgttgaaatgtggcagatttggggccaaaggaatcggcgggggggggggggcggcggaggggccaacacattcccttttttacccccttccgtcgccactttttccccgacatccttcggcgacaatttttcgtcgattaaatatttattaatggtccactccttctcaaacatcttaagagttgggctgtatctcttcaaaaagtcgccatttaaagaagaaaattacggcgtatttgtctatcagtgcatttagcttttcgccttggctttcactgtctggcaaatgagtttcttcccccacctcatttaattttattaaaaaaccaaaatttttttgcagtttttctttttaggctgttttattctttcgtatttgcctcacttctctaggctgattgggtcaaatcgcccatcaaattcccaaattccccccccctaacatttatcatatccctcccctcccttcccctcccttaa

SEQ ID NO: 13993 - DNA, 1319 bp, Heterodera glycines
attcctagggcttcggaagaaaaatggcgttttttacacctttcttacaatgttattgtaaatgttgttggcattcgaacgaaactttattaagcaaattagtttctcattttaaacactcatacaacctgagaaaatgtggcgttttttaaatcagttaaaaaggaaataaataaataaattaattgggcaatgccgtctttttcactcacaaatcagtcagtccttctctgttcgtcacaattgacttgagtccaacctttagctgctccattttcccctctatttcttccgcttccatcgctttgtacggtttttctgcgcttccatcggctgacacttttgcgtaattatacctcaaatagtcacgctttattctgtagtcgaaaaggttcaaagcatagttcaaatcgtttgcattttcgttcctcaaatttatgccaattaaccacacgttgcaataagttgcgctggaaaataatttgcaaaaaaaagtgaactataataagaaaactcaatgcttttcctaatgttttgttttggatgttaaggcattttttcatttgaaatatatttcttattttggacattcccaaaattaatggtcgtcattggccatgggatttccagggtcatattttttcaaaatttgcttaatctctagcataagaaaagtcgatggatgtttgagattttagtgttataactagggctataaattatatgcactaaaaattctccaaatatgctttaaaaaccggaaaaatgcccaaatatgcactaaaatatgccttaaaaatgacccaaaatggcttttaaccctcaaaacaaaaaagccaaaattgtgtaaaaatacagaattggctttaaaaatggctaaggagcgtttatagataattgcaaaaaattttgatttctaaatttatatatgcaagttcgaattttttaattttttatcatatactaaaacaaaattacatttcttatatcaacatttttttaaaaagttcttacaaaaaattcaaaatttttgcttttcaagggtatattttttaaattccaaaaaaagtcgatcttaggggtgtgtttttcgtttttattgaattttacttatgaaaatttgcgaaaaatgaccgaaatatgctctaaaaatgcaaaatggcgaaatatgcatttattctcaaaaacccccaaaatatgcttttatatgcattaaaaaccttcaccaaatcaaaaaattttaacgtagaaatgctatttttgagcccctttcttcatagcatatgcgcagaaaaaatatacaaaagcatataatttat

SEQ ID NO: 13994 - DNA, 3488 bp, Heterodera glycines
  unsure (1)..(3488): unsure at all n locations
ttattgaaatccccaaatgtcgggtccctaaatgtccctcccaagatgtccgtggttttcttaagtgtcttttgctcacttgtcgttcggtccccaaatgtcgggatccccaaatgtcggatccccaaaagtcgggtccccaaatgtcgggatccccaaaagtcgggtccccaaatgtcgggatccctaaatgtcgggtccccaaatgtcgggtccccaagttgcaaatccccaaaagtcgggtagccataatttatagccctagttatcacgaatccaggaacaatgtgagtgatggatatattattgaggcaatttattttgaattttcacttgccgaaatgaagaagtgataaatttgccaatggttgagcatgtttccgtatagattttgttgagcaattgcgtttttgtcccgtaaatttcaatgtcataagcaatttgaaggcgaagtcgtccttccacaaaccgacaaaacttttcaccgacggattctgatgccgaaaagcagttgatcaggatgaagtcatcaaactgttaaaaagataataataggtaattatcattaatttttttaaatcattgccaacttttagaataccttttcgatgaaaggcaatgaatcttttagcaattcttcaaaattgtatgcttctgttcccatccgttttattttgatgagttcttcaaaaagaaatttcaaaattatttattaacatttaattgcctctaattaccgttcatcacttgctcgtggattattcttgcgcctgcggttgtgaccaattgtgcggcattttgagcaggaaaaagtggtgttaaaattgacaatggcgattcatttctctttgtggccgtaaattgatcaaattttgaatcggcgagcatcttttctaattgcagtggcactttttgaggccttaaaatataaaatactagtataaataaaattaaaaatatttattattttattattgaatgtttattaaaataccttagtgaatagaaaagaaagaatttttcaagaagaaagttgaatgaagcattttgataaagcaggacgattttggttgccattatgcttgtcattattccatttaaataaccgtaacggtttgcataaataaaattatcttaataaaactggctttgataaaaggtttatttaaattaatttatttctaactcactttttgcccataattttattgacaaaattaaatatcgcagattttctaaatttttgttatcattttggcaattaactttcccaggctttagaaaatctgttaatttgctattaaatattcttttttcgagaaatagggttgcaatataaagcgttgaccgatagcctaaattcaatttaatttttacacaaaaacatttttaaatttgtttttatgttaaatcattagaatttttgattttttgtgcgaatgattaaaattaatttacaccttgaaaactttcatatttaaattaattcccactttttttgactgacttgaaattgtgcgtagcatttttctgtgctcttctttttcatttgtcaaacagtttatgtaatcagtgagcatttgctcattaagctctgcttgcagcacacttttgccaggaattgccacaaaagtgatgtcaatttcgacattgtccatgtgaaatttgatcagaaagattgagctgtgcattaatttcaagagttttgcgacgcttttattctgaaaatactatttattttttaaattggcacttaaatcaaaataaaatttcataaaattttgacctcgcaaagtttgcaatacaatgagtcattggttccatctgaacatttgttcttttcacaaattgcatttttgttgccaaaaaagttttccactcccatcgtttggccagggacaatgcaaatcaaatcaacatcagagtcagctgtatgagtgccaagcaaaagtgagccggaaatgccaactcgagcatggccagtggactaaattattaagtgcatgcaattaatgataatattaantaaaagaaaaatttaaatattcctcaaaaaattgttttcattgcttattaaaaagtgatntaatgaagctcacccatttatcaatgagtgcattgattttgcttaaaactgttgtgattcgcttatcaaattggcttaaatttaagccgtcgcttcttttttcgtttagcaatttttcaatcttaattagacaatttaaataaaaaaaattttgttttaaaaaaattacctcatttgaatcgtaagctgaatctgagtggtggaaatgaatttgttgagaaatttcagaaaaatttgcacttaaataattgttttgttcatttttgttcaaaaattgttcatataaatcggtgtctaaattaattattatttttaattatacagttttaactttccgttatttaaaatgcttaattaaccttaaaatatgtcttcatttattatctttaaataattcacatattttatttaccaagcgtaatttgctgttttagtttcttccatcgcatttttatcttttcaaatcgttttagctcaaaagtttttacaccaaataaaatgataaattttttatttttccattcttcatcatattttttccatttttcaccaaattgtttgtccgttacaattaaatttgacaaattgttttgatgcatttgcctttttatttgctttaattgcttttccgatggaatttcctcatttttatccttttccaaatttttggaatatatttttaggattttgtaagtcttctgaaagaattcgttttgatcaaattcttcaatttgcatacaatacaataaaaattgggcattttctttttcaatattttttattaaatttaaattgtcaaaatatgaaagttttcgaagttcgtcaaccatttttaaacgtttttgaagttcaaacacaaaaatgccggcatcaagcagaaatttcgtttcatttgcatcattttcattttcgaaatattcttcgtatttctcatgcagaaatgtttcattacggaattcttaattatcgataaattaattttgcacaaatacaaaaatatttaataaatttaccatttaatgcgctaatatttattgaaattttttctgctgaattatgctcaacactcagttcatcattttctatttcttcatcatttccattgctttcttcacattttgtgccattatcatcgttgaattcctcaacaattgtcgacaaaattgtttcattttctgatgggttctgactgatttcttcattctctgaatttgaatttttagtttagccggacccaaaattgaattaatttatttaaaataaatggccacaaatcacaaaatttacattttttgttaaatgaaataattcaaagactctattaaatctacagaccatgcaatataaaaatcgtttttattttcagggaaattttaaattttccttcaaatttataaatatt

SEQ ID NO: 13995 - DNA, 4299 bp, Heterodera glycines
  unsure (1)..(4299): unsure at all n locations
tgagttaattnnntattcattacatcttataaaatatttaattatatttacctcatggtttcgtacactgtttgtgttccaggtgatgcgctgtgcatttaaatatttatttgtaatttattttttttgtttatataaaataattttacgttattattactctttataattattgcttttgttaaattttaaattaatttttattaattttttcgtgcagtaaaaacttttgtaaatttttattttttaaataaaatttaccagagtaagtattggtttattccaattttaaatgacttttgtttttatttcttatgaattattatttttttttttgcatgctgttttctctcttatttcgtaaggctcttatttaggaattaatagttaatttttttctcgacttggttcaaatatttattattgattctgtccataataattaatttattgattaattttttcttgtgattttttttattttgccttttctatatattatttttatttatacatgtattctttctcaaaaaaaacattatttgttatgtatatagacgcaaaatattaattcatttttatttttattcattattgtaattatgtaaatcttttatttttttattataatcatttaatttattgtttgttttaaatttgaccaaatatgttattttattaaatgttgtataatatttaaaatgaaattaatttttggactgaggctttctctcttctcatttttgtccattgttgatacgattataataattttgctttggtttaatgtcatttccatgataaaaatggtttatttgatgttttaatttattatttataaatgttttttaaaatataatttttttttattgtatgttaaaaaggcgagtaaaaatttagtaaaatagaaattaaatatttaaaatattcaaaaatcagtaatttatcttctgaatatcaaatgaataaatagttggtttgtcatcattttttgacttcaggagttttttcggggccggctccgcagacaacagtcgccacccggaaaaaattaaaaaatttgggtatattttattaaaaattttgtatttattgattttagttttaattaataataaagatataaaagaacctaattagataaaatgaattattttttcaaaatatttctttccaggaagctaaaatttaaccaatgcgttttatctttttattgaatgtgttgtatttctttgatttatttattatattccttgatatattgttaaacttttaaacaatgtatgtaatccattgaaaacattgtcgttaattaaatcaaagttataaataaattagtgattgattgtatgaaataaatggtattttttaaaattaattactacaaagaattttattagatttttagaaacaacggttatattttttcattgtgcgttttgtataaaatttttctttgttcaactttttgtattctttattaatgttgtttgttgcttaattattcatttttattaatccttgtaaaaatgcatgtagatttttttggactaactttcctaacatttttaaaaattttgttttatttattttaattattattttttatttattatttacatgaatatttattttttcactcctagcgttaaatccattttaattggttttttgcactaaggaatatttgtagattgtttttcattaattccttttacaattttcatttatctttacggaaactatacaaaataataatttaataggataattattagtttaaaatttttttaactcaaaaaatataataaaaatattttattcatttttattttggaattttttataaaattacataattaaaaatgtatattttattcaattttgataaaccttatttatagggttttccacttttattttaaattcatttataacaaattccntattttcatgtttctagttagataatttagcttgaagtcattaatttaaaatatgtatttcgaagttaattattcatattaaaacaaaatatatataaaaataattattcaaagattttaatttttatgatttttatttttctcttaagaattggcacattataagaaaatttccaaattagtccagaagaaataataaaatgtaaagcataacaagcgagctttaatgtcgatctaaacggaaatatttataaccttatgaaaacattaaaagcggtcatcagcgattcctttagacagattcacttatttcatataaattaacaattattaagaacaattaaaaattacatcaaaatgctgcttaattgtaaatcaaaaaataaataattaaaatttaaaaagacaaatccaattgacaatgcttagaagcaatttcgttcatgcttcaaagagataaacgcaaagagaaattaataaatttaaactttaaaaaaatccccaaagaaattatttgacgcacaaatgaaaaaatatttgaattataaaaacggaatgcaacattaaattatgtattgaaattataatataaaaagaaaattgaaaaagaaattaatttatagaaaaatggactgtgctctagtagtattcaaagtttttcaaattttgttaacatcttttacaagaaattgatcagatcattccttcaaagcgacggtacaacctaaaatacgcagaaaatcggggaaattttcaaaaaaaaaacaagcccacaggaaacaatatatcaaaaaaataattaaaaaagggagctgctactataattattgcaatcctaaagcaaaaaattctctactgaattacattttgaatggtatagaaaaaacgttacaaaagaagttatatttagttgaattttgatgattataagattgtcattatttaaaagtgatctaattttaaaatacaaacaaaaacaccataattctttatttcttttattaaagagaaaaaatgccatttaatgccaaaagaaagataaaatattgcgcgcgctaataaatagggctgtaaaatatttacaaaaagtgggcaaaatatgcaccaaatatgtaaatatgattatttttttggaaaaattcttcgtaaaggatgcaatagatacaaaatgcataaaaataatctaataggcttagaatcacattttagtaatttaaaaattattttttggtcgattttaagaaaaaattttatttttaacaagatatttctatgaattttcaaaattctccaaaattttaaatgccttttttcatgccttttttgggattatgtgccttttaatgcctttgtatcaattttttggtacctattatagtgcctttttcgagatttttggtgctttttttcgttctctagtaataaattcagttggagaagagaataactcaaaagtgagagagtgctgctgactttcagtcccagtcatatgaaggagggtagagaaaataatttaaatagagagtgctatgggaagaaacggcataaaaaatgaacaaaaacgtcaaaaaaggcacgaaaatttggaaaaggcagcagaaatccaagagaccttttttttgttcttcgggcctaatgtttttttctccttgttatgtcaacaatttcaacaccggcggagcaaaaaaaggaataaatttttgctgttttggtattcaaatttaaaaaaccaagatataactaggggtccggcggtggataggcgccgctgggaaaaatttttttggaaattgcagtgaaatatgataagaaaaattgcaaaaaattttaaaattttctattttttccacaaaatgctgaaaaaggcatgaaaaaaggcaccaaaattgcaaaaaaggcaaatcaaaagtcattaaaaaattgcttaaaattttaaaaattatcgaatttttaaaaatatcatttatattacattgatggcttaatgtatgttgatattaaataaatatcaacgccagtgttgatatttattaaaacaatgttcgctaagagaaaaatgttgaatttgtgttaaacaattgtcttttatgcattgctatgatcaattttaatgtctatgtcataaaatttaaggctcgttatttgcatacaattaagattttataaagcaaaaatttatgataaattaaaaaaataaacttttatataaagtttatttattaataataactatttaaatatgtatttaatataccttttgttattttcgaatttgtaaaataatttatttaaaaataattaatttatgaaaattaattattttattagatcataattcttgtctcattgttcg

SEQ ID NO: 13996 - DNA, 3294 bp, Heterodera glycines
  unsure (1)..(3294): unsure at all n locations
agtaacttcgtttttgctccgcccacaaaaattaaccagtttttaaattgaaacaaaaattcgcttttgatgtacataaaatgttcacatatatcctgcggcttggttaaaaaaatgcttctgaaaatgaggaggcatacccgaaaacccccctccaaaaattaatctntacccaaaatataataataataataataaaaaaaattctcgggtggaattatttttcctcaccggngtattgatgaatggatgagtcttaaaaaatggtgttttcaaattgcagatcatcttgggtccagaaaaaagtccaagcgttcacgtgttgtcagcagcatttcgcaagcatccaccataccaacaacaacaacaaccacaacgattgtagcaacggcagcggcggatgtcacaaccgcatccaacttcatttcttcatccggacactcgtcgttgtacaactacaccaacaataataacaacaacagcatcataaagttgaatggtgccgaactgaatggtcattgtggcaccggcggaggcgtcagtagcagcaaccatctgcaacaccaccaccaccaggaaacggacaacaaccacaacagtagtaatgaatgtgcactgttgcgcgagaatgctcaacgccttagtgagatcagacagctgcagaaggagcgtcaaacgtacgcaatacaatatacacttatacattgctattttcaggcacatgtccaaaaaaattaattttcttttttgtgcaggcacccgaagggcttttttccggctcaattttttttgtccggtgaatttcaccaaatttataaaaacaggaatctgtatttttagtgtttataatcgcaaaacaaacccaaaaatgctataaaaaaagttggaaaataattttccaataataaatttttaaacccccctcaaaataggtgcaaaaaacaaaacaaaaaccggtcataaaaaactaatattttccggctcgggtaaaaaatatccataacctttttaacccttaaataataccatttacaattttttccaattgctcagtttggaactgtcgcttgacaagacgaaggtggagctgaagagtgcacgttcagcggagaatgagttgcgcgtgcagctgaagaatgtgcaacaacgggagcaaagctgtcgcgaggaatggaaacaatttgagcgggaacagaaacaacgggtggaccagctggagagcaagtgcaaacagttggccaagcagaacgattattacaaaatgaacacgcaagcgttggagcgacgggtgggcgaactgcagctgaagaagtcggaagttgagcgtgaactgaccaatgagcggttgcgcaattcgacacgcgacgaaccgccggtgggaagacagcagcaacagcacaacaacgcgtaagtgtgttttcttgctgcagtgttgaagtgttacgcaattttcggttccattttttacaagaaaaaaagaatggatggaaaaaaaatgtttttttgaaaaacaaattgaaaaaattaaccaaatggaacagcaccttcctcccaaaattggtcctattagggcaacaatgacaggcattgtagcccaaaaactggtcctgggcccaattagccgggactcattgtcagttgtcctccgtctggtaacaccgaattttcggttttttttttgtgaaacgtaacttgaccaaattcttacgaaaatgacgtaagaaagcactttaaaaagacttcattttctgtaattaaaagaaacatacaattagtatcccaaatctaataaatatatatatatataatgagcaaagaatatttagaagcgagaatggcgagctaaagcaaaaaatggcgaaccaggaccgagaactgaaggcattgcgcaaagatcttaaggcaaagaatgaacaatgcaataagtttgatgacgaactgcgtcaactgcgaagcgcaaagactgacgaggtggcaagtggcaacaaattatttaacaacaaatagattatcttggcaacagctcaccccccccccccccaacctcgtttcgttcctcgctccaaaaattttttcttaaaattttcaagaaatttttgtaagaaaattcaataaacattaagattttttaacggttttggaaatttcctttaaaaaacatagtaattcgtcaaaaagttttgaaaaaagttcctggaaaacatttttttaattaaagaaaaatattttttgtcaatttccagaacaagcagatggatttgatgcgggagaagaatctgattttggagcaaacactttcagcggagaacaaactgaagcaggacttgttcagagcgctcaacgattcaaaggcggagattgcaacattgaaaggtggggaggggatgggaaggggaaggcgtgtcatttttctaacaattgtggttcgttttgtcccccgtttcgggatgctatcatactaaataattaacgaggcgtgtgtcgagctgtctaccaccgctttccctttacgggcgattcggtggattcactcctttcttccttcctcgctcaccatcttcgttttttccaccccgacaaatttaaagcaaaaataaaaaataaataaataaaacaaattttttcaaaattttttttattgttttatcgagtcagtacacattacgctggttaattttttgcagctcgtttccaccccaaacagacgtatgaacagcaacagggcggatcattgaatgttttgtataattttgatcaggcgccacagttttgaatttgcttacggtttaatgaatacagttacagtacaataactcaatgttcaacaaataaaaagctggaaaatgaagtcccgttatttgttcgaattctcttcttgtccaaatttgtttaaatgttgctgttgaatggccgcaaattggacgtatagaataaagaaggaaggaaggaacccagcaggtccgaatgttaagaaaaaatgaacgaacgagctgctccctttctttttgtttcccctaaataattaaaagcacaacaattgttggctctgtgttcgctcgcccggttatcgatgccggcttttgctggttgctttaaaatctttaaaaaaattttccggaggaccgagaaacgatgatgagagagagagaaaagagagagattccaatccgtttggttttgccttcaagtcccaacttccattcttcatttttcgggggatataactaactaaaaaacacgctgttcatcattcattcgttctttgtagctcgtctgtacccaaaacagaccaac

SEQ ID NO: 13997 - DNA, 2436 bp, Heterodera glycines
acaaagccaactgaaaaattggaaacgaaaatttaatttttcaaaaatttccttaccgtcggttcattttggaggctcaattagcacacttttccctttaaaatctgttgttatgtaacttaaaaagagacagttaaaatgagaaagcaaagtacaaatcaatcaatgatgcataaggctgggaatttaaggcactaaaaatcgccaaaaagtcgactaaaaaagtcataaaaatcgccaaaaagtcacgaaaaaatggaaaaaagtcctgaaaaattaggtgaattaatttatagaataacactttgatcatatttaaaatatcttaattttaggccattgtcgccatcagcgaaagaaaaagaagaagcgggcaaaagcaacgaaaatgtcgtctaattatatttgaggcatggccaaatctcactaccgtatttgctctaattatccccaaatctccattaatcccccaatatccaattatcccccagtctaggaggggtcattctcagttttcccgaaacaatgaaatgccaattattattattatttatttattttttgctatccgcccaactcaaattcctatttttaatattcatcgccaaaatggtcatcagaacaggaaacaaaattatcatcaaataaaacagtcggacatctctcaaattatcactccttccgctgatcactgggcccgggagtcgagaacactttttcatcgctttgatcttgcggagacagcggcctaaataaaccaaatttgaaatgaatgaacatttaaagtactgtacggaggacactacttactgtaccctcctgtccatgctctattcaaaactagagtgccacgggaccgggacctggtagcggacaactgagtacaattgagtaccaaggtcccctgggactattcccggttttcccaggcaaaaattcctgggttttcaacccgaaaaggtcccggtcccgggtttgcccaaaattcccggtcccgtggcactctattcaaaagtaaggccaatctttttgcttacccaatacaatcatgataaagatggaagatcactccattcaaattgtccaaattttcgtctttttcccattgaaccgccgccgtctccccaacaattggacaccgtttcaacagccaaatctcttcgtccttcgtcagtgtcaacttttcttgggtcatttcgttcaccaactcaaatggctcaacaatattcatttggctagccactagaagttcaagccgaacattgtaagcgacagaagtggtggcacggagaaatgtctaaacaaaaaagggagcgtaaatcaaatggcgcccggaaaatgcgtcagtggaaaaagcgtcagcagaaaatgcgtcagcgaaattttattgtcttaaaaacaagttccttgcgttttcgaggtcactgaccacgaatccggtatccattccggcctatttccgaatctcgaacccggactcgaacaaaaaactcgaaagtacaaaattttctaatttagcatttttggttcaaaaacagcataaatgatctcttatgcagtattgatggcttatagtttgtttccgtgtattaaaccgatttttaagaaaaaatctaatttcgaaattttgacttttcgattttttgttcgagttcgggtccggggttggaaattgagaacgattttcttatagaagtttagtcctatattacaatactaatgccatagaaatttattttaaaatatttgtatcactgacgcattttccactgaccgattttccggtcacgaatcaaatgcaatcaatcaataattagtcaatcgtttaatgaacaattaagtagtctcgatcacctccttgaaagtgttgttgatccatgttatttcacaaaaataagcacagcaatacaattcattcgcttttccatttttgctcggcgtgtgcaaccatttggacaacgcttgggcagcagttgcttttggcccatcgtcagaaattccatcggggcacagttcataggaagtgattgaatacaattgaacaagatcagtgagaagtgtcggtgaaatgcggcgacgcaaattgtccaaagcatcggcaccggcaaagctcaaatgccgaatgtttgtcgcaaaaatgggccaaatttcacggacaaaaacatcccaaatttgatccgtttcgtatgaatacacttccaactcaaatttggtgcccattctgtcccaaattggcttgtttgaacggagaaatgtgagcacagaatggtcaatgtagctgataaagtgaaaaaatgaagattggttttctgtatattttttgatttactaaatctgaagcttcttaaaacggattttgtttggcagcgaatggtccggcaatggaaaatccacaaatagcaatcgatcagaacagacagtttcgcttttggtcct

SEQ ID NO: 13998 - DNA, 5787 bp, Heterodera glycines
aattttatttatttaaaatataaataaataaaactgacttgcaaacatatgagtccgtgacagcaaattccaccaaatgttgtgagccggtggtgactcgcaactgtgtgttgacgggcacgaattggtgccacttccggtcggcgaacattccatgtttcgctcaccgctactgtccttcaacggctcgccggcactgcataagactgaatttaattgtcgttggcattagactatgatcagggcaaaaaaagacgaaatttaattagtagtaaattttgaattagcgaatttgccaaattgatccgtcccgcactttccctttacaacaagcacacccatcgtgctctacactaaggctgcttgagcctcaaaattttccgagactcttgagccgagaccgataaatgacccagagacccgagaacgagaattgatcaacaacgagagtagagagtgagagtctcgagcagctctagcgctaacctataccgaaaatattttcatggaatatttttgtttaatgggaatgatttaaaaatactcaatgccttttttacaacttattttaacacatataactgaaatacttcaaaattttttagttaatgtaaaatcttagtctaaaaattttctgtacttcttgagcagaatttttcacaatgatcttgggacaagaaattgttgaagttaccgccttggccaagaaactgaagcagtgaaataaatcccaaaaaaaacgaaaaaaatgagcaaaacgcacagaaaattgaatgcatcttccctctctggcatcataataaaatcgtggatatgtttgaccgcttccttagaaaagtttaaaaaatacgaaatttcatgatttttaattttattttcaatactgtatttcctaaattagagccccctgaataccactcttttagagaggttgacaaataaagcccccccccccctcaattagtgctccctccctgaaataaagcccccttcctggggggaggggggttcaaaaaataaaacccacgggggcttattataggaaatacggtaacttttcgctaccgtccggcactccaacatcaaaatattctgtaggaaggccaccggcagtgttgtacacttcggttggaattgcaccatttcgtgaacaaatatgcacttaataatttttgtttttttttattacacctaattaggtaactgaaagttggacagcactgttgaagggtgcccattgccgtgcaaaccttcaaattttaaaataattttaaattttgtatttcaaatttgcaaatcccacatagtttggacttgtacaaccattgtcagcaccctgacagtatactggctcttgtttaacacccatggtacggtccctatacagaggaaggcctcggctgcaagctgaaaatttaatttttcttacttcaacaaaaaaagcactcactttgtttacaataactctaaaaaattttaaaattgggtaaaatatcgtaaatgagataaaagctacttcgcaatggtctttggtggcaaaattgttcgcatttcctccgtatccctggtacttaagttcgcggcactcgccttaaattctattttgatagattgaattagatttaaaatataataattggaggggtcatttgacataataaatggaaaataattaaaatagtcgatgtagaattctattttattttaaaataaaatttgggctttgggatttcggcacaatgctttttaagcttacctgtgatcggatcatggtaccagtgattcaaacttgatccaccgcccgggggtgtaaagccctcattaggtggttgaatacaagcaaaagctgaaaatttaaacaatgaaaacggcaaaaggattcatccgggttaaattatccaaagccctgaattctcaaaatcttgatcagcatccttgaaacccaaagaaattttgaaaatttttgagcaattttgaggggtggcataacccttaagtagcaaaaaatattagcattaccccttgacggacaacagaaactgattgggttattaacctgaagaaatttattcaacaattaaatttaatattattttgtataaattattttttaaagtatttttaaaaattttgatttttatttttattccatttttacagtgcaatcttcactgtcgcatatgcagtcatatgccaatgcaccaatggcctcacaagtagcatctgcgccacctaaatattttacctacgcgttaattaaatcttaaaatatttttttaaattaaaattgaaatttaatttaattgtatttaccataacactgttggacctgaaaatttcaaagcataaattcctttagcataagaattgttcaaattttacctgattttcaattcgaaactttgggttgttaccattcaggggacaaaagccgtagttaagacagacaaggccatcccgggttcgaaatggcggctggttgttggcacaacggcattcgcccgaccgacagtatgaaccaggccataccttacagtaagaaattttgaaaattatccattcaaaattgattcccaaatatgcttacagcttcgcactgacggttctaaacaaaagaggaagttgagttgtttcagataataaaatgctaattttttgatcattttaggcaacattttggcgggtcgggagttatttcggctccaaatgcaataaaaaaaattttaattgtccatcaattttagaaaattgatatcttttgaaggagctagactttctcttgtagcctggaaaattcaaaaatttcgatatgaaaaaaaaaattttttttcgttctctttggtaatatataatttcctttatgtccaaaataaattgttaaattgtgaagttcaataacaaattattgtaaaaccaacctgtgtacagccagactcgccaggattgatctctgtttgggaggaatggttttgccataatttgccaacaaattgatcatataaatttgggttcctccccgattcgatgcgagaaattgcgaatttttagtttaaaaattagtttcttagactttttttttagaaaaatttcctccccgaagaggatgttgctcccccgatacattttttaaatttctacagcaatcccccaataaattttgtcggggaatttgctcacaattcccgacttttctctccccaaaggtcggggaggatcccgaatataaaaaataactaacttcgccaacagtacgaatcaatctccacatatgtggtaagacatgcacaacgtttatttcctgcacaataattcccggtgccacaatcggttgaaaccttttgtaggaatttaattgaataaaagtaaatcaaatattaaaaaatgatcaatttacaagcttctgaaaatcaacgaatttttaatattttcttttcgattttgttgatgtgaaaaattattattttatttttgttttcgaatttttttggtttgcgtgcagcgctaataccaccacaataccaatagttttgatcattttccaggattgatgagtaaaatttttgttaatccattcattaaaagactctataacttttttcgaaacagatttcaattttggtttttaaaagaataatttggtcgaaatattagcgtgttgtttttaagtgtattttattttttcagactacattatgtatgattattcctagaatttggaccctaaattaagaagcggctcttctcaaaatgttcgattctcgtcaaatttggctccaaaattatgttgtttttttcaatatattttattgctgtgttaattaattatacgatcatccaacttcacatggtcgtcccactgttccatggtgtgttaatgattcaatgaaccgtatattcgagtccaacatggcaaaaatgtagcaaagaaacaaaaaatggcattttaaattgccaaaatttgtgataaatgaagtaattatagtcattaaataaatatatgaaagcgagtaaaaatgaaaattaaaaagtatatatatatttatatttaattaattttaaatattccaacatatcccaggacgggaccggccgatatagtcgagaacagcaatcgaaggattggaatggaatgtaaatatacggattgagggtggatggacgatggtgatgatgacacataaattgagcaaaactaactttttcaatgggaatgagaccaaaacggagggaacaaatgcgactttaaaagtacgtacatataatgttgtccattaaacaaatattttgaatgtttgaagagtgtgtccaattttttttaaattgtcccaaagaatgaacttttaagataaaattgaagtcagtggatcagccgaattaatcaataaattttatttccaattaatttttagtttttctaacaaatcttacaaattatgtgtgtataaataactcttttcaaaaaactgtaaatgacactcttaaaaaatattaccaccatagcatgagaggtgacatgagttttattcaaataattttaatttatttaattaaccaaacctaataataaagataaaagttaacaattagtacataaccgtattttatacatctaatacaggtaatctttaagttactaaagcaatgatggaaaaaaaagaaaaaatattattaacacgcatcgtaattaaaaaccaacaaaagttacatacacatgatgacattacagaattgatcaaatccatgtgtttaaacccgaataaaattttttttgacagataaagagagagctgcaccaaagttaacacatattgtagaagtgtggcatttgtgtggtggatgaactgctttaattcaattcattgagaaggtggcggtggaggagggtaaatggcattgagtaggaaagccgcaaggtccatgttcgtcctgcaaattgatgttttaagtatgtttgttatacacattggcaaattaagcaattaaaaatatgatgattaattttatattttaagaaattaccaataagaaaaatgtgagcgcaacattgcccaatatccgttcggcacagtgcccggttgaatctaaaaaaagagacaaattttatcataagaaaaaagatttttcgaacaattttatggtgagttacaaagtatttttcaaaaaaatttcgaaattttttttctttataattttgttatgaaataaatttctagaatttttttcttaaaaattttctaaattagtaatttaaaaaacaaattcccgggggaaacggcggggaatggagggggggggggcgtagtgccaaccagcagcagagggtaggagtggcagtgacaatctcaggtggtgatgtgacaaacactgttctagcaaaatttcgaagccttattcgaatccctgccttggaatttcttttccagttgcgcgcctgcttcaccggccatttatcatggctcgaaaccgaaaatttctcgagactaaaaaccaaaaaaaaaaaaaatccgagacttttctcaagcagcaactagctacgtcctttgatttgcaaacagacaaaaatctgtgcctgaaaatcgatgcgttgcgggagtctccgttctgtcgggatctcttcaattaaatgtgccgcatcgccaaattttgtttcatctaatgatgaggaagcagtggcagcagctgcgattgctgaagattgttcaactgtaaataaggtcgcggaaatttttgttctaagaaaattaggaagaaaaatgtttaaattgtgccagtgaatcgaacaaagct

SEQ ID NO: 13999 - DNA, 2405 bp, Heterodera glycines
  unsure (1)..(2405): unsure at all n locations
cagatcacaaaaaatgataaattctacccaattntggggttaaatttcaaaaaaaaattaaggtaaaatgagggtccggcggtgccgacagccgccgccgaagtaaagcatcgttttaaaaatttaaatttccaaaatattcgttcttaggggtggactttcgcattttgcgccaaaaagcaaaatgcgaaacctaggcccatccctgcttcacaccgaggtaaagatgcatttgacaaatttgtttcaatttaaaattaaaggtcaaaattgggatatatgtggatacggtataagcggggaggggtagctacggtaagtgccacgtaacttttacaaaaatcaattttggtgtaattacatcttttgcttctttaaatcgacgacgactgaatggcttcaattaaaaacacagagacaggaagatttaaagcaaaatattacaaaaattccgagtttttctcaaattcattggacatttatacaacgactcacaaattatatgtacaatcagagatatttggaacatattacagacaaatcggatcaaatgggaatgatgagcataataaatacaatacaattagtgatcaattaatgtcttccgaagaaatccatccgccgcttttggccattgattcgctctctctgtgctgtcacatctgctgttgatcgttttgctgtctgaaaatggaaaaaacaattattattgatcaaaaacaatcaaatttttctttacccatcggtgccctccgccgcgtgtcgcccattgtccgtcgccgtcgtacgaaaaatggccaccatttcggcatttccgctctcttccgcgaaatcctgtgcccgtttgcctgaaatgggcgaataaaacgctcgctagcacaacaatttggccacttccgctgctgctcaccttccatgttccgttggttaatgtccgcgccgatggccaccaaatgccgtgccatttcaatcttcccattcttcactgcccacatcaaagcattgtgtccgtccacgtcaacatgttgaaggtcggcgccatgttcgacgaggaaattcactgaaaattagggagattacatttttggcactttgccacaattctctcccaccgatggccaaatgtccttcactggcggcgcaaatcactggagtgtattgctcttggatggtttgttggttgacatctgcggcccactcctccaccagcagacggcacacctccaaactgccgcccacggcagcatttctaagtgcaaaatggaatcctgaaattaggagacaacatttgtggcatggtatttttggctactgtaacagtaatcccccaccttctaaatccatttgctcgacatttgcaccatgtgacagcaacaagcgcacaatgtccacctgaattcaaatggaaaaatgtcggaaaacatttcgccaatggaaatttttccctacatttcccgtgtaacacgcgtacatcagtgctgttgccccatcaccagtctgcagattgatgttggcaccattctcgacgagaaatgtgactgtgggggaaaaaatgacgggaaaaaattacgcattttttcaaattttcgtctctctaccaatttccgtttgcgatcttttgcaagcgtgcatcagtggcgttgtggcagagtccgtgcccaagtcaacgttggcaccacgcgcgaccagcacacggcacagcggtaaatgggtattgcggacagcaaggaaaagaggagtcatatctgcacaaatggggaaacaccattattttccgggcaagcaaaaatataattattccacaacccactcacgcgtatttgttgcgttctcaagggccggtaccggctcatccggatcggcgcccttctccaactgaaaatgccatacaaaattagtgccgacggataaaattgttcatttcactaccaagagatcaacaatttcggtgtgttgtcgtaagaaggcagtccaaagagctgatcgtgattggatgttgtcgcgctccactggatcaaccgtccaccgcagcaaaatgttcagttcgtcggcgtccagcgaatcgatcagcacacgaagttgttggatgttgccattgttgatcaagtcgaagaagcggagagtgagcgtctcaaagttgtccacaacagcagcagcagtgggatgttcagtatctgccttaattgtgggggaaaatcagttattgaaaaagaattctgagttgaaactgtgcaaaacattttttcagggagggggggggtcattatcacggatcagtgaccccaaaaatcccggtggaaagatgatttttaaaaactaaaaattcaaaatatgaaggggaattgcacttgttgttcgtgttgcaatcataaccaaaacatcaatattaaaaaaggtttcatgga

SEQ ID NO: 14000 - DNA, 1257 bp, Heterodera glycines
  unsure (1)..(1257): unsure at all n locations
tagccaaagatcgaaaaatttgcttattttttgtacaaaatttgttaacaaattgcattcaaattttcaaaaaatttccccggcggcgcctgtcggcaccgccggacctctcccctcgcacattcagcaaatttttttgaaaaatgtaccgcaagaaaaatttaaaaaatctgagttccaattttccttgagtaaatcatgattagggctgctaattttatgtaaatacatattttttcctggcttctccatagcctaatcagtaggaaaaacactttcttttttgtgtttgcaaacaaaagtttggacttttatttacatattttagtagatattttgcaaatttgaatatctgctagaaataaatttaaaattcgctcctatcggcacgccggcccccccccccccccaaaaaaaacctttttttcttaaaaaattacccaaaaatcgctaaatttgattatttttagtcaaatctgtgcaatttatgtcaaaataaatattatcaaggcgatcaacgaataaaagaatgtggagccaaagaaattattcataaaaaatattttttttgtgagatttttggagttaattcaaagcaaacccccgcccccgcccccgcgggggcggaattatcgtgcccccgccaccgccaccggggctccgagatcacggcaccccaaaaaccccgtgatttccgtgatccgtgatcacggccagccctggtagtgagccaaaaagcacagtaatcaaaatggtaaagcaacgggacaacaatttgtcgtttgctgtttcatgtaccgttccggacggaactgttcagcgtcctcgccccacacggcacggtttctgcccattgtgaacacatcgacctccaccgagtcgccgacattcagcacaattttcgaattgagctgaaccccacacggcgacgatggcgtcggtgtacagcgacgggaggacgcgcttaaaagcgaggcatttaattaacagggcaaatatgatgtcattcaaataaaaatccaaaatttttaaaaattagttgactaagtttggacccagtttttaatgtgatttattaatgaattttgtgcaaaaaatgacaaattttgccttttgagcaatttttcgcagattttgatttaaaaaatgtggaattttttttttgaaaatttagcgaaattttttttggaannatttggtgaggctagggtctggnggggatatcagcaaggaaaaatctaaatttttcatactttt

SEQ ID NO: 14001 - DNA, 1710 bp, Heterodera glycines
  unsure (1)..(1710): unsure at all n locations
taattgcgaaaaaatttataacttacacnggataattagttgttaagaactagaaaaacacgaaaaaataaagcccaaaaagatgaatttcagtttgaaaaaataacatcaaccttaaaaaaatgtgaataagagaatgattacagttttcaagaaaataaaacattattcttatacattgtaagcacataatcatttaatatgatttaaacaatcattaaataagaatttacccaatttttttaagttgagcattatttttagaattaaaaaggtaaaaatcttataaaatcaaataattgtcataattggaaaaaactcttttgaataataaccagtgaaaattttgtatttggggaaaatacattctttcgatttaatttaatttttaataaatagttttagtgatcaagagaattgaaaaatgcgtattaaaagaattgataaaaatataatataataatatcaaataaaatttttgctataatataactttaaagaacagcatagtagaaccaatataatgaaattagtaaaattattaatattccacaataattatttctataaatatttattaaactgtgtcataaactacaataaagttgcaaaatcaaattaaaatatcctattaataatacttcaaaggaataaattactgacttgataatcgaataaagaatttcaaaaaattattttaaattatcagatttaattaaaaaactaataaaattaaaagatataaatatatcttataagtatcaattaaatgaaaataattttcaaagattagaaaaataaatcttatattaaatatgcttttcttggatttcttcttgaccgataataacttaaaaaacaaactataatcatatttttcaccaagggaatattgcaacaacacgaagataacaactaaatacaaataaatggaaaactggtaataaattatttaaatgatttttaacaaaattataaaataaaatttaaaatttctcctagaaattaatgaattgaacacccaaaataaaaagcaatctgacaataatgagggcaaaattaacgaatttaactagaaaataaagtttttatataaaaactagatacagaatttaaaaagaaaaagtttaaatacaaaggaattttaaatactaaaaaatattaatacaaattttttatcttgcgaaattcttattaagtattttaaaccaaacaggtagttttatcttcggaccgggaattttaacaacaaccgggaccgggactttttgggctgaaaactgtgactttttgcttggaaaaccggtaaaaaacctggacttttcccgggcaaaacttgtcaaatcctggacttggtcctcagttgtacgtgtttttcaataccagttcccggtcccgtactactctacttttgtcacttcacctacatcgatacttttgtcataacgtattattaaaacagaattaagttaagaccacatttcctgtttaagctataatcataagattaatggaaaatataaaaaaatacaaaaataactttttttatagaatttaatagagaagttttattattgcaagtatcaatttacaaagaaaacgctgtactgttacatgagattaaaagaaaaaccttaaaacttgttatatacaatgaaggcttcaacaaagttaaatttctccatcanatacaagttaagacaagagtag

SEQ ID NO: 14002 - DNA, 3855 bp, Heterodera glycines
gaaataaaaaaatagattttagggtcgaaaatcagaaaaaaattttcaaaattgcttcaaataatttttttaatcaatttattcgaacaaaagggtttaaactttatatttccgaatcctttattaattttaacaattttttgcgccgtattttttgaaaaaaaactttttgaggaccagggaggaggaaggaggccggcggtgccggtaggcgccgccgggaaaaaattgatatttgaatacaatacagtgtcagattttgtccaaaaatgaccaatttttgcaattttttgaacaaattttttaagaaaattaaggattttaaaggccctgtggtgccgataggcgccgccggaaatttttttttgatattttggctatatatttaacagtttttcgatcaaaaattattaattttgccaaaaaaaattcaattcttaccagtgtaattttactcccgtatttgggtgaaaatttacgggagcgggagcgcgattcctttacccgttgcgctcgcgtgaccataattgtgcgcatttagcgccactactcgcgaggtgccatatgaccaacacatgcagtcgtgcctcatggatagcacgacacgatgtatcggaatcttgcctatcgtctgctgtctagccagatcacagaaggtaaagctaaccgacgacaattgaacacggtgttttaaatattttatccatttgatattgtttcatgctttatccaggtggtggatgactgcgtggtgctcaatccgggccgcttcgacagagggaagggcaccggcacattttccgttctcgacttggacctttcgagtgccattggcgccacttcggtctcaccgttttgcgaagtctcactcttttcaacccaacaacaacaatgacaaaaatcacatttttgagtgtcgcaattgcccattttaacatttttgacaaaataaattttcggatatttttgatgaattttattggctaacaggaggcatttcataacaaagcccatgaggggccggggcatttaaaaaaggacgtggcggcagacaccgtttactgtgctaatttccatttatccttggtgtcttttttcgttgatttttttctgtccatcgttttccgttatttttctttgttttgcgaacactccacacattcactgctttgactcttatcactccctccccatattttatcagcagaattgactaatcaccgaaaaattttttggggggggggttaccccgccaagattttttttttattttttatttttcagtcccgtcatttgagtccttatggtattagaaatttcagttccgtctctaagattgactgattttcggaatttttatcacaaaagtaaattttgccttaaaaattgtaaaaagtcacaaaacgcaaaaaagttaaaaaatcccaaagtgtaaaaaagtcaaaaaaagtcacaaaaaatgtatgttagaagcttcaaacaaagtgtagaacacttttgcagtcattttaaggtcatttagagtcagcaaaaaaaaagaagtcatttgacttaaattcccatccctagtcattaatagggctggtaaaaatatggatataaaagcgcgaaatatggccataaaatatggaccaaaaattgcaaaatatggacataaaatgccaaaaatatggacataaatttttccaatttgaggtacaatttctcaaaattcttcaaattcgctaaatgcaaagtaaagctttttaaaatggttaaatatggtattataaatcattttaaaagaaaaaaacacgatacagctaaaaattactcattttagcgaaaaatcgacttgaaaagcgaaattttcgcttttttgcttatttttaatataaattaattaatttttaagaaaatttaaatttaatcagtattttcgacaaaattttgctaaaaatgcctttttcggaaatttttgcggtctttaggggtcaaaaatgccaatttacctgatgggggccgttggttttttggaaaaatgccaaatatggacataaaatatggacttaaatgccaaaatatggaaaaatatggaaaacatggatataaaaatccatcctagaagcttctaaccaagctaaaaatatgtttttcgtgcgtttcaggcctcccacaatccaggaaaaaaatatggatttccatataattaattaccagccctagtcattaattaaacgccatcaaaaaggatgttgcgtaaaatcatcaaaacaaaaattgcttataactttgctcaagagttacctaattaaatatttttaaagtttgaaaacaattaatttctttgctaagatgctattttttaaacattgaaaatttcaaaaaagttattgccagaagaaatcaataagttttctcgaactgccgtcgaagtcctccagcagcgatggaggtttagttgggcattgatggcgacacaacattctttgtgcgcgtcgaaagtgatgaggaggaagacgaacagcagcagcagcaacagttcaattcggatatggccaagtgcagcagcagcaccagcagcagcacgcatttgcacctcccccggcacctctgccgttgtgtgatgttctgcaaacggtagcctaaacccccttttacctataaatgtgaaataaacatttacccaattagtccccttcgtcttcacggcgcattcctagagaatgcatacgcactgcttataaattgctctcagtccagcaaattgatgtagcgaaggcagtgctgtttggagacagcagaccgggaaccgcgttttcctcttgctcttccgcttcttcgtccacttcgtcttccgcgtcatctgtctcgaagcacaccgaccgagacaaaagaaagcgccaaattgttgcatattataagcagaaatgccgcacggattgcaccaactgttaatcccctcccatctgttctcatttttcaatttatttttgacatacaaacatcatttcttataaaataaaaaatttccatctcttcccccctaagagcggccccctcccactgatgggaaaatcaatttgagattaaaataataaaattaaaaaatcgacgcgaaaattcaaatttgaatttagcgccaaaaattgtaacaaaagtacatgggtcactacttaaataaatcgatgaaatggtcaatgaaaataaaaataatttttaagaaaccgaaattttaaatttattttaaaaaataaaccaaattacctccgacaccatacaagaaataaagctgaacagaactcggtaaattagtcatagtaactcaaacttatcttttcgtcagttgcagcgtggaaatgttgagtcaactgaaagaaacttaataaagataaacaattaaacagatttgataaaagatgattggcttattcagtgttttagtttgtaatgcttttgttttgctgccatttgcaattcatttactcgtactattgattcacaactgtttggtacgtatgcttagtacgttggaagagtatgacattgaaatgaaaataataaaataaaaagacaacaattaaaaatagattataaaaaaataaaattgaaaatgggaaaaaaattaaatcgaataaaaattcatgcatttatgaacaatgatatcaactaatcaaattattaaaaaattacatttgaaattaatatattccatagaaatattcgacgaaaaataaacaattttttagttttataagaaaataataataaaattaatttgctattagattttaagtgtattttatatgattattatagaaatattctaatttctataaatttatttaaattaaaaataataaaatacctttgaat

SEQ ID NO: 14003 - DNA, 1034 bp, Heterodera glycines
  unsure (1)..(1034): unsure at all n locations
attaaaattntctgttgtattaaaaaatcctatacataattttaccattttcctcattttgttttggtttgacattggtgtctaaatcaatgtaaaattaaatatattttaattgatactttaatttttcaaaaatatatttaaaatatcaaagaaaacaattttacccataatagctttgacttggtcaatgtataaataaatatgtataaaggtttataaatttttatgttaataaatttttgtttccgggttccacaattgtatttcttaattttaaatttatgtttcaaattttacccatttgggcaatgtgttcagttgtgtccataatgtttaaatctataaaaaataaataataaatttatttattatttaaatgtttacttattttttcgccgactttttctttgccttttctgcctaaattcatgttaatttaattaaaatttcactttttatttacaaatatttacttgttgcgatggcttctttttctttggttccatattcacttggctcattaatacctaaattttacgaaataaataaataatttatttgtatttttatgtttacttattcctcctaattttctttttcccttgtccatgcaatcaccaaacagtgccaaaatggagatcagtagagcattcctcagcataatgttcacggttggtgatgatgttgagtgaatttgatgagtttgaatttttatgatttttaaattctgatttttttccttttcgccgcgcttaaattgccattttttggcacaaatcaaacgtggcatttaatgcgtgcagcatctctctttctcattccctttctctctctattcagagaatttgtaaaatccaattgaatggattttataaagtgtgtataaccatcaaccctacaatgttttcacctcatccccccccccccccccgttaacaagcattacgacgaataaataaacggagtgctgctgctggcttatgccatgacaccacccacaccaacgcttacttcatgtataatgtatatac

SEQ ID NO: 14004 - DNA, 2614 bp, Heterodera glycines
actagcgggggcgtgaaccgtcggctatttagctgggataaagcgcttcgcgcttcttgagcttcgctacctagattagctatcgggttgtgaaaagatttggaatttaaaaaaaattatcagcgatttttaggccgcttcgcggcctcagacgggcgcttcgcacccgttttttaaattcggtgatttttaggctgcttcgcggcctcagacgggcgcttcgcgcccgtttctaatttttattgtgcttttcggccgcttcgcggccgttttttaaattgtgttgagtcggacggacgcttcgcacccgttattaaattttgatggactcagacgggcgcttcgcgcccgtttctaatttttgttgtgcttttcggccgcttcgcggccgttttttaaattgtgttgagtcggacgggcgcttcgcgcccgttattaaattttgatggactcagacgggcgcttcgcgcctgtttctaatttttgttgtgcttttcggccgcttcgcggccgttttttaaattgtgttgagtcggacgggcgcttcgcacccgttattaaattttgatggactcagacgggcgattcgcgccctttttgtggcctttttaggccgatttgcggcctcgaacggccgcttcggccgttttttaaattttagaacagatacaaaagtgattagaagaggtacaccagtgattagaagaggtacaagtgattagaagaggtacagcagtgattagaagaggtacaacagtgattaaaatttgaagaaaagtgattagaagaggtacaatcatggtttaaaatgaaataaataagaaaattgtattattggatgtattataaatttatcaaattaaaaaaatccttttacttattaaaaataaagttagaaatttataatatcgaatatttattgaaattgaacggaattaatttctcgaaaattcaaattaaataaaacatttattcatcagaaaataatttaaaataattaataaaacaatattaaattaaataaaaaagtaaataatttaaattaaaacatttgttcaccaaaataatttaatttaaattaaaattttttatttattattaataatacaaaacaaattaattaaaaaatgtaaaagtaagcaaaaaatgcatagtaaattaatgtacaccgcccggatccgaactcccccccccccccctcaaaatgatgtctcagaatccccaatcacacagggattctagggcttaacgatgtcaaacgtaaaatctgatcacgtattcatgatcagcggcccaaattacccctaatgacatgtttttggaagatttttgtgaaaaaattttttcaatcaaaaatcctgtccaccccctttggacccgaatcacaaaatcacttttatttttatatctttttttaaaaatgtgataaaaatttaaaataaaatttatattatagagaaaaaaattgcggatttttgtagtattttacttttctcaaatagcttttcagaaggcagttacgaattttttactgaaaaatctaaaatttccagaatttctggaataacttttttcatattgatgttagaaaacctaaataaatcccataaaattctcctgatttttctctatttttaaagctttatttgctcaaaattggtcaacccttttgctagatatgaattttccaatattagcccaaatttccaaggaccaaaaaattgccaaaaaataaagaatttttaaaatattccaaaaaatctgaaacttaaaataaacatcatatttgtgctcaggaccctaatttaccccagaaaaatatttttcaccctctttttcaacccaaaaaaaatttttgaaaatttctagggggcctagctcgaaaatttttgaaaatttccgtccatatggcacaccattcgatagcatttaaaatgctctacaaaaatgttctaaggcattttttggctaaaaccgacccctgacgagttataggcccgggactcaaatattttcaaaattttaaaatttggaaaaatcgagctcaccgagctctacaataagtctgctggccaccctgcgctcaggtcaaaccctaatgagttattcgcctggtactgaactggccaaagttggtactgaatttctccgcgcttctacagcccttcctattataggtagaggcctggaattttttttgttttttagaaaacacttcaacttagtttcctaccagcaaagactttttgattagagttttagaaaaaaagttatgggccgtcaaacgcacgaaaaattgagaaatccgtccctgggactcagtcgtccgcgctgaatttttttctatagttttcccggattctcctcaaaaagttgtaaaacccttccaccactttcagggcgctcccggccttcggccgggagattttgttttttgaaacgaaaccccttgtcaatataacgtatatataactagcgcgtgcgtgaaccgtcggctatttagctgggaaaaaagcgcttcgcgctttgggagcttcgctacctagatttgatcgaattggttggagagatttttttgaatttttaaaaattattaggggtttttagtccacat

SEQ ID NO: 14005 - DNA, 2315 bp, Heterodera glycines
gatgacacaaatccttgcttaaaaatgattcatcatttattgccagcaggcgtttgctttttgatggagatgagaatgtgcgatgacaaagcaacccaaaaaggaattgaataacaaaagctaaaaatgtgggggaaaaggagaaaatgattggaaaaaagggaggacaaaaatatcaaaatttgattaaaattaatcaagagaccgggtctacaatttcccgggctgggtaggcaaacccgagaatgtcgggcgggtatccaattcagtgtctaattgaaaggcattgttaatagggaaatctataggtcttcggcccaggcttggttttcctgcattcaggccaaggccatttttggaaaccttgggtttttcctggacctgggtttcctggatttttgtccagaaaaatacaggtccaggcttttgaaaaatgtcgaattctggttatggtaatatatatataaattagtttaattttgaaatttttctggcggcatctgtgatcattgatcatcataaaaaagacaattagagtagataaaagtatagaaaaatgaaaaaatttaaaaattctggacaaattttagtcttcgcctgcatgaatcaggcacactaaattaaaattggcaaatgctgattcattttatgctatttgcctaattgaattttgttttaaattctcaaattttattcaaatatacaaataatacatgtttttgtatataaatttgggtgacaattcctttcctttccgtcctttcatttactcttttttttttgctttttttcttcaatcacccatttcgaattcactttttttttctgtccattttcggcttgatttgttggcctaatgaccattgaaaagtgtggtggtcgtcacatgaactgaaattgtgtgtttattattacaaatgaattttcaacaatttgttcatttttgtgggtttgttttacccgttcagtatatacgctataatgatggccagaaatggtttttagcgaaaaacgagaacctaaaccgagaaatcgtccggagaaccgagaccgataccccagaaaagccgataaatttcttgagtcgagagtcgagaacaaagaattttcaaagtggacttttgaatgagatttgtgcaaaaaataaaaacttttctctttttttctttatccccgccgaaaatattcgacaatttgagtgagtgttgttaaaaggatttggccaaaaaccattatcactttataatatttgcagcgattacagtgtatataatttttctttcccagactaaaaagccaatatcgagaagcaaaaacccgagaaacttctcgaatcgagaatagcaactctcgcacatccctaactttcagagaattgggcacccgagaattcagtacctgtttttgaaaacaattggaaaaattttcctataaaaatatatacaatttgcacactttttcatattttttcccttggaatgtttaaatatatttttcctattgtttgaaaatttaccaattgccaatggcaccaaaaatgccacaaataaagacaattggccgacgcggagacgagcagcgaatgacggagtggttttggcgaccggagtgtaccaagaagggtagtacttcgctggacagaaatgaaaaaataataattaaatttgctaattaattataaatttgggaggggattttatgggtttccacttcccccccccccttttcgacttaaaaatccattataaatcatttttcgttttgattccagaatcctctggacgtttttaaagacacagagaattctcaaagtttacattcatattcctattaaatttaagattagttgacaatttattttcccaatgaaaagaaaatccatttttcagacaccaaatatttaaatttatataatatttttgatatttcgagaatcaaatatatattttttcattttaattaatggcttaagagttttgtgaaaatttgaaccaaatttctgaggaatttttatccatatattggcaaattttcagcgttttgtccacatttgcatttttttccatataaatccgctccctacttttttcgcataattttctttaatttaataaatgttgcactaaaagcttacatggaaggccgagagcagacaaatctgaaaatgaaaagaatgacttttcaattgtaataaatttaatgtatagcattcataaatgtgatgcttttcacccatagaaaatgcccatttggaaatgttatataattagggagcctatttgtaagctttccataaacaaccaaaatttacaagg

SEQ ID NO: 14006 - DNA, 1031 bp, Heterodera glycines
  unsure (1)..(1031): unsure at all n locations
tatnaacaaaataagtaagtttgtatgtgtttactacntaanaagcattaattaaaaattttttatttgcctctttttgtgcctattaatgctattttgcgggtttttgtgcctaaattctcatatctctatttatgactcggctactactgaaacgattgggacatgattcatgcatcttgtagagaattcagtaggtgagttgctcatttgcgccccaattaaaaagaaaaaaaaatttgtctgctttggccagagttaaaatgcctcacttaaatgataggaaattacgaggaggtagcagacattgggtccacacaaaccacaatacatttattttttgttttattttatttttttatattttctttatttttttattattttcttgtttttttttattttcttatgtttttttaaaaagatgctctaccgagccaatgagcaattccttttgtggtaagtcgaaattacagtgcgtgtaaatgtgtagaaattgccttgcccaagggctaacgggactgattttattagaaaaatcatcatgcacatccaaataactcttgttttccgtctcctttgacggcataaagcatcagaaggccaaggtccgccttcgaatttttcacttttcgtgtcgccatcgtttttgctttttagtttgtaagtatatgaaatcttaggcgcaaaaaccgcattcctttacgtgtggcccgacagcagtatcagacattgcttgttccacttagcccaagcaatgaatagacgtgtgcagcaagcaggcttgcttaacgcaactttacttacgagatattgaatttcgaaaagcaattagatcattggctcgattgagcatctttttaaaaaaacataagaaaataaaaaaaacaagaaaataataaaaaaacaaagaaaattaaaaataataaaatgaaaacaaaaaaataaatgtattgtggtttgtcctaacttaatgtattataataaatattttttagtatttaaattattttatataaatagctttttca

SEQ ID NO: 14007 - DNA, 4630 bp, Heterodera glycines
  unsure (1)..(4630): unsure at all n locations
tttttgtaataatgcataatgctcggcacgtaatttaataccttttagggatgttgccttaacaaaaacccattaaaaagaaagacttcttgaaaatcgacattttgcaaaaataaacagtaaaaaagcaaaaaaaaatctcctaacaaattttatgcattttttagttttttgatataacatgtatacaacatagttttacatataaatagtacctggtcaattgctttgcggacaaatcgttgggttggccttttgcattcgcggaaaacgaccgtttgtttggtgccattgcgctgttggctttccttaggcttccgcccaattgctccttctttttctcctccattaaaacttcagaaattgcgttcaacaaataattaaaaaattcatgtgcgtcttgctgcataaagttgtcgaacaattcttaaaaaagcaaaaaatcttagaaccgtttaaattttggtctttttttaattgaaactaccattttctcgctttaattttgtgacgaatcttttgggagcaattgttccaacccttctcttctgactcgaaatgtttgagaacaaatcggcaaggcaagtgagcaaattatcgcgttgcatcccttaaacatttacaaattaaaaaagactaaactgaaaaattctaaatggcattttcactaatgcacaaaacctgattttttgtgtgtttgtttgtacgccaaaattttttctctgaactgtttgcaaaaatacagagcttggatcactgaatttgcataacaagtgttgccgaactaaaagtgaatgattgaaaaacaatcttcaaattaaagtaataaaataatgcatgcctacatttatgagaccatagaaatgctcgttcgaaaatacgtggtccgcactgagttctttctcaagttgggaggacgcagtggtacccttaagcaaccataataaatacacagactttttaaagaaatactcaatctataccatttttcacgagttactgttgacaaagaatgtttgtgtttacccgctcatgcatccaaatttattttattttttattttgctaaatttttaatcacatgcaacatatacttatttgtagctatgtataatagatatgtataatggaattaggtaaatgccgactcgcatgtcgcacaagtggacaaaaacaaaacgaaaaaacgcgacatttatgggtaagcttacgctcactatgagtcaagcccagtgtgttagacaaattaagtcatttcgccaaaagtgtaattggcgtaattttttgcgcgctaattcaaaaattatactgatttgtccatattggcatgtttatccatattttatgtccatatttggcatttttccaaaaaaacctcaattagaacggcccccaacagctaaattggctttttgaccccgaaaaaccggaaaatttccgaaaaatcattttttaataaaattttctcgaaaatatgaataaattttaatttccttaaaaatcttaaatttaggtcaaaaaaaaaagtaaagtttcgctttctagttgatttttttgctaaaaatgagtaaattttagatttatctatttttttttcttctaaaatgatttttaataccatatttagccatttttgaaaattttactttgatttagcgaatttgaagaaattttaaactcaattttgaaaaatttatgtccatattttgacatttttgccatttatgtccatattttgaaatttttgccattttatatccatattttgctatttttggtcaatattttatggccatatttcgcgattttatatccatatttttggatgccctataatatgtatttaagaaaatagggtcctactttgttagacttcaaaaaaaacactatttttatttcattttcttttatttaagccctttaatttaagaataaaatgctagaacccgttcatcagcggatgctgctgtcccaagaaacagactcattaacgcctttctcggggtccaaatatccatcacttcttgtgcaggcgacaatttgctcaatctgttcttcaaattctgctaaatacaaatgtccgaagtgtttagttcgcacatgttctgttccgtgttttacaacacacaaagagtcgggaaaggtaatctggaaaatcattgacattttccatagctttgtctaatattgatgttgggggcaaatatcaattttagctttgtcttatttttacttacttttattagctttattttgttttgtttttttttacttttttcctttcagtgtgtttttcaatctgaccaatggaagaaaattgaaggcttttccgagtttaatgacgaagtcagcataaatgatcaacaatttattcacagaattgacgaaaaaatgaaaacggacaaaaaaagagaatttattccaagaggttagaggttacaaaataaatattgccagcgtttatgtttagaacaaaacattccaaccaaaattcaactctcaagtgaccaacgatttctcttgcaaaatgccaaaatgcgcagaatttggcttcatttggacgaaaaaaatagtgcatatttcgttgattatgattattagctgtaaaatttaaggttcggccgggtcgcgtcatgaacgtttttccgacacaattttttggacttgtactgtgaaatttgtcagtcggtgctattcaaagggacatggactttgtcaaggaccttctgataaagcagttctggaggtctatttgtagttttcctgtggctatactggccaattcataaaaagactttttatgcaatttcgaccctaaattctaaaatttcatattcgcgtttgaataattagataaatcaaatgctcacttttatacattgacctagtaaaaagtggaaccccttctcccggccatgcggcccatccgtgtccaaacaaattttaacttttcccgggttttctacaaaaaaatatctccagctctcgaatgcggactctgcgcttacttcgccaactcttgtgcatttcgttaagcctattgtcgattataacgggtccgatgatgaagaaatggaaaaagatgcggggaatgattttgacgtgttgcaagccgagtcctcccttaaattggggctgagtcaccacgacgatggcattggtgcggaaactaacaattcggatggctcttctgctgacagtacaggggatgaagacgaacagcaaacgccgttggaatgggtggacttcactgtatgttttttgtccacaatcggcttttcctatttacaattgccaggtggaaaatatcccggaaaacatacgagtcgcaactcttttacgccaatttctacgccctaaaccccacgggcccgtggtcacgctttcgcaaattgacatggtcaaaatggcaccattcatcaggtaagagtacctgctattttttcattagaattttacttaccatcacgtttatttgagtcataaataggaactgaatttttggggcgcactcttacgggcctggttatctgaatgcgtcagaaggttttctgacaatgggtcttcggctacaaaaggatttccgattttcccattagcccgaaaatacttattcattattatttttaattttttctttttagtgcatcaaaatccctgctttcctcgccaccattcgcttcaacttcgtccgataaagaaactgcagacaaaattgtggtgtattggaggtttctctaagcgatgaaattgaaaataaactgaacgatgaccaatcagaagatntaaggttcataaaactaataggttttatagctaattattcatttctaaggtattatgttgttgacccgaatcggactattttggataatttgcgaaacagacacgtgagtcatccattgtacgcataaagctaaagcgattcaactgacaagggaactgtagaatgggtataattttggaatcattgggtacgtgatcgatcctattaaattttaatatacacgcccccaatatcataaattaaaaagttatgagtctcgaaaatacaaaaacaatcattggaaatgttggagaatcattaaaaagaacaaaattggaaatggaatggccacacaaagtcaggcaccaattttggattttttatgcaccataactatttggtttctcgatatggaggcgtaatattaaaaattgcgatagaatagactatttattctctctatccaatggaaccaatttatactcattttccgttcgggttaaggaaggagtagatgttcattttatttcaaagggttgtttggattgcgtatttaattcaatttttatttgcttttaggtcaatggccatccatgttttgtagttgtgctcagcagacacacagaatttggcgagttggaattgccattaatatgcgaggaggaacagaaacatctgcagaagcgaaacagcgaaagagaacagacaatgaatggtcagcggggggagggacattgggatgatgccgaaccataccaaaatgggtggctggtctgtacaccctaaaacgtcactgaaaaaacaagcgccggtcgaaacgtcgcagaagattttttgtttccttgaattttcttaataaaagcag

SEQ ID NO: 14008 - DNA, 1487 bp, Heterodera glycines
tgctaaaataaaacagaaaaatccaaaaatatataattttgattcttcaaagatggaattcttcctgattctcaagcagaagcacatcaaagtgcaggtaatacctgtgagtgaatccattttaaatttaatttcctaaatctcaattgctttaatcctccatcatttttaggagacgtacgtttccgagttgttggtgaagattctcgtcgccgcggacatgttcaaccgtctgcagcagttgctccaatattcggtgatcgaaaaatccaaatttttggcctacgaactgatcgctttgtcctcgcgctgtcccccgctgtaccaaattggattggacatgttgaaaaggcgtaacgactgggaacaaattgtggaggcaagtggaatttgacgaaacatttaatggcaattaattcaaatgttttgttggcattcttaaggtgttaatgacccgtggacatttgctggaggcacttcgctttttgctcaaagtgcaaatggaacggacggtgttcagcaaaacgttgcggcgactgctcgacctgacgtggaaaagtgatgaccggcagctgatgttcaccgtattctcccacctgctccatgtgcagggccgcaaacagttggccgaagtgatgtccagtcagtcagtctcagtcgatgaacaataccggggcaaattcggaaaatgggccttttatattgaccagtccttgggaagcttatctatattttcaagccatattttaagtcaccagcaaatttgtcaatttttgggcaaacctacttgataaatggctctaattattgaatatttaaggtgatgatttcgagcggtacgacaaggagttcaaactgttgtacgacaaaagcgaagttgaggaggcggcgcagcgtttccgcgaagcacgcctctcatccatccggcgccgttccgacacttatgccgcgcgcaacgattcattcacttccgtgtcgggcaatgccgaagacagcagcggcagcaacagcgggggaggacttgggatggataacacgctctaaactgccattttttgaattctattgtacaaatttggaaaaaattcaattcaattatcgttttaacttggagtcaaacaagcgaaggatgaatttaagtcgtgaggtttaacattaattgttaaaagaatgtaaaattttacataaagaaataggcgtgcaaaactgcgattcagaaacgaaaaaaggtggaggttttacgagaccgtcaaacgcctcaaaactaaaatataatacgattttcaaaacatccttccgacgcatccgatcccttccctttgctgctcagctcagcttccgctctatccattggtgtggcagcaaatgtttgcacaacagacaacaaagggaagggaaaatgtgcgacggttggcggctatcggcggtggcattttttgggcggagaatgcctatttttattgaatacttccccattttttattatg

SEQ ID NO: 14009 - DNA, 2167 bp, Heterodera glycines
agtcatcatttgcagcaattctctcccaccccttccgctgctggcacaccttttaagctaatgcatccaaacagggcatcatttgctgaacaaaaacattttcattttatttatgcgacgaatttaaatttataaatatatttctgttttttcacattatatcaattttgagtccgattaatccactgaaaacactttattaggattcatttaaaatccacaattaaaaacttcatttgtcagttataataaaataaaataaaactttttttataaaataaattaacctttccaatggggctttatcttttttgcgtgtaaagatagattttccgtttgctgctgctgatgttttcctcacatttttcttccgctttttctttttcttctgctgccttttccctcctttttctctttgtttattccaccgtatatctaccgtattccgtggccaccatttcaccagcattcagcgactttcttaccgtggcatacggtgacaaaatcgaagaatcaatcgcccgcagggacctcggttcattgggcagcttcggaggtggcaccaaaatgccaatgtttacgcgaaaacggccgattgtcatggtccacgggtgcgaatcgtttaaaattaattaattaattaaaaatcaattagcgaaataattatcattttctaaaagacaatagaaaaatcaacagattgagcacttttgcggcagagtatgagaacattcgacagtactttctgatgaacaattacaccgatgcggaagtgtacgcaagcagttacggacatggcccggtgaattggactcatgacgcgatgaaatgcgaacacgtgcagagggcaagtggggcaaggaaggcgccggaagggggggggcgggggacggcacaatttgctttgggaattaacccattagcggtggtctctttcagttccgttggctaatgctcgccgttgccaattacacaagttcgcaaattgatgtgatcggctacagcatggggtcgccaattgcgagaaaggttttcaaaaaagagaaacagttctgattaatctgagcccctaaaattgacatttctttttggtcggttttttcaaatcgctgctaattattggtttaattacccgtgcaaatgcttgccgtgctgagacgaagtacgaaaagtgcaagtgatcaaattaaaagcaaaataattatttaaaaaattaataatcaaatgttatttaatttaatttaataatttactatttaaaacattctttacataatttaaattttatgttaatcataaacgtgtgagtcgaagtttaaaatttgaattttcttatattttagctttgttgactttggcatagaggctatgaacacttccttaaaatcaatatgcatttataaattttgctataaaatcggatatcgaaatcgaggtttttcagtatttagaaataaaattaacgcaaaatgtgaaaagttatttgatgctatttggtatttaaataaattaaccattaaataagaggctcagcacaatatgattaatataaatatagcgaatattttaaataactaatcatattaaatttaattaactattttttaaattgatcacttgcacttttcgtacttcatcattacaccaattcttgctgctctgacaatgaatttttgaatttttcaattttcggcaatttcgggcggcgtttgcgtcgacaccggcgaacatttgggcgttccgctgactccgttggtgcacactttcgtcggcgtcgccggtgccaaccgcgactgtgtgcatttgtgccgctttttgacaaatgtcaccggcgatgcgccgtgcaattcgatcaacggaatggcgtgccattcgcggtttcttcgcgacattaacaacgcaccccgggggtaaaagagggcgattgaaataaaatttatttttaaaatttactaaattaaagtcaaatatgcatttaattattagccattataaactgctgtctaagacgacagcatttcgaggccactcatcgcgtgtacacaatttactcccgccatgacgacgtggtgggctatttggactgcgatggacttttggtcagctccatccctttgcaggacaatcacattgaggtggaaaaagttcattaatgacctgccaggcc

SEQ ID NO: 14010 - DNA, 3286 bp, Heterodera glycines
tttagtgtatttttctctcacatttgttacatttcgcttttcaccaaaaattaaaaaatgtattttaaaagcgctactgttattttattctttttggttgtttttattggtattggaaaatgtgcatcggctaatgcaaacaacaaaaccaaatcccgaggggcagtaagcaccaccaccaccgccatcaccaccaccacaactgtcaatccacagaagattggtgtgtttcgtttggcatcatctactcgtatggggaaaggcagcgtgactgggaaaccactaaaaattgtcaccgcccacaccaatatcagcaggaacacaaccaccaaaaacaacaacaacagcagcagcaaaatcaccacccctacaacaaaaactgcaaaattggctgtggatgagcagttgccagtcgcaacactcctcccaacattgattcatcaaatgtgcaaggatcgtcccggggaagaaaacttttatcagcaagccgtttgctgggcactttttgcgctctatttaatggtgattgtcagtctggtacttcatcagctttgttctatctgttggttaaagaagaaggaggtgacggctgctcagtatggacagcgcgcagatttcgactattttgaggcaaagtcgggaaaccgaacgagttttccggggctgtttcccaagtgaccagctcccagcgccggacacgctacggtacccagcggcgctagttgtgaacaatgacccacactacaaacaaggatcccattggtgcgcgatttatgccccttcgaagacggaggaagcggtcatatattttgatagtctcacaaaaacaattcctcctattgtaaagacatcatttatggataaatttccaaaaggttttgttacaaataagcacccgtaccagtccccacttactaccacatgtgcaattcactgtatcgtgttcatctatcacatgtccttaggtcacccatttgacgcatttctgcgtatgttagacgctagtgaaagccccgacatgtattctttgtgcattttgaataaaatgattaatccgtatttatgtgtgtgtgccaattttaccaccctttgggaaagggcatagggaatgattgattaatttattataccacggcgcacatcgcgcgctgttggtgcctaccgcatatatacagcgagctcacgcgggaaaggctcacttttttcgtaaaaaataaattaaaatattaataaataataataatgtcgttggaagatcacaattattgcggcgagttgggcggcaacgaagcgcccacaaagagaagaaaaagaaatgatgatgtggagggagagccgaaatttcaaaaaaactgcattcgcactctgagcgccgacaaacagtacagccaaaagttcaaagtgcagagtgtaaagtcgactttatcattgaaaatctgcccgccaaccccgagtcaatgctgcgcgcattgttcgctcactgcatgtcaaccgccctggacgagtcacagcagaacgggatcacaccggatcaattgggctctacaatctcttcagatctgctaaatccgagcatatggattcccatacgccgcatttccgacaacaccgccgactcaattatgaaccgcttccttgaggtggcacagtcaaaatcgcgggagggctctctgtggggctcgccgttcactgtgaccatcacaacgcttgatgttgcgcagctacctcagcggcaacaggtgcgtggcagtgggaaaaggacaacgaattcagtacaacatatcatcaaagagagtgctcttctgcgaatcaacaacagtgatgatgcctattgtcttttttacgctttggagacaagcaggaagtaccacagcaaagagatgagccgacagaccttttctaaatatattaatcggcagaatgggcgacgactggaagacgtgtttggactgatgagcagcgcaaacattcgcaccgatctgagagaatatgacgcggttgtctatgtgccgatagtcgtggactattggaatcggaaatacgccacagcaaaccagcgatttaaagtgttcatttttggcgcaacaggcacctatcggccaaaatttcaatatgtgccggacaattacaacgtcgaaatcccgctctaccatcacaacggccatttcgacggaattcgatgcggggtgggcaaagcggtgtttgggcgtgactactactgcttttcgtgcgagtgcccctacgataatgccaatgatcattcttgcagtgtaaagcaaagtgcataaactgcggtcgcataggagtggggcgaccgtgccgagcggatgacaacaacgacagttattacagagaatgcacagcatgcggcaaggatttcatgagccaagactgcttcagtcaccatttgtcgagcaatgtgtgtcaacagttcaagaaatgcaaacagtgcggagttgtgtggaatgtcaaacaaaaccgacgaaaaggacgcagcggacacgtttgcggtgagaaattctgctacacctgcaaatgttaccataagccggagcggggctgcttcatacagcagttgaaggcgcgccgccccataaagtacagactgatcgcctttgactgtgaaacaacacagaacacgcgaattgagggcgaccgcagacttcattctgtcaacttcatctcatgctatgtcgtctgcaccaagtgcataaacgaaaatttgtggcgaaattctctacaagtgccatgctgcatttgtgggcggcagcgcaccgtcacattctcccaccgtgcctatgaacgcacccaaaccgatgcccaattcatcactccgtgtccaatggcggcctttgctcaatggctgctcagcgaattcgatccgcgctatcccacaatgctcttcgcccatttcgggggtcgctttggcaacattatgctgtttcggcagttcttcctcaacgagttttgtccacagatgatcgatccgtcggggtaacaaattatacgaaatgaaaattgcgaggggcgaaaaaaacccggaaatcatcgtaagagacagctggaaccttatgccggtgccgctcggcgctctgcccggagcgtttggactcaatgtgcaggttaaggagttcttccctcatttggcgaatgttgagacgaattatgggcacattctgcagtcgctaccgccaaaagctgactacttatacggtggaatgacgcccgaccggcagcgcagatttgaccagtggtacgcagaacaccgccatcagcagttcgacct

SEQ ID NO: 14011 - DNA, 1020 bp, Heterodera glycines
agagtattaagagtggataaatatgtattttatagaaccttacacagcatagaattgtatagcaaattcgaatttttgttatttaagattttcttgagaagtatctttaaagggggtggcatttaatgggctcgaataagtgagtaattaagagtggatgaatatttgctttatagaaaactacacagcatggaattatataacagattcgaattttttgttatttaagcttttcttgcgaagtatcttttggcagattcgaatttttggtatttaagcttttcttgcgaagtatctttaaagggtgatggcatttaatgggctaggaaagtaattatgagtggataaatatgtttaaaggtaatgtccaaaattattcaaaaaaattttttttgctgaactcacaagaatattaattttaaaaaataacatttctaaaaattgctaatattatgtcaatgagcccaaaatggaaaagtttgcaattattttcttttttgaaaattaataaattttcgatttatttcatatttttcttataaatgatttttattgctattttttgccattttcgagaattcaatttggaaatatttatgtgaatgttttcaattatgtgtatattttacggttttatttgcttataatttgaagccatatttattattaggaaccagtgttttggctttattaaaagcatatttttcgtaaatattttggcctttttagcattttgcaaaatatgtcggcatttttcgattacttcaacgacaatgcactgcaaatggccgatcaaaccttttctttaaatcaccttaaaataaaaaaaatttccaaaatttacccacaaattttttttttataaaatttttatttaaaattttttactaatttacgtaaaattcttatcattgatcatgattttctttcacaagcaaggttggttagccgctctccccctgatcaaactcgaaattgttttgaataatttttaaattatatcatcccgtttttctgcaa

SEQ ID NO: 14012 - DNA, 1681 bp, Heterodera glycines
  unsure (1)..(1681): unsure at all n locations
ggggggggggggggggggggggggggggggggggggggggggggggggggggggggggggggggggggggggggggggggttttttatagatancaataagcatctcgggtaagtgttgagaggaattgaaaagaatgaatgttaggctaatagtccctgggaataaatttatctgcacaggggcaggggaataatgaaggggggggcgtgaggtggtatgtggaccggttcgagagggttggttggggtgttttcaagggaggatttagaaaatcaaaaataggtgcgagaaaagggtgtcgcaggtcctctatggctatttctttgtcgttatttagctgctgcaaatcattagtattggtaatccacttttacggttttaaaacccgaaagattaggaatctcttagacttaccgtagtgaaatttatttctgagagacaacacaacttggttttaaaaaaagttataaacatttgtcagagtatatttgttaccagggtcaagcatatatatttatggattgtaaagtccttaaaatgtttattcagtcaaaatgaatttatattcgatagccctaagaattctctattaaacattaaaatttcaaaaaatttcattgagtttcaaaaaagttatggccaaaaattctgactcaagattttttgaaattttctgaccataactttttgaatattttattaaaaaatttttaaaattaatattccgttagagaacatctagagctattgaatgataccaagaattattaatttgattgaatttaagccaagttatgaatttatatgtcttacatttttttttgttttactaccccttggcggatttaagaaacgccctggcggatttaagaaacgcccaatgtggcggatttaagaaacgcccaatgtggcggaatttaagaaacgacccagcacgtgcagtgagttgacgcgatgacattttttgcaacatgttgaaaaaattcaaaaatttacactaaagtaatctgtcgaaaaataatcccccttctccattgtcctcccgtctctaattatccccccccctttctgaggaggttgaaaaataaaccccccgggggataattagagaatatacggtattttgttttaaagtatttcgttttcgacaatttaggtaagtaggcactacacaatatattatcacagcaattgtttttgtttgatttgcaatcactcatcgattttgcaactttcagcattggcaaaccaaatataataatttttttcctttttaagctaaattgtactaaaattgacctcgcctcaagtgagatatgaattttcaaatgttttacgaaatttcaatcgacccaaaaattgaaaatttttcaagaatttaaaaaaatttaaaatttatgagacttaaaattagcttcatttcgtgctaagtacttcaaaatataccagtaaaatattttcacctcctctttggcctaaaaaattttcgacaattgcttagggggcttagctcgaaaatttcaaattttctaggcgtatagttcaccactcgatagagcttccaaagctctccaatttcactcagaggagatttttcgttgaaatcaacctctttcatctaaaatagcacatgataaaaatgtttttcattttttcaaaaatattctnttaaatattta

SEQ ID NO: 14013 - DNA, 1190 bp, Heterodera glycines
  unsure (1)..(1190): unsure at all n locations
ttattgcgagagctgaaaaantcgggagatttctcgcttcaaggcaccgaaaggtcaactaaactcaccgcttccatcgcctttgtagtgaattcgtaagctttcgttgccaaaaatttcgagctcgttgctacaagcggtgtcttcccagcaattttgctgcgggttggcaaacttctgaattttttaaaaataatttgaattttattaaagtttcacctcagcgatattctgacgaacatccgaatggacagccgttaaaagttctgaaaattgaaaaaattaatataaaaatctatggaaatattcaacgcctaaatttttacgttacttatttgaaatatttttattgttttattttaccattttgaaatctgtccttcaaaatgccaataaaattgtccaacaccgaaaatttgtcccaaattttcttttgctgtctgtccaacacttcaacttttgttttggtggcatttgccatcatatcaatttccatcttcaattggtgcgcgaactttgaaaaaaaattgttaataaagcaatttttcaatttttttttaagaattattttcacctcgtcaatttttgcataaatttccgtttgttgagcattttgcatttgagaaaacaggtcaactaaacaaagagagaataatgaacaataattaagcgttaattagtaaagcaatttgtcatttccgccaaattttacttaccaacaaaattttccaacgacgccattttttcacataatttttgttgtgcggtgtccaactgttccaatttctgcttctgttgttttagcatttcgctgacttgaccaaaagtttcttctaatttctccacagtcgcttaaacataccgtaactttatttgttttggttcccaatggctaccgtaagtttccctaccgaatttggcggcctttgcttcctgtttttgttgctgctgcatttgttttaattgtttctcgagtttttcagttctatccaagactttctcaaattgaccagcagacactgaaaagggaattcgaattttttggtttatttatggcattttgttctccgttaaaattatttgggaattttaaaatgcgacaagtgatgtatttttaattttccaaaatttatttaatgaatttttccttttcaaattttccttatttctaccatatgcgtttacttacc

SEQ ID NO: 14014 - DNA, 2551 bp, Heterodera glycines
tttatcccaatgatttttgttatctttcaacaaatgcaatttttcaatcggaaaatggaaattatcggaccggccttttaccgactctccaaaaaaccggcaaattgatcagatttatcattttaaattggtcagattttgtccaaatttgggtatttataatttattactttttaatgcattgcgttattctcttaattttattccattttaatttctgtcctccaaactcactttctctctttccaatttgccaattctccgttcagcgaatgtttctttgttttccaacacctcacctttcacttcttctgaaatacaattaaacatttgaattttatttaatttaattaattttcaatatttattttaattttctctttaccctcatctgctgctggtgtgaaatcgtcgttacttgttgaattaaaagaaatcgacattttaccagtttaaaatctcttaaatatttgatttagaaaatgccatttctatacaattctttcggttctatttcaaattttcgaatttctcagtgttggtctagaaatggttgaaatgatcttttattagagggtttttgacttttagtttacttccttccctatatacatatgtcatttaagcccaaaaatgagaattataaaatttgaattttcgactttttacccggatccgggttcggggttcgacataggtcggaattaatgtcagattcggattatgcgaaattaaaacccaaaataatcttttcgactcgtaaataaaatttcgattaagtggatcaaaagaaatgcgaaacagcagagatgcaaaatgaaagccaaatgaaaatgaatgatgcaaaacgatgggaaaattgacggggggggggggggaagataatcaaataatcattagtctttcttagcttactgtatggcgcgcaaattcaaataaataatcaatattctctacccggaccgaagcgacaattaaccgggcccggtcttagtaattaacagtgctttttttcaatttgtggaatgataatagggatggaaatttattaagttaaataacttttttttccagtgactcgattattcagcactttgtttcaaatatgaaaaaatataaaaatgcaaaaatgtaatataaatgccaaaatagaaaaaagccatgcttttcagaagtttcaaataaaattaaaatgctttttaattcattttaaaggtattttgaaccagcagaaaaaaaatcatttgacttaaattcccattcctattttaaacttaggcttatgacgaattttacccaaaagtactggtgaaatttaagaaatattaactcttattttaaagttaacgttgggctctgaattcagtgatttttgtaatcctatataataaagttgagtgtttgtatgtgtcactgtttgaattagtgtggtgttttgtttgagttttgcgttaaaaatgaatttgaaaagagatgaaaagaaattgttttgaaaaagaagagaatataaagaaaagagacgaaaataaatagttaagaagaagaagaagacaaaagaaatagcacagaaaaagaaggtaaaagatttctccttctaggatgtagaggttagagggagggatggtgggaaaatagtgcactgtctgattgtctgtctacgcgggcagcggcgggtgagaggggcatacagtgaacagacgcgtgctgctgtgcagcagcagtctgttggacgcgtgcgtgtgtgtgggagaaggagggagtgggaaaaaaagagagtaaattgcaatggaaaagaaaagagagtaaaagaaaggaaagggagagataatgggaaatttgtctcgcatcccttccttatttataacccatcttttattatataaaataattaataaaataatgagcacatttttgtgtttgtttgagtggaaaatccggtatatgaaggttctgtttttgtgtgtaagaaaaaatttatggttttgctgttattattattttttgtctaaattttcgtttttgttaattgatttccattttgatgtgaaagcttttgttttgtttatgtaaacgataatggagaattgtttgattaaaaaaatacattagaattcgtttgaatgaaaaaggtttgttacttaaaaaagttttttgtacttttccttgcttataatatgaaaagaatctgatttggtttttgatatttgttttgaataaaaagcatgttatgatagtaataaaaaatgaaagaaaaatcctttgatggatagaaaaagcaatataaatgctacatctcatgttttgctctgtgttcgtagtggtaatattatatatgcagattgggagtattgtacgtgcctatttgcggcgatcagaatttaggtggaaagttttaaacaggtcagttttaatttgaatttatggggtgggggcaataattatacaccatagtgttttgatttatgggttatatttcaatttctggattccttttaaatagttctgtattccgttgctgaggttgagttccgagtgattgaaatgtcggaga

SEQ ID NO: 14015 - DNA, 1302 bp, Heterodera glycines
tctccgaccccctggaaacctaaaaaatttgaaaatttccttttccaaaaatggttggactcataaagtgcatttagaacatcatcatatatttcaatttccttttgcaaatttcattgtttgtgcccctcaagatcgttccatacttctcgatggttggaatgccgtgctggacgagtctttgctgccgttattcaacaagaaaatgaatatggccgagacgtccgacagcaaacggttcaaacaattgcgcgaccttttgtccggcaaaatttcggagaatggccgttgcgatgtcattcttgctcaagcaaaggcattcttcgattttgaaaaatggcaatcatactgaagaatgggctttctgtttcccgcggtttttgaggctgctgattacgaatatgaactcggatttcctcaattccgaaccccgggccggaattcgaaaaaaaaattcaattttttcaaactaatttgaagcttttctacagaaaaatgcatcttttgaaaaaaaaatttcaacttttttattcgaattctggtccggggttcggcaattggacaaatccgagttcaatgattcgtgatcgtcgccctcgaaaacctctaaatactcatttgagaccaaattgaaaataaaaaaaaaattttaaattaaggacccccattcttcaggattgccgaaaaatgtttcaacagttttaaaaccttaaaatccccatttcgtaggatcatttgaatgaatttctcttcggcgttttggacggcaacggcggcggcaaaccctgtgaagatgaggcggagcttatgcgtcaaattgagcaattagaggaggaaatcatccgtctgagggctactcttgagacttagctgcgacgatcattggaaaattttgaccatttattgtattgacccactcttgaaaatggtctcggtatgctgacgatggtaccccccccccctttcggaaaaaaaaaattttttttctagaattaaagttgttttagtggttttcagggtcggaaaatccgattctgacatcaattttcgatcactttcgaacaccacggacccggattcaaacaaaattcaaattcaaaaattttttattcaaaaaaagggggtaccctcgacagtattaccatggtcccatttcaaaaatattgccgcttttgtaaattttatttcatttttcttttccgtttgcatcataatgtctcctttccctccgagtgccaccgatatcttcagttcttctggatgccattgacaaattaataaaacatttaaagcggaccgatt

SEQ ID NO: 14016 - DNA, 2916 bp, Heterodera glycines
  unsure (1)..(2916): unsure at all n locations
ttttgcattttttttaaaatattttcttcaaaaaagttacaaaagcatacattctaaagcccgatggtctaatccgtgtgtttgaatttagcacaaaatgccggtgcccgagtttgggctgtccgcactgtcggccaaacaactgttttggcacgagattgaggagaaggtgtcggcacggaacagtgaccatgtgttggtccaccggtggacgggcacaacggacgccgacttttggacggagttgggatgtgacatggatacaccggtggtgctcacactcgaggccattgaggaggacccgaaccatatcaaggtttaattggatacggaatttacagggttaggtaggctcttatatgggttgtcccccataaattaaaaaaatatatgatttttaaagagtcgcatagaatacttttttccttaggtttccgtggtccgctaatcacgaatacggcatctgttttgacccatttctctagacccgaattcgaattgaatcgctttgtgcaaaaaatttgaatttaattgaaaatagagtttttcactttttgttcgaactcgggttcggagttcgaaagagaggaaatggatgttggattcgtggtcagcgacccccgaaaacctaagaaaagatgtactcaaattgcggcttttatgcctcctaaataattttttttgcacaaaacttgcgcttttctcccttttttttaatttgggggggggggggcggccgcataatggaaaagtaaccaacaaaaaaaattttttttttttgaattgtccatctttcaaccaatgcgctagcatattccatgaattcgttatttaggtatatttttttaatcatcaatattttgcagataatgttcagctgcggctccaagcattcggccttcattttcaaactttgtcccatcatcgaggatgcttacctgatattctttgtgccctaccaaaaattcgtaatttttttttgttattgttgaaaaacaaccattttttcattccaaattttcaaactctaaatttgttggaaaattcagagatagttatttggctagagaaggtggcatgggttcaattggtttgagcattttatctttcacggaacaaaattttttttttttgttgcgcagttgcgaccgttcacgcaaaaatttgcaggagaggggaaaatgatattgtttcgcaactcgagatccaaaaatgaaacaatttataattgcatccgaattatttgtttgctttatgcaccttgaaacgacatcgcaaaaaaaaaattttttttttaaattttttgaaaaacaaaaatatattgtactagtaaatgaaaacaaaattgctaatttcaataaataacgagaaaaaaaaaattcttttctctttaaatttgttttttctaaaaaaaatgttttttttttgcgggagattcattttgtctttttggcatgctccgctaaccattaccctgtttcctccattttttttctccagcgtgacggccacctgagtctgctgtcctcgctccactttctggaggagtacatgggccgcatgcgcagccgcacgttcgtcgccgagcagaaccaatgcatcatctgccaaaagctcaccgagctggtgttccagccatgcggacatgcaacatattgcaaaaagtgtgagcgaaagtcggccaaggacccgcgctgtcccatctgtcgtctgcacggtttttatttttgcatatttgttttggccaatgcctagccctggatttgaattaaaaaattttttaaattacatagaaggcggtcggtctctttcgggttcagaattaaataaattggataaacccattttcgtacattgattaaatgaatttttggtgaggtcttattgttacaggagggatacgaataaggaaaattgaaaattttcaaccgcaaaaattttttaaatttttaacagtttacgaccggtacgagtaccatctggcgcccggcccgcgctgcgtggtgtgcccggcccggttcggctgtcaccgcatggactgcatggtgttgccgtgccgatgtgtggtcggctgcaagcagtacacccagttggctgtccagccgggccgtgacccgtgcccggcatgcaatttcgagccggtggaccagctggtcaaggtgtttgtccaacaggaacagtagcaccgggcgttcagcgagtgattaattgtaaagcggcggactgaccggggggggggggaggcgacggcactgattgatcaatttttgccttctttcttttttgttgcaattttcctattttgtttcgtaggtaaaagtggagaaaatgacggagtatgtgtatgtttatttgaaaacagaaatgggaatctgtttgcaaatttgtagccataattttcaaaaaaaaaattttttttttttttttttgctacgggctcggcttggaaaattccgtcttctaccaacccagtcggtcacgttatattaaaaagtttttggattggataattgaaactgtttccttcgtatgcaaaaacaacaaaatttgtcagaaatacacaaatttttgtataaataaacatactccgtcactttattctgcacttttctcatccaaattcctattgttgctgttgttcgaatttacgggaaaatgtcgttaccaattcattccatttttggtaatctgtagtttgcccccccccctttttggaaaaaaaatttaaaaaaaaattttgcactaaaaacaagtttgcagaggttttggaggtcgctgatcacgaatccggcatccatttccactctttcgaatcccggacccgaattcgaacgataaatcgaaaattcaaatttttgaatttcgaatttttggggcggatatcgantttaaatacacgcaaacgtctaaaagtta

SEQ ID NO: 14017 - DNA, 1551 bp, Heterodera glycines
attttagcatttttaaacatttaaaaatatttcttccacattaaattatttttcatttctccaccagccagaaaactatttttcaattttcgcaatttaatctaatctattttggcttttcatagacaaaaaccattcaccaaatccttgtggcgattttatttatttttttttcgtccattacgcgaaaaatattttctgtttttccattttccattattatttttttttaattgtataaaagtgcacaccgtccaaaatggacggacaaaacgcaaaataatttgttgcacatgaacacccgaagagcaagcagcacataccacataatttgtacaatctgtgcatcaaaataatgaatgaatgaatgctttttcgccgccgtttattttgcgggaaaatccgtcgccgcttttcctttttcgatgggtccgtttttggcgcaaaaagtacgcgccttttcattccgtccgaaaccaccaaaaagcccccccccccccgctgtcccccgagggcaaaaaacacgccattgaacgcacagcacaacaacaaacaacaaaagggggtggtgcccggagggtgcaaaatgggcaccgctaatgtcatcattagtgctcattagcccctccggttgttaattggcttaaacaacagcgcgcttgcagaagtgaagaacacaaaaacacggatttgtgcagataaaaggactttctctcctggttttcactcaaattaatttggtattgcatagtgttgggattttaacggagtgccaattttaatgtttttacattttgttaaaatttaaaaaaatcggaaagggccgggatgtttcaaagcctaaaactaaggccaaaacgcaaaaatatttacgtcaattattaaatttcttaatattatctaaaactatcgcagcaaccattgttccatcctgaaaattccaataaaattttttacattaaaaaaccgaattttgccgcagggaaaacggaaaatttctccattttataatacaaaaaacaaatagcttttgcaacgaatcacaacgaattccggtgggcgaaaacgaacgaaccaaaaacgggggcgcggggggggggggcaaaagcgacggagaaaagtcgcccgaggcggcgaaagcgcttcatgtccgccaaaagttggcgaaatgtgcgcttcatctcatcccttctcatgcccatcattatcatcatcctcttgaacatgatggagaacatcttcatcttcatctgctcacatcccatcccatccttttcatattccacaaccgccgccgccattctctcattaatctgtcgccgtcgccgtcgccgaaaaattgcaacgaaaaccataacgctcggccggcgccaactgttaaacccccaaaaatgtcaattcccagtatttatgtaaaagttttgtagtggaaagctttctaaatttcttaaaatgtaaaaaaatccgataaaatttgtgtcatgggattagctaacccctaaaatggcaaaaaatattaattttctggcgaaaaacggcgaaaattttttt

SEQ ID NO: 14018 - DNA, 2422 bp, Heterodera glycines
ttagttttttacacacaatttgggacagaaatacaaaattttttccatttggacagaaaccccaaaatttggtaccatttggactgacatttgtgatcatttggacagaaaacacacaattttttgcgcaaatgatataacactcaaattggctaatagaacacccaaatgtccaaaaaaagataaatcattaatttgtctctttccgttaaatgagttctgctggggctgaacaactggcgacggcaggtttttgaacacgaacagtggcgcgatcactctgtgatcagaccagtcagcgatcactctgatcagtctgcgagcactttgatcagtcagtctgacccaatcgacagccctctctcccctaatgggtggacagcaggacaaccaactgatcgatgatgagtatcgacgcgatttcttgtttttggcttttgtggacggactgttacacattggcgtcacattgttccgcctgccgcgtcggggatataatgatatccatcagtttatcaccttctttccaactgctgggcaattattattataattatcccctcctaccaccagttgatttttgttgttgcgctgcacgcgatcagatcactcatttcagtaattttctgtaaaaaaacagctaattatcagactacagatcattcatttttgttaatctgctattctgtaaaaaatcagctattattatcacgaaaacttgaaccattcaatcacttatctcagctaattagtgttattagttccattgggctccaatcactgaattatcagttttaattcttatcacattcaaatttgaactgatcaatcactcaactcagttaattatgattattattacttcattggtttccaatcactgaatgatcgctgctcagcttaattgctaccacattcaactgaccacttaattgaacaccttcagattagtgatcaaatagttaccagatcatttaattttatattgaaacggattaaaatcactcattagtataattattaccacataagatgtggctaccgaaatcggattgtcaggaaatatgatcacaaatatttcactaaccctgatcacattaagcagctaattataagggtcagataaatgactacaaaattccatactgatcactgaaatattcagataataatattttcaagatcacaagttttagatcagcccaatttttaatataaaaatttcacattgcttattatttatttccactaataatgtctcccaatcattgataatttagcccatttatgaatttaaaacttccttaatcatactaatttgatcactaataaattttcaatcattgcctcaggcaatctgatctccaagtctcgcgagcaccaaattgcgcattccaagcatgccaattaaatttcaaggtcattactgactaattggtttcagcgactttggtcagctaatggaccattaaaaatcattttgatccaaaacccacgacaatggtcacataaccaattctcggttttcttatcattggtcaaggtcactcttctaaattatgccgagaatatccctttaaatatcccaaaggcttaatgatcagttagatcagtccctatataatttcatataactaattgatcaaaggatacttccaagaagctaactcagcttcggacactgatcagtcaaaaaatccttagggtttcatcgctttctcaggcattgatcagcaagcagactgatcagtgatcggataaaccacattactaactgttcagaccgaccaaactgatggcctcgtattttcataccgatccttgatcaggaccaaaaacccttgcaaatttggtggggacaccctgttaatgcggcgccaacgtcaccaaccattcaacaaatccccccccccccccccctaaaaagcttgcttttgctgccgactgatcaattgcgcgacgctgctgcagagatccgtttgtgcgctggtgtctcttgtaccatttgagcgcactgatcagcggaaatgtcgtcgtcgagaaaaaaagtgatcagtcattagaatggcagtggctaaggagcggggggacttaatcccactacaaatgtcctcaataaggctttttattcataattattctaacagccaaatattgcgcatcaattttcaccgaaaattcctgatcactttggcccttgaattgctgttgatgagtatcctattaataaggtcatgcattccctgatcatgaacaatcgacatttttaatacctttgtaattcccgaattgcctgttaccccttctggtccgtgactggacaatccgacagtggacaatcggacagtggacattccgacagtaaaacacacaaaaagatattaaaaagccgtcgccgaagtggaccgattgtgccataatc

SEQ ID NO: 14019 - DNA, 1344 bp, Heterodera glycines
caacgaacagttcaaactggacaaagtcagtgcaatggctgacgaaatgcacaaagcgttcaccgacggagtgccctttccggtgcttaaagttctcgaagtgagtaaaataatagtagtgatttctcgaaaatatcatgcaaatgtcaatagttacgtgatttaattttaatcaaaatttgtgtcgcgggacaaaaaaaaagcatttttagtagatttttgccaaaaattaactagttttaagcatatgtatccattttttcaatttaatggaatttggtggttcggcaatttcaccggggaaaattcttcaattttaaagaaattagggaacattaaaaaatccatggaaatttaacaattacgagttcgtcattggatgccaacaatatccacgtgaaataaaacttaacatcttaacattctcaattacataaaattttcaaagtaaggacaaaaaaaataaaattctgctttatgccaatttatgcattttgcatccaatttcagtacttttctatgggccaacaatcattcgcatggggacgacagtttcggaacgcaggcaacttcactggcacaatgctttggttcgattaattttctaatacatccggacaatccgtcagttaaaacttgatttttcggcaattaattaaaaatgccgaaaatttttttaggatgatatgccattgagcagtttcattgaaaaaaatatgcagagaaaaatatatgacattctcactcgttaattagtttatcataatttaataattaaataaaataattttaactatttaaaaaattactttttttcatttatttaatatttataaaaaataaagccattttcgttatgtttatggcgcttttctactaacagattgccctcgagccagttaaatttctcatccataaaataacaaatagtttttctaaatttacacaatattttattactaattaaaaattaatataaacaaaattccgttcccaatcttttaaatttgattcccgacatattagcaccaattatcagaattgaatatgaaattatcacagggccgccttcttcgtgtggcttgtccagtgccttttgctgctctttttgccgcaccattttgccaaggccggcatattctgtggcctgttgacattgttggcggatgtggtgagtcagccgcccttttttattaaaaaatcatttttaatacaataatttaaattgtgttcttggcgagttcgaaacagcaggatacgaaagaatcccgagtttcgacatttttgggccccggaattccaactttccaaaattatttggacttcagaatccattcctggctc

SEQ ID NO: 14020 - DNA, 2375 bp, Heterodera glycines
ctttatgcactaacaaaatctgtggaacatttcgcaatgccggagacttttataaaattaattataaaatagaatgcatgccgttttgtgcactctttcagctgttcctggtgttttgcccgtccgatctgctgatccctttcccgtctgctgatgcccccgcatcaatcgcttttctccattttcggcaagtacattcctcccccgggggttgttttttgtttttccttttaatacttcggcccctcccttcccgagaacagccttggtgcctgcttttggatgagcatcgcagcaggtcagtcagtgtccaatcactgtttttgtgaatatttttgttaccaaaagtgatcgtacatgaaaatgaaaattctagtccctatctccccattcaatatcaatgtattttaatatcgatgaccatttaataagttctcgatcaaacagatagaataggtcaaaagaaatattccaaaaattagtaattagtaatgactaattactaaatactgttttattgacaataaaactcataaaaaattgctaatatgaatattaaaaaattgcttaatattttaatctttcccgacttgtttcagccattctcgagttgctcttctctgccactctgtgttctctgcaatcacttcgtctgtactctctgaacaccgttctttctgcttctctggacaactctgtcggcccaccaaagtgccgtttcggcggtggaagacaaagcatcgacgccgaaaatgggcaacaccgcggcggtagtcaaaagcgccgctttggccatattttgtcgccgatcactccgtgcccgtctggcaaaacgtcgttgactctgtcccactgttctctgaacaattcatcgccagccgtctcgtcacgaagcactgcccggatcagtcctggccgccaccagcgcacgttcgtctcagccccgctgtcctcctcctccacctcggacgaagggccggtcagcaacagtgcggacagcaacaagcaatccgttgcttcgtccatcttttccatctctggcacgtcgtttggctcgacggcaccgccgacaatggcgccggagagcgacggcaccggcagaggggaagtgaccaacagaagaagcagaagcagcctgatcagcagtagcaggagaacaaccgcagctgatcagcaacaacaacggattgatatcggagacgacgaagaagatgacagtgatgagctgatcagtgacgacataaagcatttcacaatgagaagtggggcaaaaggggaggactgttggcactgatcgaacggaggtgccaatgagtgacaatgaacgggtgctaatcgatcagacagtgccgatgccggtgaataaggaaacaaatgaagaggaaaagctcagacggataacaaacccaaaatttaatgccaattagacgggtaattaattcatccaattatttcatatgtaaaagcaatgtgaagcaggaggagagtgagcacgaaacgaatgtttcttctcctccctcccctcaaattagcaattatctcaccaaaatacaatatatttttgtactttgcttttcattttttgcaataaatttgaatttataaacagtggcttactgtatatttctgttcgtactgtattacaaaaagattagtaaatgggaattgcttcggcgagtttctcgtaactagagaccgaagttttgaggcatatgccttttttctgcgcacttgttccgatatattaagcataaataacacattttccacttggtttgaagcttcaacgttgaattttattatgttttttttttgccttttttgggattttcgtgccttaagtaccttttttggcattttgtctttttggtgcctttttggctttgttccgaaaattccataaaaaatgtatttaaatttgaaaaaaaatttcccggtggcgcctaccggcaccgccggaccccaatttagccttattttttttaatttaaaccccaaaatggcaaaaaattagtcgtttttggccaaaaggggatacaaattcctattttttgctctccaacctgaaatttccaaattacacttttttcacgcttttagtgccttttttgctgtctctactcataactcaatgaaactaatttatcaattacctattttttaataggataattttttacgaaatgattactgctcactgtttagaaccggtgtctaaaaaagttctaaataaaaaaacaacgaatttttagtgattggatttttattttttcaaatcgaattattcattaattcgtcattggatttcgaaagatttgttcaactgacaaatgagaacttttcaatttacagaacaaattttcataaaaagacca

SEQ ID NO: 14021 - DNA, 5280 bp, Heterodera glycines
aaaattaattttgaaaatattttgtaaaaaatattttagaattaaagaaataataaattttcggtttatagcggtcataaaatcctacgtaatattttgatttatttgtaaaatgaaaaataaatatttttctggaaaaataattaaacatttaagaggaaaaaaattgtccaaatttttcgtcttgatgcaatttattgccagttttaacggttggttccaaaaaaaaatttgaaaatttgagccacatttgttgagagattttgttcaactatcaaaaaacggagtaatttagagctcgacaatgcgtaatacataaattccggaattcagtacaaaagcccttgaattcgggtccaaccgattgcgagaggggggggggcagcggcgagcagacattcttttttgcttttcataaccctttttgcgggatgagctttttgaaacaattttataaatttttgtttaaaaacttaagttttgtagtttgtaagtatcaaattcttagatttattgtaaatgttgaccgatttccaatttcttaacagattttgcaccagaatgggttcgtccttcgatgcacccttaataatttgaagcaccccactttctcattgttccctatttcgccatttctttttccttcaaattgcaattgtttaaattatttaattttaattttatttaattttttgattttttgtcaattttttgcgatttttgggtttattttctttcatttttcattaaaaaaaattcaaaagaatttgcctttttgtcgcaaaataaaacccaaaattttatgtttcctaatgaataaccaaacaatccaacgaaaaagcgacaattagtcataatttgaatgagcaatgatacaacaaaatgacatttaaaaaaagagtttggaatggaaaaacggagaatttacggagcccaagaaagcatcgttattaaaaaacataaaaattaaattgtcgaaaatatttttgataaaattcagagaatgtccaatattattttttcacatttcccatgggaaaaattgaaatttgtttttgttttgccgtctttgatgtttctttctgttatttataaaaattacagtttttcatatgacaattcgacgttattcaggtcattcaattaaaattattcgtgtttaatacctttttaaaattctaattaataacttaattagtttttaaaaattattaattttagaaattaattaaaagtcaataattaagggccccactaacaatcttttcctttttggtgccgaatgtatctgttcaaaaatggcaatattctaaattcttataaaattttttgtcttatgtgtaataaaactggtgacttttacattccttttattggattttattaagaatttgacagaaattaaatatataaactttagtttatttttaaacttaaatataaaattggccaaattaagtcaaaacactcaccgaaagattttttgtatcataaatttttttttcgtttttatccaaattaagcatttatagtatgttcgatagctcaatgtgttattattattctgccaaactttttccaacgcccggaggagcaaaaatgcattcttataattcatttcataattaataatttagctttgcctatttgcaaaacaatagcggtgaattatcatcagaagaatgctttggagaaaaggtatttaatttaataattttcaaacaatttaaattattaagatggtttacactttgaaaatgaacgactcgcgaataattcgtggcaaaaagtttaattgctcattaacatggcttttggagcgctacaaactttcagacaaatacgcaattaaagagaaaattgaagtctgttttttaatttatttttaatttatttttattaattttaatcatttttatgtcaaataccctggccatcccaaatttgtgttcgtgacagccgcaaataataattatttcccttatcttcggacgttcattgcaaatattaaagaaatatttggatgccaacagaaaatcattgcttatgatttggaaacggtgacaaaaaacaaagaatgggtaaaaaaatgtttaattttactgtaatttaaattatttttaaaataaaatattttaatattaaagaaaatatttaatttaaaaatttaagaataaaaaattttattgtaatccaactaaaattatttacctatattaaaaaataaatttaattcattaaatgaatggataaaaaaattttaatgtaaaattaagaatttattcaaaaataatttttaaattaaattaattcatttaataataaatcagctagttcaaacttcgtgaaatttttgtacttaaaaatccgttttctaataatgtttttttccttatttctgaagatgaatgaattggattcggtgtgcaatttcgaatggcgaattttcgatttcggtcaaatggtggaaggacgggttcgccaccccaaatgacactgtcgtttggattgacacttcagtggttttccataaaaatgatttcaaacgattttttgaaccgatgcaaaacggcaaaattggcactgtgcaaatcccaagctgtgagtgaaatgaattgaccttttaaagttaatgagtgaattataaactaattatcatttttttagttgctctccacacaatgaatatgtcaactcatcctggtaaaaaaaaaaaacattttcaatggccttactttgtaattcaccccatattcccaggaatgtacgaatatttgccaatgtacaccaattttgagccgaacagaacatacgaactgattggaacttataagcccatcatcaaaaccgacccgccacagttcgagacaaactttgtgattatgcacaaatccgagcaaacgcggcaagtgatgaaatggtaaagaggcaataatttggaaattaataatttattcatatgaaattattcatttaatttagaattgaaaattaattatttctagagcccggacgggcccggcgggcttttaccgggcgtcccggtcccggccccgtttttttttggagaaaaacgggcccgggacgcccggtaaaacgggcctttttttgaacgggcggcccgccccggtcaattttcgaagcccggtcccgggcccggtcaatttgaccgggctaaaacgggcttaaattccgccagcgaaactgcccaaaatttaaataattattttggcgaaatgtctttaattcaaaaatttcaatagaactttggatttttgaaatttttgggcaatttcaactgttaaaaagaccccaaaatccatatgaaattgaacaacattttcataactttctttttacaaaaaaaaaaaatttcaaatttcatgaaaaaccaaaaattttcttaataaatttcattaaaagtcaaagtttttcttcagcgtcgcctagtacaaaaagctaaatttttttctaaaatgtagctcaaaatagcaaagttttgtcattttttcgtgtaaatctgttaacaaaccaaactcaaattttcaaaaatttacccggcggccctgtcggcactgccggacccccccccccccaatgtcgtcaaaatctttttgaaaaaatacaccttaaaattcttttgaagagtaaaaaaggtcgatttacaatggcttgacatttctaagctaaaataaaggaatataaaattttttcgaatttttaatcaaaattccaaaaattttgaaaaaaggccggtcccgtagggcgcccggtcaaaattttggaccgggcccgggacgcccggtaaaacgggctttttttgaacgggcggcccgccaacggtcaattttcgtgcccggtcccggtactttcaaaattccgggctctactcattactaagaaaaaactgtttacaagcatttagaagcgaaacaaattcatcgaatccaattgaaaaaataaacggattttatgccagttatcttgacaatgatttaataaaaatataagaaattaattggtttttctatcgtaaataattattttcttagaaatgtatcctttttttcatagatttctctatttttgatccttcaaaatttcttctccaaatttcttcttccattttgaaatggtcgttctatcaattttcatcattaaatgaatttttgcacaatttcaattttttcttcatccgtttttgatttatagcttttcttttttgttgattaagtcctaattgcttaatccatttataaattttgtttcgatttgtccccaattttttcgctattttatgttcaattttcccccattcttttgctgaatattttcttcctttttcctttattttctcttttattttataatatttttcaatttttttgtcacttttcaagagagtattatcgaatttgtgccaatgataccaatcgaaaattcatgtttaggattttaagaataaaatttttccaaaaaatgactgaatgtcgttattttattccaaaaaaacaattcattccatacaaaaaaaacattttattcatttggatgtaggtagttagttatacaaaaaatgcccttaaaactgccaaaaaatgaatctaaaaaacctcataaaattgtgaaaatttaaaattgactaaataatatttaacgaggctaattgcatattttattaattactccatttttaagatttataaagatttttaaaatacttaataaatagaaataaatgcgctttttggtttttctttgattatttgcaacaacagtataaaacaggcaaataattagaaatttatttaaataaatttaaataattcaattagccaagataataattttataaaataaaagaattggtcaattttctatcgaaataattattgatcccttttctcattttctgtttttaatactttaaatttcttctccaaattgtttcttccaattgaaaatgctattttgatggattttcaaaatttttgcaatttcattatcactcatttttggattttcactttttattttccaataaattttcattttttccattttttctttcaccattattctcttacagcgaattccgaattgtttcttccatttttcaattagtgaacggcttactccaattttattacaaatttcgttataattttgtcgccattctttggttgaatattttcttttttgtttatattcatttgccatttcaatgaatttttgtacaatttcgcgtttttgttcatcagtttttgatttgtagctttt

SEQ ID NO: 14022 - DNA, 3147 bp, Heterodera glycines
agtcaatgcagtcgaggagaggacgcgggatgtcgaattggaccggctgcccccagtggccacacgttcgacatgacgacaatgacggagaagtcaacgttggatgttctcggctgctaaaaatggggtaaaactgtctcaatgaaaatttaaatttcgttagccacctgcttgtactgctcggaatggtccctgctcagcgcgacatcagtcagcagacgctccaactttgaggtgtactcgaacccgcacatgtgcttcagctttgcgatcatgcaccgctcctgctcctcgctggccgacgtgtcgtagacgaggcgcttgcacaaaaacttgtggaaaaacgcgtggaacatgtccttgtcgtcgatgtatttgaagacggtcatctgtgacaatggggatattatattctcatttttaagaaaacagaaattatggaaaatttcaaactttaaagaaccaaacaaacccaccacttggtccaggtactcatccatcttctcgtcctccgtgttgcgtgcacttttgcgcaaaagctgatcacagtagaggaccaacagctgcgacgatttggacgcattccgagccatcgccgtaatttcgttgttgttgatgaacttgcggaaggcgcagtccattgattgcacaaagccatggtcagttttgaaggagtccaccaccaagcgattgtagagtttgtgcctttaaaatggttcagtatttccaaaaacccacccgctactcactttttgaggatacagtcgatgtactgcttcggattgttggacgcttcacgcgcaatttgctgaatggccgccttgccctcctgttcgatgtacgccttcaggatctccttgagcttggccaacccgttgggcacacgcgaacaaagtgtgtactgaaaaaaaaacgaatttatgcaaaaattgtgagaaaagtggtgacattctgcaaatctcaccatccgtccaagatggtcattctgttgacgagtgagcaatgactgaaaaaagtgtaatataataaaatggacaattctctttctgctacctcaaatttgtcgtggaagagctcgaggtgctgcttgatcaacgccgtgtcacatgcctccatcagcgagtccattgttgtgttgtccaggtaaatttggcaccggtcccgctcttcgctaagccgttgttcaacctgaaaaaaagagaaaaacatgaagaaagttgcgctcgtaaacgagactcccccctgttcaccacccacctttttcatatagtcctgcacattggcactgttcgactgcagaaaattgttcgactccgttgtgtagaagttgcgagtgtcctgtttgtgtgggaaatgtaaaaattttgaaatgcacaaaaacccatccaaccgacctcaaggaagcgctgctcaaagttgttgcggtacacttggtatttgacgctcggacgatgcaccaccgaattctgctgctggcccaccgccggcgccgggtcgagctcgttgatgccaagttcaactggaaacgacaaaaatcaacaaatttttggggtgacgaagcaaaagtctgactgtatgaggcgaccacgccgctgatcagtcgcgtggtgatgcgttccccgttgcggtccttctccaccagcgccagcgcagcggacgtgatgttgtggtgcagttcgtcaaagatcaccgatttccagatggagacagccagctgaaattcggggaaaatttaaaaatgaaactcatcccccttcgtgtacgaccgtccccacaaactcacattgtacacttccaaaatgccgggacgcgtcgcctcgtcgatgttccgtttgatccaatgacggttcaagtaggagaaaatgccgttcgccacggtggaggagaactggaatttggtccactgctcggtgtagtagtccagcagctggtcaccggacagacgctggcattcctgaaacaaaagcaaaatttgagttcggtttcctggacaaaattccgcccctccccccattaactacctgcagcaatttccttgcgtactcttcgacgaagtggcgcagtcgcgtgtagagctcctcgccgacaaactctgcaccagccgccgctgccggcgtcccgcggttgccccgacgcgcccgattgttcgttgtttcgtgcgtgaagttgctgctctgctgactcgtcgtgcagtggttgaagaccaatctgaaaacagagggaagggaagtcttacataacagttacacctctgctcaaactcacgtgtaatactccatgtagcgctgcggtgccattctctcctgcgtcttgaagatggactcaaggccgggcgaaagatccctccaaatcgtgtcgaatctgaccggatgattattcatccttgattggcagcggacaacagcaaattagtagacaaatatgtgtgcttaagtatcgctgaaaaaagcaattagaaaagcgttttgttatttcttttatggttcaagttttggaaaacaaaaattgctaaatttgggttcaattgcactttaggcgtccaatttaggtaagctgaaaaaaggacagtctattctagagcaattagcaatagcatattccaaagttttaattccgggaatgaatgtttttggaattcaaaaataaacacagggaaaatttggaactttacaaggaaattgtatgattagagaagacattaaataaaataaacggaaacgacatttgtgcagtttaaaaaaagtaaataatgacaaaaaatggagtttggtcgcgaatttataaacaaatttttgcagcggattacctacttttcaaaaaaggtcgcaacttttttttctctttgtcattcattttccgtcgctatattgaaagttaccctttttgaaaattttttttaaaagtcatgaaaatacatttccgggggttttcggggccgttgattaagaatatgacattcatttcgaccaatttcgaaccccggacccggattcgaacaaaaagtcgaaaatcgtaaattttcactttttataaatgataatttttttaattcctttttagcaaatggttaaaattgcaagatattccattattgattccaacaatctgccgctcctcggctttccaacatgtgggctctaattcatt

SEQ ID NO: 14023 - DNA, 3420 bp, Heterodera glycines
cctgttggcatttctcatgccgtgagtgccttcaccgtttaagtccggctccacaatgggcaccagcccaaaacgtccggcaggtcaccgcaaaacgggccattacctttaaatgtttttcgaatggtttaaaagcaatctgcgaaaccatcgcattttgctcaagtgcccatttggaaggtgttcgttgcgaaatgcgataagcacaacgaaacttcgcaaaagagcagcccccctttttgtactcagcgcaacgcgcggccaatccgtcgaggcctaataattgtaattattaatgatcatttagggtaataattcataatccctcccttttccccaccttgcgtgattgtctcccctttccaacttttgttgctcttctcaatgtcttccgttggcattgggaacagcggaattgtgtcctcgtcaactttaacccccacagcgatgcccgtccgtctgagaaggtccaccagctgatcgccttgatcagtcatttgccgataagtctaacaattaggcagggaattagaataatttgaaattaatctccaataattggttctgccaatccgaaaactttgaaattgctgaaacagattaaaaggagggcgacacctcatcctgaacaatgactgcgctaatgtgcttgtgaatattgggagtggtgaacaacaattgtcgaaagcgacggcgattctctgcggaattttccatgccaaaaagggtcaatcgcgagtcgagagcaactgaaaaggcaagtaatcaaaggtgtgtgtggtgtattactcattaccgtccgaatttgccataattagctaattacccccccccccccctcctctccgcccccattcattcgacctgccgggtcgtccgctgccaaaatgcctttgcccggctgaagcattctcgccacgatatcgcgcagttcgcactcatttttctcactcaattcgaaagtcattcccatcgtttgctcctcctcttcatctttgttcttttgtccattttttaactccattgaattttctttcaaagtcatttgaaatttgaatttgaattaaatgaataaatcgaatcacttaattattgcattatttttgcaccaatcgacagaataataataataatataatataataataatcaatgagtgctaatttttgttactgaaaaaaagaggagaagattagaagaaagattttttattaaataggtgggattttgatcgaaatttttaaattaatttttaaatattctttgatttagtgaagggtcaaatgggaaaaacaaaagcaaaatgcaagaaaatgaaaagggcagaattaattaattaattaattaatgggcggggggggggtcgagggaggccgaggtcagcgaaaatgaaaacattgctgaaaacccaacggatttcacgtgcataacagccgaaggataggacaaatgatcgaacgggcgatcagtgcccccaccgctcccccccccccccccccccgccacagccgccgcttagtccgacaaaacaaatgcttaaatattatattattaactattaccagagagaaacaccagaaaatggctgatgagagcaataaaaaggacaaaactcacagaataattaattcactaatgcataattaattatatatttattatttgcatgttttatccgtccaaaatcacttctttttttaattcaaaatagcattgtgagaatcgctttcgtcccaatttgggtcgttaaataatgtaaggaagaagctggctgggcggttaaaacgcggaaagcgggggttgataagatccataaaagaaagggcggatgtgcctcggtagcttaatggtagagctgcccacggaaagggtgcatgagtgggttcgattcccacccgaggtttaacattttgcccatttcttattataatttcaatttataattcgcaaatgtgcttaatgaggacaactccaaagtcgaacttcgtcgtttttcaaaatccgaatccgtcccctcgacgacaacagaagtgccgctttttaacttaacctcgtcaaatgcaataaacttcccgatttttgtgctgtgaattgactgaactgcttgaactaagcatttaaattctatgccggatgtgaagatgataatattttgccgaaagggtgaaaaaaagaacactaaacaaaaagataattaatgcaataaatgatcaaattttgcgagaagttttcttagtcggttgaaatttgtataatattgttgaaatgaccagccaactttctttttacactcattaaaatttatttgcccaaatacacaaaatacaataattaaataataaacaattaaaaaataacaataattaaaattcgtagtttcaaattcctctctctcccccaaaagattataattattattttcttcgtcctttttttcttatcaatgggccagtctttgattttgggctttgcaaatgaacggagagggaactccgatcatttgaatctgacaaaggccaaacgcagtaaatggccaaattgtggctgctttccctcgcctttggcattggcatcgccccctttctttttgccgtgtccctccaaaaggccaaagggacgacgcgaaaatggttggccgaacacatggacgaagtgatcagcgaaatggacttggccaaagcatacggagcacgtaagattttgtgaaaagttttatgcataattttacgcaaataaaaagcgtacgatttggtcgaacaaacgcttaacaaacggcggaaaatgctgcgaaaaacggcgaagggaacgagcagaaacattgggcccaaaaatgcgaaggatgccgcgtacgaccacaaaatgatacggcacaaaatatttccgatggcagccgcttcttatggggacacggaaaatgtgaagaattgcattcggaacacttttcgaaatgccacggtttttaaaagtggaggaaatcaacagaaatttcaaattcagttgtaccgtaattcggtggtacagtgtaacggtaaggcttatgaattgtgttcggcatttacggcagtgtcccatgaggacaaagcgatcattttgtcatttcggtattacaaaatgaattgtgtcggaaatatccaaattgacgttttagtgggacggacacgggatatcaattaattgaagaaacgattcaaattgcacttttcaaacgatcccaatcacctgacgaagaatgggggaaagtaagcagaaaatgagacaaacaaagcacaaatcgcaaaattcgaaaggttggaagttatttcctgaagattttcaatcagctcgtcgaagagggaaaaatcatcgatgatttggccaaattagtgaacacgtacaacaactgggacgtgggtacgattttaggaaactaagaaattgaaa

SEQ ID NO: 14024 - DNA, 2607 bp, Heterodera glycines
  unsure (1)..(2607): unsure at all n locations
taaagtaattaactgttattattcccatgtactaataataattagtcaaaaaatnntaattgtttaaaccacttttgaattagtggaatnaaaaatataataatntagttttaaaattaatccgatgaaattaaatttgttttactttatcagcgcaaaagaaagaattattttaacacaacaaaaccactaacaattttgtgctgcttcttctcgcccttttctcagtgcccaacttaaacttcttccatccgcaaatggcaccgctttgtttccaagtgaacgaatattacgcgcagatttcggagttggtgcccggcctgtacatttgcggggtgaccggactgacgccggccaacatgaaggccttccgcatcgagttgatcgtgaatgccaccagggaggtgccgaacctgaagagtcttggccatatccagcggatgaagctgtgggtggaggacacgacggatgaggaccttttcccgcactttgacatcgtggcagatcaggtagagtctctatgatcagcagcactgatcgctggattgatcacccatggccgttgcagatccatgccgtcatccaagaccgtggtgccgttctggtgcactgcgtcgccggcgtttcccgatccgccgccatctgcttggcctatctgctcaagtatcggactcggtctctgagagccgcctaccatttgatgtgctcaaagcgtccgatggtccgtcccaatcttagcttttggcgccagctcatccactacgagcaggtcactcgctcaatttgccatagaatgaccaaggcatttggggtttcagcaggtcaagggcaatgtcggctcggttcgcatcgtgcgggacgaagcacagcccgacaaattgctccccgacgtaagtctcggaagcggcactcgagaatccggacatttgttccctttcaaggtctatctgaagatcgtgatccccgaccagctaagccgccctctgtcgccgaccaatgccaccgatgcgtcgtccccccaatccgtgccaaagtctcccttttccgacgagccggcaccagtctcgcaactgccgctgagccggcatcgcaggaacagttccggcgggtcggcgcgtgtcaaatttgtgcccgtgctcgaagtgctcactgaaatggcggctgagtccccggcgtgatgttaaagttttacccaaattaagccagatgtctttttgtattgtttcttaataatttacacattttaataacccttctcttccacttttgttttagaactgttcgtttaaattaaccttttacccttccgggtaattcaacgggtataaatattctcaacttcatttttttcgttttgttcagaattgtcattttcatttaatatgaattttttctggcttgaatttgatttggtaaagattaaatcttttaaaattattaaaaacccaaaaataccaattgattatttataaaatattgtgggagaggagtaatgaattcataaaaaataatgtgaggaaaaaatatgagcaaaattctgggtatggatcgtttcggcaatgacgattcggcattgatcattcaattttaaaatacccccaataagggctattttagtgaaaatcttatgcaaaattttaccctgcggcgcctatcggcacccggcccgcctattggaagcatagtgcggcaaaaaaaaaagcattttcatttcgagtttttttagcagtctcatcaaaattaaatgatttcaggaaaacattaaaattaataataaattaaattactcatttttaaacaatgagaaaatttttggaaatttgaaaaaaattgacatccgaaaaattctgacactttttacttttttgttcttttttttttgtttttttaaattaaagacaaatatttttttaattaaattttttatcacttgaaaataataaaattaagatttattgatttttgtttatttattttttggtaatttcccggttgaaaatcgaggtcccagaccggcttttctagttccggcaagtggttacatgacatttgcgcctatgcccaaaatcggtttcagacttgtttttttcaatctctgataacctaaacagcattaaatgagtgatcgaactgattgtgtttgatcatttgataataatgaatttttgaaagaatcataaatattcaaacaacagaattaatgctactaataaactaaaaacagtattttcttattttaatgctgcttaggcgatcaatgcttgaaaaacttaaaatgtccgaggcgcaaatgtcacacacggcaaatcacagtaaagatttttcttaaaattccgggtcccgtgttacttatcgctaatctcaattgaaaataaaaatcacggtaactaatgataatattttagggaaggccaaaagaataaaaactcggaattattaaaatgttagaatattaattaatactaattattgtaataaaaatatgacaaaatgagtgttcacatttttattcattcaaaattaaggatggtggaataacaataaaatgaaatatctttaactttcaggggttttaattcatttaaaataaatgttatgaaaaaaata

SEQ ID NO: 14025 - DNA, 1506 bp, Heterodera glycines
cattccgaggtatgaacgcagcgatggcacatctgtgggtgcgggcatttcactaattgctgagattttctccgggtccggtctccgtccgtttctgtagatgatttgtccgagatatttgatctcttctcggaaaaacgaacacttttccaatttgatccggaatccccactcttggaatttttccaaaacatttttcaagtgatcagcgtgctctctttgacgcttttgcttacgatgatcacatcatccaagtaagctgtggcgaattcaaattctgccaagatttggtccattaccgattggaagatggctggcgctgatttcacgccaaaaggaagtctcttaacttcgtaattgccatgatgggttgaaatcgagcatagttttctcgattcatcatccaattcgatttggagatatgcatccctgaggtcgatttgcgaaaaatattttcctccatttagggttgcgaaaatatcctcaggtaagggcagcgggtgttggtggtcctgaagggcgttgttcagaccagtggagtagtcaatgcataggcgtgcacttccgtcggcctttttcaccgccaaaatcggagcagcccattcggtgtattcgacttttccaatcacacccattttctcccatcgctccaattctccatcaatcgcttcttgagcgttgtatgggactgggcgagcctttctgtagaccggtgcggcgtccgctttcaaagtcagatgcgccttaaatttcatacaacggcccaattcgtttttgaaaatttcggggaatgacgctttgagatggtcgatgtgcgattggactgtcgaattttgtggcgattttggagttttagtgaaacctcgtgtctcttctccgactcggcacaaatttaccggcgcattgattttggccttgagttcgttgagcagtccaaaagcatccatcatttgcacgcttagcaaatttagcgatcccctttttgccacataatattcgcttttgatgcaaatatcgcggaatttgaaatttgcgactccctttccgacgaatttgacttgtgttccatcgaacatgcatccactttcggtgcatttgcggagtcgggggctgccgatgacttcatgtgatagttcatcgatcacaattatttcagccccgctgtcgagtacgaatttgatgtctttgccatctaccgccacgtcggttttgaaaaggaagcggagttcactttcatggccgttccaattcgtaaatttccaattttcctttttggaattggcaatttgtttctccgtctccattcctgcaccttgtcgcattggccttccaaatgtccattttggaaacatttttggcactttgctgacttatgcttacactcccagtggctgtgatttgtccaaccacatcgccaacattgttgtgccggagcggatgatgattgagcttgcttgttgtttggccttcgtcccttttcggatttgtgacagtttggcttgactg

SEQ ID NO: 14026 - DNA, 2041 bp, Heterodera glycines
gacgaaaatcttctccttcggttttcgaggccatcaagcactcatatctatcgatgaagacagattgaggctttgcaaaaagcttttgcagcctttcaattgattgggtgaagtcgaagtcggtcacttttgacggcaggcatgatttggaatattcactgaatgccgtttccgacaatttgttcattaatgcctttactttcactgcgtcagttgcgtttggtgccgaacagtccattgcaaaagaaaacctttcgatccattccgaaattcgtcccttttcgtcggtcggttcgaagaccgaaatgtcaggcagcaccggaacattattgttcggattcggttgattgttttgttgctgctgctgtgcggtgacgagttgactaattgcgtccagcaattgttgaatattggcttgtgccattgtcggtggttatcgatcgcttttcagttgagtgttgaaattggacgatgaaaaccgcgcctagcggaacctcacccttttagggtctattggttttttgacgcgttgaaaaccgcacctggcggaacctcacccttttagggtctattggttttttgaagcgttgaaaaccgcacctggcggaacctcacccttttagggtctattggtttttttgaagcgttgaaaaccgcacctggcggaacctcacccttttagggtctattggttttttgacgcgatgaaagtcggcggtcgaaatgtggacggtttgttttcgtccacttgaagaccggcggcagaatgttgaaatccaaaaattactctcgtctggagatgtaataagtggataacaaatgcgctttatgtcgtatgctttttagctgactgcgccaattgttcggtccgaggggttttgttaaagtccaattaaatatttataatttattggagaaggaaaataaagtcacaacaatttggggaacaaatatataaatgcaaaatgaatgaagggaagacaatctaaaggggaatgggagcatatttatgggcgagggaaggaacatgaaatggaacagaaatcgattggcattatgtcatgtcattcaaacttcggcggcagtgccccgaacagaattttaaacatttgcaatgcaaaaattttaaaaaaacatgaaatgttttattacaaataaaaacaaaaaaattttcatgtttaaaatgaaaaacaatcgtaactaaagaacaaatttccaaactctataagaaataaaagtttatgcaaaaattaatccaaaaatcaattgtgtttattgtttgcaaaataaattgcatttaatttaaaaataactataatttagtagctttatatagataaatattatttaataaatatctcagaagttgtattatacatgttaaaatgaatgccaacctgcaattaacaaagctctacactgatttgaataaatatgatttaacgaaactaaatgactcttacgctgctaaaaaacatttaacgaaagaaaatttttaatatgccataattaattaattactttttaatatgctattttaaaatttattttgaataaaattaaaaaaaaaataaaattaaaatattataaacgaaattttcggctaaagattatatcaatatattcattcctatttcggaaattttatcactattttgtaattttctggcattttttctcactatttggataatcattttgagatttttcgtatttagaattgaaaatattccaatgttttcaaacccgtttctgcgtaatctgcttaaagtactttacagaaaaatatgaaaaattctaaaaagagttttaaattataaactagcaaaaattgctcattaagaataaaaatttaaaaaatttaaacacttaaaataaacggataaacaacaatgatatatatatatatatatatatatatatatatttatatatacacatatatatatacacatatatatatatatatatatctatacatatatatatatatatatgtatatatatctatatatctatacttatctatactgggaaaaat

SEQ ID NO: 14027 - DNA, 2743 bp, Heterodera glycines
tctgaaagtttctccttatcaatcactatttgcattggcgaccaaaaggtatgttctttttaaaatgtgctttctataaatctagaaaatggaacaatcgcagataaatactgctgaaaaatcgcccctagacgaataaaacaattaaaatttatgcaagtttgggacgggtaatttagctgaggtttaaaatttaaaatttctgagaagaaaaatcagcatgaattgtggtcttttccattgtttcagatgcggccaaaggagaggccaaaggtgtaaaaaatggattcaaaattttgtaactgcaatttgtttataattgtgaaaaaagggtgcgaattgaactcaatgtccattagcaaaattcttctttcaaaacttattattattgtaagagtccattctataaatttgcttcgatatgatcagttttttagaggatgcataaaactatttcgctttttgacatttcatgagatgaattatagcaaaatgttttattttcgaatttatttttgagaaattgctattttgaaatgtcttgtcttaaaaaaagacagactttttattttcaggtgccattgaaattttggtacagagaaaattagcaatataatagaaagttaatttcaagctccagaaaaatcggtttaggtctgaaagtttctccttatcaatcactatttgcattggcgaccaaaaggtatgttctttttaaaatgtgttttctataaatctagaaaatggaacaaccacagataaataatactgctgaaaaatcgccccgtcgaaaatattcgaagaaaatgggggagaacacaaatgcggggcttttgcgggctcttctcttctcctccgaattcacttctcgtccccgttcgtcgtcaaccaaaattaacaaaaaagaactgcactcaaacaattaaaaccaaaagtgtatctccaacacaaattaaagtccacagcacaaaacagaacaaatttaattcaataaaaatcaaaagtcggggagagcgatgagaataaaattaccatcatttttgaagccaaaatataatatgagaaagcactgagaaaaccaaaaaaatttagaaggggaacaaaattaaatagacaaaatgccacaaattaattatttaaattaaaaacgaggtcaaatatcacatcccacccaattacgagcggcgtccctgccgttaaagaaggaaagacaaacaaaaataaaacaaaaatgagattcgattcggctgtcaaaaggtgggcgggctcgtctgggatcactgctcagcgacgcggctcgaaccgattgcgacgattcatcggagtcggatggaacgccggacgaccacgactttgctgatatggatggaaacgtgaagacgggccacggaacgtcggaggagggaccgagcggtaacctgtgccgactcgtccaaactcaaacccgcgattttgattggtcattggtcgggcggaacctgtggggccattgtcagaaatgccaatcgttcgagatggggaggggtcacctgggccttctcctctcacatttctctctggtgcattgccacgaattaaggaagggtctcctggaccaccacccttcacggcaccaattttcaccactttcgacttcacggttctgatcccgagctctcgatcgcccggaaaattcggaaccaatgatgtgagccaggcattcagcgttttcagccccttttctgtcatccatccgttatgattaacatgttcattgttaaaactcttcccgaaacgccaaatctccagcaaacttcttccttcttctgtcactgccaccagctcaatttcgcttttcttccgaaacagcgccctcattcttccacagaattcttcagattcggcctttttgttgtagataaaaggcggcaacagccagaagatcttcacatgcgcaaatcggaggcaaagttggcgcagtctcttcactttttcgatgacactgtccaccgaatcgccagccaaaattgagtcctttccaaccatcacaatcagccacttcacttttgaggccagccccacttgatcaaattgtctgatcacttcggcagttgatccttcttgcactccaacaaatgctgatcttggccatagcttcttcaattggtaggcatttgaatcgcctaaaatcactctttcggcggtgacaagtgtcttcttttggatttctgtggcacggagcttctccagcaaaaatggcgcactttcgagcgatttcctcatgccttctctttcagtttcgggcagaagtgataggccttggggcagctcaattgaaattggcccaaatgccgatttttcgacttcttttcgggcaatttggcagtggccgatccaaattcgcaaaacgctttccacgtccgattcggatggaaatgtgccgtttttgacgtcgtcttctcgggcactgcaatatgttgcgagttcccaatcggcatccgtgtccagaatttgcgaaatgagctttttggcagcagatgccgatgcgaccgcttcagacttcagcagaaacattgccaacagcgctttgagcggattttctatcttcgtgagcccgatgcctgatcggtccaggacggcgtccaagtcggccacgaccacatcggagcagcatttgtgctcgtctccggcacatgccaatgtccaagaaagcgttttcgcctcatattgttcctgaatgaccgaaatttggtcttcgtttcca

SEQ ID NO: 14028 - DNA, 2778 bp, Heterodera glycines
  unsure (1)..(2778): unsure at all n locations
ggaaaaatagtcgcaaaaaataaattcaattcaaaatgggcaccccccccactgaagttaaaattaaatatccaccagattatttgtaagggttaagtatttatattatatatgtaactacctccatccttatgcagattattacatatattttttagcaaaactaacaaagatagtcaaggattaagaattccgtctctaacaatgattttttatatttttaaactcacaacctctaacccgcgttctccagacaccctggcgtttgtgcgcgaaaatcatttcgcgctctgcgataagtagggtgggttaactacttatgacccttcaataattctaatcaatgagncctggttaaactccagaaatacggtagacgcggaacttacaataaatggtcaataccaaattgtttatgcaaaccgaactgaaaaaaagggcggaggatcggcaatcctattaaaaaccttgatcccttatcagacacttttctctgggacaaaattccaaagtgaaattatacacattaaattactttaaaaaaaaaaccaacacaaattataaatatatatcgtccaccaaattgtacagttcagaatactaaaaagctactcaaattcatttcggaccaaagcgattctgaaaataccatattctgtggtgattttaatatcccaaatatattatgggatgaaaataaagtaaaaaaaataaatgatccggcgtctaattctctaattgagtttatgcatcaaagacaattgatacagcattttaaggaaccaaccagagaaaaagcaattttagatttagtaattactagtgaattagaattaattaatgaattgacagttctagaaaatttttcaacttccgatcacaaaatggttggatttaaaataaaagtaaaattcagtcataaaaatcctaaaatttacagaagagattttaaaaatattaatttttcgaaattaagtcaggcgatacttgaaaatcgaattgatttatcaataaactcagtgttcaccgttgaacagaaatataaagaatttttaaataaagttctgaaattatatgatatttttatacccaataggcctctaaaatcgataataaaacaatcgtatcctcaaaaaataagagacttattttcagagaaattacgtttgcataagcttgtaaaaaaattccctgaaaaaagtgatctcattttaaattacaaaattatttctagggaaatgaaaaaacaattgtacaaattaagaaatgaacaagagtcaaaaattatttcccaggggcaaaattcagttaacaaattattcgaaataagttatcaaaagttaatgaaattcctacgttaattgataatgctggaaatatgttttccagcaatgttcaaaaatgtaagatattagcagaaatatttcaaaagtcttttttaagaaaatcaattgttaatggtccacaaactcaatcaacacagaataagattaaactttctgacattgaattgaatgcgggaataatttggaatatattaagaagacttccccggcgtaattccacttcaccggataatgttccttacattttattaaaaaattgtgcagaaccaattacaaaaatattagcagatatatttaggctaattttggattccggtcaaattccggaaatatggcgaacatcattggtggtaccaattttcaaaagaggcgaaaaaactgatccattaaattataggccggtttcattaaccagcactgtctgtagagtttttgaacgaattttgagtagcaaaattttagaatttctgaatagtacaagattctttgataaagaacaatttgggtttttaaaaaatagatcgactacaacccaaatattaaaaatgatggacgatatatataattctatacaaaagaatcaacaaattgacataatctatattgattttgtcaaggcgtttgattctgttccaattgatttattacttcaaaaaatcaaaaagattggaattgaaggaaaaattcataattttttaactaactttttaaaaaatcggagttttaaggttaaaattggcgaagaattgtcagaaagtttcagaatattttcaggagtgccccagggaagtgtcttagggccattactctttttaatttttataaatgatctgccgtcctttattgcaaatgaagcatcatcagttggcataaaaatgtatgccgatgatgttaaattatattatacacatgaaaacgatgaccattcaaatcagttggataaagcgattgaggctttggaaaaatggtcaaaaataaatgggttagaaatagggatgatatttttaggtgctaaaaactggcaaaataggtaggttttaggttctaaaaaacccgcaaaataggtgctaaaaatgggaaaataggtgacaaaatgttccgaatttaggggtctaaaatcgaaaatttttttttaaaagcaaaaatattttgtcaagtcattaaggatatacataattttcaaaatcaaaaaatatcgacaagaaaataaaataaataaattttggagataaatttttgagaaatttttcatttcttaggggcgcatttttgaaaattttctggtcgattcttagggatgtattttttgaaaaaaaattttgggccggttcttaggggtgtatttttcttttttattgcatttttgttaacaaattttgggcaaaacaccaaaataggtgaaaataagttttttaaatttttttaggttttt

SEQ ID NO: 14029 - DNA, 2696 bp, Heterodera glycines
ggaacgtactcgggtttttttcgctttccggtccccgtgggaaattccttttccaatttcttcccccgaacaatatttttcagtttattagaattcaaaaatttaatcgaatttatccgaaataatttttaggtttttggctaaactacaattcgttataataaatttgaatattattggtaattcttgtagggataaaaaaggaaatgaaagtgatgatagcgtaaaaaataaggcgaatttgctgttgccggtcgcttaaatagttggcatgaaattttggcaatgcgtgaattgcacaaaactctcgccacctttgggcttcgctaatgcacgcgcgcggtgatctccagtactttcatgggtgggcgtggcacccaaaaatggtctacaaaaaggcagcaattctacgagtttggcacacttcggatttcctgctgaatcttgttgctttctcccacccttttcaacttttcaaaaatctcacttaactatttggtcattattctgctttctcgaatgacttccacccccccccccccttaattttttttttgtaactcagcaaaatgccactgatcttcaagccaactaaaacgtcaaatagccgtgctctcgttgagccttctcgtcttctgaccgatgatgaaatttggaagcaaattcgtagtgccagtcgtcactttgtccgaccgcaagcgcaaaatgccgtcattgtgagcccaccaagtgcccctcaaatcgtagaggaaagtgaggcggcaattgatcagggagggtcaattcagaatttgggtcaagtttcactgtcgcctgctgtcaattcggtccgcgaagtgcccaaggaatatccggcgctacatccgcgctacttttccccgaatttccgcggtcgctctcccgtccgtcatcgctcgactccgattcgtgctcctcctccgcgtcgccgttggtcgccgccgcgtcgtcgtttgtcgccattccgcaagtctccgcgtcccgcccaacgccatggtcccccgtctcatcgctctgaaatcgacacccgccactcttcggtcacccgcttttttccgcctccgccgatgcctttgaaccgcgttggatcttcaaaagcgcaaatgattccaccgtttttgacccctgagcaaccaccatcccgaattcaaaattttgaaatgacctataaccattgcactatgacccaaaatttttccaaaatgtgatcagtgattatttttgaattgttgtttatgtttgatttaaattttttgttggtgtggtgctgtttttgggtcaaaaacttggttctcattagcgtttttcctagttgttagtcgttttggcacttagtcattgttcatctccaattagtccacactcaaataccaaaatcattgcatcgagcggttcgggcaccgtatttgttgcatttttggattgttgtcatggttacaaagtaagtgccaaacattgaaaatcgtataaaattaagtacaccgtacggattcgaacttgcccctcccccctcataatccccatttacgccatttctacagaattttaaaatttttatttacttcgaatgccgaaaaaactaaattaattcttcattttgtaatgttctttctattgactttaaggtataaaaatctaaaaaaattttttgtaaaaacttatttaaaaattctttcttcatctcgcacaactctttttttgcttggggttgatgattcgcctcagatggtcgctctgtgctaaaaggattccctgctttataaatttctggtaaaataaattatttataaatttttaattaaatattaataatcttcaaacttttcaaattttaaattattaacaattatcataatttattaaacctgattgtttggaactcccacgtgatttaatctagagcgtaaaatcaactcaattttttaataagatttgtataaatataataatattattctcttattttgatattttaccaaggaataattaattacaaatttaattgtttaattgaacattttttttaaattttcaataattatcaatcttaaaattaacacaatattcgtattcagtaccctttaatagatcagaaaagtatttatacccccattttggacccaaaaaaattttcagagaatttcttattttgaagacttgcctcaggatgggcgcttctcgcccgttatttaatttttctaaggacattctatcgtattcctttaccagcagcaactcttcctgctttgttttcacttccacataagatgtagcatgtttcgcgattgcatggaaagtccaagcgtctaattgtgaccatgacacgcctatccgcggactcgggcttaattaatcatttgcgtaattacatttaatttaaataaattttttatggtaattaaaaacatgccaatattttccagtagcaattcgtgcttggcgtcaatgacactgtggaaatgtttcccgcaaattcgcctgccatcagagcgccagtgctcaagcagttcgggtttgctaaaattaagaatttaattaaaaaaccttttttaaataattaataacaataataataccattgcccaggaatttcgtcacaaaaagcgccagagtagccctaaatgcgattttcataaatgagtgattttttttattttgacaaaaaaaaataattttta

SEQ ID NO: 14030 - DNA, 2746 bp, Heterodera glycines
ctagataaatttttcagaatttttttctcgatatttcttattaaaaacattttctcgggggaaagtgctgcttcctccctgctagagtcaatttttcccaaattttttgtgcccatttttccatttcccgggttttttttgttgatgttttcccccgtccgttgcgggtgccgtgccgcgcgtacctccgcgctgaccaagtcgccctcgcgcaaatactcgcgcatcaacagttcgtcctcaatggacttgcggcgcagctcaccgcccggcaaattgacgctgttcagcaacagcacgccatgttggcgagagttgatgtccaccttccaccgcttctgttgcacctcgacaatacggcccacaaccacgtcacccacatcgccgtggtacctttttaggaagggggaggcagtaataagggtgtattacgtacgtttccctccaccgccaaaatttttatttataagaaaacaatgaaatttttttaaagttcgggatatgaaaattttttttgaggaacttgataattcgtcataaaattttcatctaaaaattttttcgaggggagctgctccctggtaataaattgtaaaaaatttgtatgaggtaacaggatttcgggtatttttacgaaaaatgcatccagcccgtgttaagatgcgttattcttcagggtattactgtgaatggtttcctcctgtaaatcattggtattaaccggattttggactggaaccatggtagaattggacgaaaagatcatccagaaaattttccaagaattttttaaaaaacagacccaaaaaacctcgatttttgaatgggcgaatgaatgaataaaaaacaaaacaaaacctgctcttgatcggtttgacactgatcaacttgttggtttggactacaattccggccaattgtgaatggagcgcattttcgtgcggaaatgtgccatggccacgcatataaccggcctaaaaatgggaaggggaggggggctgggatgccttgaaaaaagcactaaaaaaatttcaagaaaaaatggacaaatttcataaaaattaccaaaaaaaatttcgcggatcccattgtacaataattttttgaaatttgaccacaaatgggaaaaattggtcatttttggtcaaaaacggccataaaatccttcttttcgctacgtcactgaattttttgaaaaaaacactggataaaaaaatcaaaaaaacttttcccctcatttttaaacaaacaaaaaaaaaatagcaaatttctgaaaaatcaattaaaatttcgagcattttcgcccacctccggacaaatcattgcacccggcactgttagttggagcaaattttggccaaaactgctagcggatgacgtgccggcattgctgatgccaactgcatcggcaacagcgagcacccgacgcccgggcggcggactgccaattcgaattgaagcgacaaacgccgtagatggaggtgccgttgcgactaatttttgccgttgcgaggcagcatactttggcatttttgttgttgttgccgatatgccaacattgtcaggcgaagtaccatcatcgtcattgtccacaatcattacagagtcattggcattatttttgtcggcgatgactttggtggctttccgtgctggcatttgcgacgaaaaatggaaaaaaagagttttggactaaaataataataataaaactagtttttcaattgggccaagtgcagtgactgggaattacgggattgggtttttgaaaaattaaaagttgaaataaaacttaattttttatttatttgaataaaacataatgccaaaacaaattttaatttttcgttattaagcaggaagaaaggaaaagcgaacaagcgtaaagcaaggaaaagcacaagaacaaacacgcttgaatgctttacctatgctctatgcatatatgtacatttatttgtttgtacactcatttatagcttttggtttttaacgatttgagtaaaacctgaatatccgtaaattaattttatttaaaagcctagacttggacctggcttttcgggacaaaattcaggtccaagaaaaatccaatttggacctgggcctagattttggatcgttgtaatcgagcccaacctttaggagcaattttaaatttactaaaaaatgattcgtcattaattccaaatcctaattcgcaaattttttaggattttcaatttatttcatataatgatgatgcgatcacgttcctccttccactcccttgtattcctactcacatttctgttcctacccaattttttgtccgtaaattcggaaactgaacagtccgacaatgctgctgctgctgctgctgctgctgcactgaaatcggtggatgaaactgcgaaaaggctgaacactgttgacacagcaccaaacaacagtacaatgtgcgatttttttacattttgtactatactatatttccaactttgaaaaaacgaaccctttaggttctcacacctctccccgtttaaaaaaattcattttcatttttgatgggatactacctaaatttgtaatttatttcctggacgctccaccagctggctagagctagacattttgaaaaaatgtctggacctgggaatacaggttggacctgggcctgggcttcctggacacaaaaatccatggaagtccaagtccaaaaaaaacccgggccaacaattcttttttcagccgcataggatggatt

SEQ ID NO: 14031 - DNA, 1770 bp, Heterodera glycines
atatatacactgaaataaacgagttataattaaaatgcactaattaagcagaaaatcttttttgaatgtaagcaattatatacaggcagacctgaggaaagattaaaaaccaaacatacaaactacaaaaaaaataaataagagaaaactttgaaaaaaaataaaattaaaataaatattttcaatatttcaaaaaaaaatttctcagtctcctagattgcttttatatttaaaataactcaatttatgtttttaaccggatcactcaaaaattatgaatataacaaattcaaatgaaggagtttgaaaaaataatgaattataaaacccgtaaaatattcattgcaaaaataattaaaggatcatctcttgaggtaaagttaatcttataaaagaaaatgttgttgatatcagaattatataaacaaataatatttaacaaataataaatataaaaaatttatttagtagatttaagaataaaaagtaaacatatttaaatatttaaaacgaataaattgaattgatagtgttgaaatttataaaataaaagacaaaatgtgaaaacataaaaatcgaaatataaaattaaattatttcacggaatacagtatcggaataaatatctattttatacgtttaactgaaaatgagtcacaacttgtgatgccacgatccgagacctactaaaacatcacaagacaaaacattatataaaaaataattatttaaaacaactatatttattaatctaaatttatttaaatatcatcttaataccgtgtaacaaattattttttaatattttgaaacaaacaaaaaaaaacagaacattatgaaacaaataacaagatgaatgacaaaaacaaattcttattttatataaaataaaaaacccaaacaaacaataaacattcaacttatctgtaagttaagccgattgtagcacaaaatccaactcattaaaaataaataaaaattcataacaaaaatactgatcttcagaaaataaaaagaaacacaataaagcattgtgagcaccaccagagatggcattccgaggccccaaaaattttcggaaatcggaaataggaatttggggatcaaaaaatttcggaaaacggaattcggagatccaaaaatttttcggaagtcggaaatcgaaaattccgaccccaaaaatgtcggaaaccggaattccgtgccatccctggtataccctcttgagcgagtcataattgtttcaatattaggatttaaaaaatataaaaaataacacaaaatttaatccaaaaattaaaattaaaatataaagcacagtaagtttaactaaatgagattaaaagattttagcaatgtttaaattttttgttttaaaataataaattttttataaaatacagtaaagaaaaaaatctaaaagtaataaagcatgtatatcaaaaaaattaaaaaccagaattataattcgaataatatgaaaaaatattaataataaaaaaatatattaatgcaaaaataaaaattggaaagaataaaatgtaaaatatcattgctgaatgagataatatcattaattagcttaaacaattgtcgtttcatctagaagaatcgataatgatgataaatttaatctagaaatttattaacatatttaaagcgaaagccacaatttgaataaagatataaaagatactattaatataatcatgatgagaattcataacccatagaaaaataatgttaattgtaaataacattcttaaatac

SEQ ID NO: 14032 - DNA, 2823 bp, Heterodera glycines
ttatttgtagaaattatttacatcatatataaaaacaaaatattaatgtttttttttacatttaaatatttaaataaacgattattgcttttataacttaaaatttactaaaagttaattttcttaataaatcaaaaatcacaactacattaaaaatagaagactaaattaattatttattttcttgtgaatcatatttaataatatatccagttgtcctatcccgtcaaaaaaccatcaataaagtgtgtttccatgccgagaattaaaggaagtttaataattatattttttaagttattaaatataaaattataattaaataataatataaataatcttatattcttacacaaaattactaatttaaaaatattaatcgataataattatcaaagcaagtttcagattaatatttattaatataaaaatagaaaagaatgtgaagtacagtgcaaaaagcattaactaacttagtttcttaaattttgaaaaaatatttaatttaaaagtgtgtgtaccttttccacaaagaattagaaaagtttcatataagcaacaaaaattatagtactaattgatcagcaaaaggatttttttttaataaaatgatcgttagtcaattaaaaaatctttgtttaaacattgacccaaaattaaatatatttttttagatgactttttaaatgatgagcgctgctctggtcatgaaattaataaataaattgaattactaaataatttattatttaaaaaaaatatcaaacaatatttttcatagagtttaataagtttatatattatgttttgtaatttaattacagtcatcaatatagattttattaatagctatattttgtctctcgatacgcttataggaaatgattggaattattttttatttttacatttttaaatcttaaatttttattaatttatcagcattttcaaatttaaaaatttttgttgtgatttattttttttaaatttaaatattccgccaaaataaatttcttagtatatggaaatgctacattactttaactgcttcttaatctttattatttattattcttcagtatatttaaaaagtattctttaaatattaaaaatttatccgcatataaatttaaaatttaatcattttaattcatcttaacaaacaaaatttttttatcttatttaaaaagaaattatgtttttttaatattgacgaagccattggtctggtcgaatccgcttcggcactttttcttttctattgacgatctctaagcctaattcatcgtacttaagagcatgtcaggaatctgttcgctttcatcattgatttataacttaattttttttaattcaacattaaatcagaatcataactaatgattaaaccctttattgatttattcaattttttcgtaatcttactattaacttaaaatactttttatcataaatatctttcactatatcaaaaaatcatcaaaattttatttatttatcgcttatatattactacgtttcttatagtataattattataatcttcttgcagatgcttattttggaagtcaaacccgcaaatttttatggtaatttattaatcaatatatttttttaaaccttttctagcaagttattaattttattagtttctgttttttatattaatttttagttttttaactcaatttcattttattatttattttcttttttattaattttaattaatttattgcgtataattttagcattagtcaaattaatttaatttctctgtttattttatcttttttctaaaaataaatatttgtttatttagattttctatttattgtgacaaataaaggaattaaggatttctgaactaataattttgttatgatttttttattttaaactttttatgaataaatgatgcgatgagttttgttcataacataactgtcatccttaatatttttatgcaattgatttaaagtaatcttttttttaaattttatttattagttttaacttgctttatttttgtgtgttattgtagcatgtgtgaaattaaaataaatttcttcgtttatctttttttcagaaaaaaataattttatataatatttgttcgaattataacgaaaaatttatcacatttattttaaactaaatttatttatgattctgttttatgcgacactcaatactggaatttaacattttaatttgctttttatttctctcaagatattatttaaactaaagtattcgttttatcaataatttttttcagcttttttaaacacttcaattgtaatgagtttttttagtcctccattatttattttaatcatttttattgcaaataaatgtatcatccgacagaaaatatacattccgatacttttttactgttttgatttgttttatatttaatgatccttaacaatttaaagatttaagtgttcattctggtcgcgaaatttaaaaaaaaaatttgtaaattatttaatgaattttttgggtcatccattgtttatttaatgaaatttattttttgaaatatatataggttcttaatttatcttttttcatgaattaatgaactgtttataggattttttctcttgactttttctcgcaacaataattttctccaaattttctacatcgtatttgaattattaaaaatttcatgcctcatgtttatttatcccagacttttttttataaaagtcgaattttacagtgttgtgatcactaagtgagaatgcgggaccaactgaaatgtcttttatgagaaatttattatttgttaaattaaatccaaaaaat

SEQ ID NO: 14033 - DNA, 2891 bp, Heterodera glycines
  unsure (1)..(2891): unsure at all n locations
tggaatttttttaaatttgaaaattttttctttttttgagcccgggaaatttatgcaaatttttggaaattcaaaactcacttcagggttggacaatgttagtggaataaagcttaaaaataaagaaaatcgggagtattttatctaattaaatgcccgggtatattactttgcaaccccctcagaaagggggaaaattcagaatcgggcagattaatgaagacgggaattttcatttttaaatatatagggctcccagattaaaattttaaaagcctcatttggcatgcaaaaaagactcattttgggttaaaaagcctcatttttatatttttttaaaaacacgtttaaaatgttatatgtgttttcaatttattgttataaataagcataaaaattcttaattttgtgaattttcggaaaattggttattttctggtttttgtgaaaaatttaacaaattttttggaaaacttgggtgagattttcgttttgacactcctttaaaaacccaaattattaaatgattgtcaaacattatgccaatttatcaaaattaatcataaaatttaacagattctgacggttttccacaaagcctcaaaatttctcaaaaacccaaaaaaagcctcaaagcctcattttgaaaattaagcctcattgacccatcaaaaaaccaccaaatgaagctaaagcctcataactgggagcctgatttaaatgaatttaaatttagaataaattaattttataaaaatagaatagaagttttttttcgaaaaaataaaaattctatttatccccccgggcagataaatagagacggagagattatttttcaacctactccgaaaggggtagataattggagacgggcatataattagagaaaatacggtatctgataatttattcttgaccagtaaaatcttaatttagaaaaaaaacaaaactggacctaattagcagtgggccaactagccgcccaattgcgccatgcatttccaacagtccttgttccgtggattgcatccgtggcccgatgatgcgcgagaacagtgtgttcatggccacattgatgttgggaaaggccggtccaatcagcagcacaatggcgccgtaataaagccacgggtttacccgtgtcaagccggcacaccaggcgtacttgctcaagtcacagcctcccaaatttgtagtagaattttctgaaaatttatatgaaaatttcagtgttacatccccctccaataacctagctgaggtaagaaaaatgctaaaacttttaggcttaaaacttctatttcggcccatgattccgcgacccgatgctcaatgatcacatacttttccggattatatgtgtggtgatgtcataaggaatgagaatgtggacatggaaaaaaccaggacctctttcgtagttcagttggttaaaagcattccacgatttggaagggcctgggtttgagtgccaccggcgggcgggttaccttttatcttcttattcatacagctaaaggaccgaaaaaattgtataactagaacttaatgattttatttatttacgtataaattgaaaaaaaaattaattcaaaggaattgctcatttttattttattaattatatagtaaaaataaaataaaaaagatataaattaccagtcgttttatgatgcataagttgaacttgattggacagaaagggccaagaatatgtgagcagatggaacagaaacagtgccaccaatgagaataggcacacaattcgatcattcaatctaagcgaaagtgccataagatgggccacacaaatttaattttcaaaaagtcacaaaatttaaaattttaataaataaaagtgactttttcagaaaaacctttataatgacttttatgggtgtattttttatttttattaataaatttcacaatgtttttcaaataagtgcaaaaaattcaaaattgccaaaagcaaaatttgcagctttaattattgaaatattttttaaaaattcttgaaccgattaattaattattactttttcccgcaatcaaaaataatgtatgccacatagacaagcagtgcaacaacaccgcgtacagcatgtgccaatgaatcatagaacaccacatcaacaggtgaccatttgaacatcaacatggcaaaagccgtaccaatgctatgaaaaggttcaaattattaagatttgtataataaaaaacagttctaatgcaggggtgcgatcgaaaaattttcaaaataagaacatcaagaccaaaaaataagtaaggacaaatcttacaaataaggacagatcgcacccctgttctaatgccaaaattgtgtactaaaatttttgattttcacaatatacatcgctaaaaaaaattcatgtatcaaaaaacataaattttcttttttttaattaaaaattttggtatttttgcttaaaaaatggaaatataatatcaacgatcatacggaggcaattctttcggcacattcaaacctaacgaaacatttgtctgaatttgattaaaaattttaatgaatttttaacttttaaaatatttttttgaattttcactttgttttcattgcgctctgttatcccaacatgactttctcgaaagcgcattacctaaaaaattatttgaatttgacattaattatgcatttattttttaattattctggcaaaatgtcaccagcaaaaccataagtaacacattgacgagagaagcgaaaattgccggaatagtgaacattgaaatgtttaagcaacgcgattttgaaacacaacagacggtgaagccgggataatcacaaaagtgaacaccgtttggagagcttaataatcatnaattggtaattattataaataatt

SEQ ID NO: 14034 - DNA, 1175 bp, Heterodera glycines
attaattattagggcttccttttttaggcaaatgcctaaaatttttgcgcacttgatacgcatagataagcacgaaaaacgcgttttccgtttggttttgggtgtctacgatgacttttataatgcctatttttgcctatttcggggtttttgtgcctaaagtgcctatttaaggattttcgaaaaaatccttaacaaaaatgcaataaaaacgaagaacacacccctaagaaatgacccaaaaaaatttcagaaaatacaccaagaattgaaaaaatttttcaaaaaattgttaaaaattttttggtttaaaaatttgttcatattcgaaaaaaactttaaaatattttataatttcatttacaattgaaatatttaagtttgaacgtgttttgttacctaaaacgttaataaaaaattttatttgcctattttagtgcctatttgaggatttttgtgcctatttaatgcctattttgcgatttttttacgcctttttaggtgcctatttcgcgattttttgtgcctaaaaaaggaagccctattaattatgcatttattttttaaattattctggcaaaatgtcaccaacaaaaccataagtaacacattgacgagagaagcgaaaattgccggaatggtgaacattgaaatatttaagcaacgcgattttgaaacacaacagacggtgaagccgggataatcaaaaaaagtgaacaccgtttggagagcttaattaatcataaattggtaatttattataaataattaatactatagcatgtcaattatttcgttaatggaacattctttaataattgaaaaaatagttaaaaattaaacattaaataaattttaaatttaaaaaaaaattattagaagtttgaaaagcatatgtgttatattattttgcttgtgctttgtatcaaaatttaaaacatttttaaataacaattagattcgaaaaatgaaataaattggataaatcaatgaatcaaaaaaataataattaattaaaattttgacagaaaaaaatttaagttagcaaccgatttattggcaatagattcctgagatttagaccggatttgatacttaaactcgagaattgcactaatcttgagtcaaaaactcacccacctggacccaggattacacccatcgcaaatccgccg

SEQ ID NO: 14035 - DNA, 863 bp, Heterodera glycines
  unsure (1)..(863): unsure at all n locations
taagaaataccgatcagccgatgaacgcatcttcaatttggtgcaaaattacattccagtgaacccgaacaatgatattgatcacaattaccacataaacccaaaccatcatattattttggaatttcttcgaggcatttcgcgcaattatcatatgaacccgtaaattgtttgctttatcattttattattattgttattattttacaattttatgaaaaatttgatgtgaaaaaaatctggtgaaaactttattagtttattgttattctacatttttgtcaaattttaaaaatttttaaatttaaatcgctcaaaaatttcccactgattcatgattttttaattttggcttggcgccgaaacgaccctggcgccgaaacgaccctggcgccgaaacggcggcgccgaatcggtggcgccgaaacggcggcgccgaatcggcggcgccgaaacgatacagactcattattccatcttttatttcattatttccactgataaatttatttgaagttctaattatgtataagtaattggacatttttttttaatttgagtacggttttatttgatttctagataaattgtgaaaacggaacataatttgcaattagaaaaatcaatttttgttggatcaaaaatcgtcaaacaacgcgcggaaattaaaaaaaactgataattctcgaaataaatgtatacaaaaatccgtttaaattaaacattcctaacggcatcatttttgtataacatgngtatcacattccgtanaaattctgataaaatcacagaanataaaatagaattcanatttggtcctacaaattcagattaattagcaaaatgatacttagattcaaaac

SEQ ID NO: 14036 - DNA, 2922 bp, Heterodera glycines
aataattttttcccatttgtattttatttgttcgggggaaataggccaaaacattagaattggcatcacaccgaaagcacaaggttacataatttttatttaaaatcatctttccagaaattttgaaaaaaccccataaattttcttatattttgtgctcctccattttttacttgtgttggaatttccatgaacacggggccgtccattttgtgctgtccttgcccaagcggtgttctcacttcagacaatcgaaagcacacagaatgccaaagaattggtgcagcaattgccaaagcgaacaaaagaataattgccaataaatatttgctaattatttgtgaccaatggcgccgatacatttgggaacaacaaatggcacaaaaacggttcaatgacattaggaaattcagctaaaattttaaatttatttttaacatttcatattgctaagaaattagaataaattgctttaatcttttaattttaaaaatgcctgaaattggattaagcccaatgtccatagcaaacagtaaattaaattcgctgcggcgtttgcatgattcagcggataaaagattgtcggaacataggcccaatatgcgcatttcttgacaatgcacaataaaaatttgctaaaatggaataaaatttaaaaaataaattaaataaatgttaatctgagcttccaaactcaaaatcgtccaaaaatggtctgaatcgattctatagtcacaacatgatgagaaaaatgcgaatcagtgggtccttttttggccattttttggaaatttgtaatgaaaaatataataaaagtgaaagaaagctaatctttttcaaaaaatcaaaattttttaaaattcaaattatttttaaagactagcttttctttttggcatagattgacactttaacgccattttcgtgtgatataaaaatcaattccgactatttctgagctttgttgggaccttcgatttaatttaaatacttttgcatttaacatctaataaaaataaattcataaaaccttaaatccacaaagccaagcgcaataaaaagcgtataaaaggaggaggtgaacggcggacgatgcctttgacacaacaaaaatgccaaatccgacaaataaatgggcaaataaacaatcaaatggacaaaagtggcaaattcggtaataaaaaccaacaaatccatataaatttaacagtgtaaaattttaaatatttaaaattgtattaacaaattcaaattataaaataactaagatcgaaatttgaaaaactttgtattatacaattatttaagaaatgaaaaaagaatatttaattgttatacaaatgcttgtcccaaaaagatatttctttctcttttattccgtgatgagaatccaaaattagtaaattaaattattacgccaaaactaatttttaaaaatggtaatgataagtagggttgtaaattatatggacaaaaaaacggtaaatatggacataaaatatggactaaaaaagcccgaaatatggactaaaaagctcaaaactgtccaaatgtggaccaaaacatggactaaaaactgccaaaataaagttttaaaccccaaaaaattccaaaaaaggtttatatattcaaatttgcttaaataaacttaaaaaataataaacaaccaaaaaatggatttaattaaaatgccaaaatgacgacgaaagcacaaatttttcatattttttggggtgtaatttttaaaaatttccaaaaagtcgaattttaggggtgtatttattgcttttcttgcatttttcttgtgaaaattcgccaaaaatggccaaaatatgggaataaaaaagcaaaaatggtgaaatatggatttattcccgaaaacccttaaaatatggatttatatggactaaaaacattcaccaaaccaaaaaattttaacgcagaaatgctatttttgagcccctttcctaataaatagcatatgcgcagaaaaaatatgttatccatataattacaaccctatttataacaatgaaaaaaaagtatgcatactaaagaaatccttttgtaatttttacacctacaaattagttgatagctttatttttaaatttttctttatttttctattgtaaattttttgaatatatttaaaatattacttatatttattttgttataagttaatgctgtctcctatttttggcatagcctggtttgttcaaatatctcaatttgatcgtccaaagtaacaaggattttttgtgttttatcagttggtgccgtgcggtttcttgtttaattgcggtgccggccaatgatatggcggatttgttatcgatgttcgaccaatgcatttaaattatcaataaaacagaattttattttataaacaataaattggtatgattagttttatattttttgttgaatttcttacaaaattttttaactagcctattatatatgcctaatttatcatttttgcctcatttcaatcgaatgtcatcacttaaaatccaactccacaaaattagtagcattttgagataattaaacatggcgaaaatatggcctaaagtcattgttaatgttatttcaagataaaattgataaaaaataatctatttatgaaacaaaaagatttatttgagttatttcattgtttttgtgttttaatgaaaaaaatttaaaagattaatataatagtttcttttttttataaattttaatttttagcatttgtttatattaataattttttatatttcaatttatgtgtgtgcgtgtttttattttttagttatgtttaattttttattttggttttataatttagtatttttatttgagtttggatcataatggaattggttattatacattaattattaatcggcattaaaattaaatgttatctat

SEQ ID NO: 14037 - DNA, 877 bp, Heterodera glycines
ttgatcaatgaaggacaattgatcaaattaaatgagggacaaatgatcaatgagggacttgattaaaaagggccaattgatcaaattaaaacgagggacaaatgatcaatgagggaaaattgatcaaattaaaacgagggacaaatgatcaatgagggacaattgatcaaattaaaatgggggaaattgatcaatgaggggcaactgatcaaattaaaacgagggacatttgatcaatgagggacaattgatcaaattaaaaatgggggaaattgatcaatgaggggcaattgatcaaattagaatgggggaaattgatcaatgaggagaattgatcaaattacaacgagggacaaatgatcaatgagggacaattgatcaaattaaaatgggggaaattgatcaatgggggacaattgatcaaattaaaacgagggacatttgatcaatgagggacaattgatcaaattacaacgagggacaaatgatcaatgagggacaattgatcaaattaaaaatgggggaaattgatcaatgaggggcaattgatcaaattagaatgggggaaattgatcaatgaggagaattgatcaaattacaacgagggacaaatgatcaatgagggacaattgatcaaattaaaatgggggaaattgatcaatgggggacaattgatcaaattaaaatgggggaaattgatcaatgagggacaattgatcaaatataaatgggacaattgatcaaaagaaaatgggggaaggcattgatcagaggattgggagggatgagtgattaataaatagaaagagatacgactgatcaatgaattgcgcacaatttaaaaaaaatgacggaaagcactgatcaaaggaatgcc

SEQ ID NO: 14038 - DNA, 1033 bp, Heterodera glycines
aagcgatggaacgggagaagcgatgtgagatgggacgggggggggaacgaagcgattgggagaatgcccacgggggtgagaaaaggcgaagagatgggcatctctttgtcactgtacagttagtgctgcgctgccgtgcacgtgaattgcattttcactgcccctctccctttttcgatttaaatattttaagtgtttttatttttgtttgtttttaaataattatttttaaattaaatttcttttctttctttttttttcttttttttttttatatattattgttatttttattattttctctcgattaattgagcccctcagggcaatcagaattcgaattaaaattgaacagattttgatttttagtgagaagaataacatttttcttttttttttttagaccccgtggggttcattaaattttctcatttttaggagacgtaatttaaatgactaaaaatgtgtgctcaatgcacgtatttgcatttctaatccccctctccatctcttcaattaaatttatttgttttgatttcaatatttttcaatttaatgtcattatttatttatattatctttttaattaattgatcccctcagggttaatgactttccgactaaaatcgagaagatttgatttgcggtgagaagagtaggacacattttttcagaccccgcggggttcattaaattttcctttatttttaaggcgctttaaaatgtctaattaatgcatccgtaactttatttttgtctttactttaccggaattaattaaatctccccttttaaggtgttgagaaaatgactaatttatgtgtttattattcacagttctctctccccctcttttttaagggtcctttttgactcactcagataaatttctggaccacgtgtgggatgacttttttttgagtgtaaatttccgaaatcatttgcatggaattttgatttttttttttttttaacttagacttttctgaaaccatgcatggaatttttgatttttttttttgactgctgctgc

SEQ ID NO: 14039 - DNA, 1174 bp, Heterodera glycines
ccccttttttttaaggggtcctttgtggctcccttcagataaatttccgggaccaggtgggggatgacttttttttgagtgtaaatttccggaaatcatttgcatggaattttgatttttttttttttttaagttagactcttctgaaaccatgcatggaatttttgatttttttttttgactgctgctgcagataattcaaaccatgattgagtatatttttcattttgtctgtaaatcattatcgaaccacgcgtgggataattttggatttttttttttgattcccagggggttgctggggcctgatcaggactctaaaattgattagcgacttgcgcaacacagacaacccctgaaaagtcggtctgccactctgatccccctcttcccatggcccaagccctgtaagcatagggttggaaccatccggtgctaccagtaaagccgtgatgtcccatacccagtgcttatgagggaaatagtccagaggagccctcttacgcgtccgtaattaggccccgcagggcttggaagggaagggatgttgatgggtgcctgggggtacctcccaggcggggatcgattagccattccactgaatgactcccgactgaactccgattgtcccttttgctggttatccattgccttttaagcgccccctcgggatgggaggagccctatcggagagataaaatgtggggagggggaagggtaaaggccatttccggtcccggccttacaacagtatcttccttcagttgagattgatcaaatcgaattcgaatttggtggtcccaaagttcgcctcaatttcgtcaccaacaccccacatcgaaacaaatgggtacaaagaaacgggtgaaggcggaaaagcgcagtccaacacggaatctgtgaaaaatatacaatgaaaaaacatgaggatatttgtttaaaaaatactatttaaaatgtttttaaagaaaaactcgttttgataataaaattataaaaaagtgagtcatttttattttaccgacccaaaagcactccatttttggtgaaaaaggcccgccgatttgcaaaatgaatgccaattccgaccacataactgacaccgtattcacatctattttgatcatttgtgaaattggggcaatccatgtaacaattggcatgaccatcagct

SEQ ID NO: 14040 - DNA, 3523 bp, Heterodera glycines
gagaagaagcaacagacgagagacttacaccctccctttttgaggccacataatatggaactagaaaattttatgaaccttcaattgaaataattaatataaactacaaaaaatataatttggaaagatcggtgcacaaatgtcggggcgcaaaaatccgaaaagggcccttagtaaatgggacgcaaatgtttggatacgataattataaattcaaatacaccaattacaacaaaaatattttttttattctaaccttttccagccaatgcaaagaaattcccgtgttccattgcacttccggacaattgaacccgctgacgtgggaaaggtgacaatatcgtacataaaacctttgatcattaaattcgatgccataaattttaactgaaatttaatcttttaaaaccatgaaagattatttctattggtctactgtttttccatttctgctgttgtcattttcagcttaagcctttcctttttcccggggaaagctttacaacgaataaaaaagagcataagatttaaaaaaattattttctcacgacaatttcggaaattgtaaaatggcggagattcaaaatggaagtggagagggggggggggctaatttatgctgtcctgctctgtcatttagccaattggttttttctcatttcagaattgtcgtttactgtgaacagtttttcattgcttttccgttcgacgagtgctaccgtatcccatccacacaatttcatgccaaccataaccttttcttggccaacttttatgctaagcatttgagcgttgcttatgcattggacggcgcttatcggctgttggggaagaaagcaaagtaagcaaaaagagaataataaaaatgaattattatatttttatttatttaaaaaagtaaattttagatttgtgcgaatttactcaaaaatttggcgaatcatggaagttttgcactatttcacttcacgcggatgggttttcgagtcgcaaaatgcgctcaaaatgtgggaacggttaagcgaagaggacaaaaaggtggtagccaaatgctcacaattaagggatgcgccatttccgatagatttggacgaaattccgttctaaaaccattgggataccggcggaattcaatctggatttccgtctaattacggaattaacggcttcctgatgcttttcccctcactcattaaacacatcacttttagctttattgtttcgatgttcgtaaagtcgactgggacaaatatttgtttgactatttgatgggaattaaggtgcctaattttgttttaaataaatttgattaacttttattaaccaatttgggaaaaatgtaaaaaagacaaatgaaacttcacggggcgtggcacggcgtttcgaaaaataaattttgttactatttgaaatgtttcgacacaagaaaattcgagttgggtcaaccaaggtcctatcaatgggcatcggctgaaagttttatacttttaaactcaacgattaattaaattatgtaattggctccaagtccaaattaaaggagaaaattttaaataatttaaacaatttttagatttatttgctccgggaaagtttggacgacgtgccgagggcacaagcaaatcttttatggtcagaaagaaattaaattttgcaaaaaaacttgggctttacaggcaaaaacaattgaatttgtactcaaatggtctcttttttgctttgctcgtccgtctttttgcgtggtaaaaaataattatttttgcttttcatttacttttaaacgataataatttatcacaaattcctattaattaattttttctgagttgtttcttcatttttcattttccttatttttggtgtcatttaataattttaaaatgcttaacccaaagatggtacatatttctgaggattatccccatttgtgtttttttgaggggctcagagtttttttttttgaaaagaggatttcgttacttttagcgttttgactataaaaccagagcaaatttttcatattttttattggtttttttggcaaaaatccttaaaaattagttgtttttttgtcaaaatttgttaagtaatcgaataattattcaattttttccgatagcgcattttggcactgctccataaaattctaattaaataaaaaaatgctcataatcagaaacagaaatttgttcatttttagacatgtttattgacaagtctcacctgaattaattaaaaattttcccggcggcgctgtcaccacagccggcggaaccacccttaagaaataaactttgatgaggattattttgagatacctcttctgtttaataggctcttggtcctgtctaattttaaaaaactacaatatttgaccaaaaccttggaattgtaataatatttcatcataaatccatccgctttaggaggcgatcaaaaagacaacgctgggcattttggctcagcggctttctgctgagctttgcctaccaaaatgccaaccattggttgcgtcctgctgttcggctgcgcaatttggaggagtacaagcggacggcgctgcgcttcttctcggaggacgacgaacagaaaaatgggaacggcggcgagagagtgcggcagcggcggagagcggcagaaaacggcagaaacagtgatgaaaatgaacacaacagtgatcagcagaggagggcacaatcagactgatcaatcgatacccagttactaactgaagcgaatgagagaaagttttgcagaacaaaaaaacaaaataattttttgaatcgcggaaatataaaccagctattaaaatcaagcttcagggatgttgaagattctgtgccattaaatattcggatcaaattaaccattataataaaagactatcttcatatttttcaagtttgccatgaaaaaattgtagaaataaaataaacacaagtatttatttgcacccaaaaattcatttaaaacaaataaagggtgctatgacgaagcacgaaaagtgctgggcgaagcacgaaaaagtgcaagtgatcaaattaaaacaaaataattattgtaaataaatttaatatatattatttcaaacgtaaacaacataatttttcaatataataacaattaacactttataataagacaatcataataaatcataaattattttttaattttataccaacaatatacatatatatgaacataaaagaaaaatatgtgattggaagaaattaaattgtaattcaggaaaattagtgactataacccatatattttctataaaaatattttatccaatattaaatattttaataaaaatgagaaacaaaaagtgtatttttattgaaatttaaaaatattataaaataaacgcattaattaaatagctaatattaaataataataatacattattattatatttgaatttatttacaataattattttgctttaatttgatcacttgcactttttcgtgcttcgcccaaccttgcacttttcgtgcttcgtctcagcacg

SEQ ID NO: 14041 - DNA, 1537 bp, Heterodera glycines
ttccatttgatactgttgttccgacttcggtagaatcgctataaaagcagcgatttggcatttttcgcccttctcatcgactcactctttgtccctaataaacggcaacagataaagcattttgtcataatgttgccaaatcggaccctccacacattggtgctgtcttcgcacctcttttttgaaacggtctctcaacgttttccatcgcgtacgaacaaattccactacaaacggataaaagttaattcgctggctgattatccccatttggctgattatcccctttgcccccccccccaattcctaccactttgctgcatttcttccgccacttctgcccaatgtctattgcgtgcctcggtcgatttgtactcgtcccttgtgaagtcgaacagtgccgggtgtctgctgacctcctccaatgtgtgcccattattcccattctgttctcccccctcccgctcgtcccacctccaccagcgatgaattaaaatttcgcgtgtctttcgcgtcgaatttgccgtgacagtcatttgtcgagtgaaatgtctcttcctcggcattcccccgacgctgcgacggccttttcttttttatttcggtgcgcaacggatgagtgccgaaaagattggaaatcattgcgggaaaggccgagtccaattcgttcgcttcgcttcttctattttcatcgccattctgaaaatgtttattattggatatttcgcgaccaataaaactcctcatcacttccccccccccctccatttgtcccccctttcgactcacttccgctgctccctcctcttcttcctcctcctccctctcttcttcctctttctcttcattgaccactttctcctcttccttctcttccggcgcttcctccatctttggcaccttttcaaacggttcctccccctccattgtcattccgtcatcaatttcttccatcaattttccctttttaacaattttttcgttgataaatcggcgcttcattaatttttgcccaattaaaagtctaaaaaggaaatgaaataaatttgtaaaataagtttctgtttcatgatgattattattgtaagaattggccccacttcgcctccataagttgtggatgggtggggggggtgacgttcagtcggcgttctgctgctgttaccaatggttgagagcacaaccgaagacgacgaggcggtggggcgggaaaatgaaacaaattcgcggctttgccctcgcgttggagaaagcaatgcgcagaataactggggagacttagggttagcgcatcaattatttttttcagaatgtgatcggggtacaaaagatacgggtccaaaaatgggtgtaactccgcttggagatgcgttagaaaagaaagaaaaatatgttcggacagcttttgaagagctgcattgaatgctgcagttgccgctgctgtacgcccacccgttgctgagttagggttgagagcggcatgaaaatagtaaaataggaggaaaatgaaacaaattcgcggctttgccctcgcgtt

SEQ ID NO: 14042 - DNA, 1216 bp, Heterodera glycines
  unsure (1)..(1216): unsure at all n locations
tgcaaaatgtgtcttggttggtattggcacttctctctttctctctcccncactctctcaaccctttttctccatccnccgccctctctctccttgctccgttgcgtttccgcgtccatttccaatttgaactgttccggcacttcgcttcgtcttctctgttccgtttatatgtgcctctgttgccaatgcgcttcttttcgtcaccgttgtgccatttgtggtttcatttgccggcgcttccgcgtttcttttccccaccgtcccgggacctcccggacccgggggcggtgggttaaagttgtaaccaggggcatatacataataggccccgggtgctgtgtattgctaaaaggaattttggaaaatatttgttgtttggaatgcttaattaccgcttcattcagtcgaataagtgcaaaaatggaaagaaatagcataagcaacctaaaaattgcccaaataagcaattaattgatggattaaagaagtcaaccaaccaaccctttgctcaaacgtccgaacattgtcaggttgttgttgtgaagccaaagaatgatggaaaacaattttggtgtccttttataaggccaagtgttgcttaacctcttcatccgtcctttagaaaatgggagggggggacgactttcccttttgtttgtattataactcaacggttgaaaggggaccggtcatccgaacaaaaaacaaaacaaagcgcatccaaagtgatccattcattcactttcatgtttattcagttatttgacatggacagatcagcagcagaagagaatcagcactcattcttcattcactctgtctatccagtcttttttgtttgttaccgggtcaattcgtaattttctcccactttctgcaagtgaatgcccctccctctttttgatcagtcactgtctctttctctccctttgtggtcaggaagagtctctttctccctcattatcttcccctatttgatcattgtctctccctctctcaccctatttgatcagtaatgtttctctctctccatctcttcccctttttgatcactttgtcatcatttgtttcttctgtccctcccttgtctcttctcaaattgctgctgttgttgatccgcttttcccttctgacggaattattcgcttaaccgctgcgtttggcaaatgcgagtaaggaagcgaaaaaaatatggacaacataaaaaaggaca

SEQ ID NO: 14043 - DNA, 1799 bp, Heterodera glycines
ggtaaagccaactcatccatacccaactcatccatatacccaactcatccatacccaactcatccatagcacgatacgagtcgtcgccgtggcatttaatgccacgactaagaccgtacaaccaaaaaatgccacgaccgagaccgcataatcaaaaatgtccacggtcaagaccggcataatcaaaaatgtccacggtcaagaccggcataatcaaaaatgtccacggtcaagaccggcataatcgaaaatgtccacggtcaagaccggcataatcgaaaatatccacggtcaagaccggcataatcgaaaatgtccacggtcaagaccggcataatcgaaaatgtccacggtcaagaccggcataatcaaaaatgtccacggtcaagaccggcataatcaaaaatgtccacggtcaagaccggcataatcgaaaatgtccacggtcaagaccggcataatcgaaaatgtccacggtcaagaccacataagcagaaaatgccatgccacgaccacataagcagaaaatgccatgccacgacgatgactcgcagcgttatggatgagttgggtctatggatgagttgggatggatgaggtcggggggtgaactcgttttttctctctttgtctcaccctctcttttctctccctctctctcttttctctccctctctctccctttttgtctctcttctctctcaactcactttctccaccctgccacacatttggtgcatgtgatgccccaaggctgaccattcttcaacgttaacactgtacacattggagcattttgggtcgaagtccgtttcgcatgcgatacactttgcatagaaaaagcttgaattcgagaagaatgcatttaaagcgtatattaatgctgacttgagtttaaagcattgggtatattaaggaatttgaatgccgtaattagcaattgtcagaatagtttaaactcatttctgctaatttaacacctgtttctctcgtaagtgaatggaatgtgcagcgatttgtcgatgatgcatttcagaaaaaggcgccaataatgctggaattggggagttggcctttggttggcttagtttttccgaccggaatggcatcctttcgccatcggacggcttcgttgtgccgcaaaggttctctcatggcacggcaaagatttgccatttcggaaattccgtagaactgaaggcaaagaccgagtgcatttagtcctccgtttggccatttgcctgcgcttccttttccagcacatcgaacagttcatctccgtcgtcgtccacatgcaaaatgtatccattccgcaagaagttcagcacgtactcgaacctcaacaagtgccctttctcataaatgcggcatcatcctctcctccctccgctcactttgtgccgtctctgtcgataaatatttctgttccttcgttttgttcattttcatccaaaagatgagtcagccttaacaaaagttcgtttctcaatgtcttgagattttctgatttttaaacttgtctttttattattttgaacaaataattacttataaaaagattatgtgacaataaaaaatgaaaaaaatttattagagttcgacatttgaaacaaagtctgggtcttgcacctggatttcccggacaaatttccaggaaaaattcggattgcctaaaaatggactagaaaattgttatttttgttttcgtgttttgtttacgtacaacttcgtttttttccaattttctatttcgttataagtattttagtttcatttaaattatcttttttggttttctt

SEQ ID NO: 14044 - DNA, 582 bp, Heterodera glycines
tcagattttacttttgacatcgttaagacctcagaatccctgtgtgattggggattctgagtcatcttctgtggggggtgggcggtaggttcgaatccggccggtgtaaattatttttctatgactttttacgttattttcaatgtttttaattaatttaaaatattttgttgagttaataaataaaaaattatatttaatttatttttttttgataaataaattttataagtttaaattaattatttttttaattgatagaatttcatgtatttttttaattaaatttgttaaaaaatattttcattttaatttaatgaatttactaatcactgttgtacctcttctcatcacttttgtacctctactaatcactgttgtacctcttccaacacatcttccaacaatttttgtacctcttatgagctcaacaacatttaaatacgggcgcgaagcgcccgtccaagttcaacaaaatttagaaacgggcgcgaagcgcccgtccaaggccaacaaaatttgaaaaacgggcgcgaagcgcccgattgaggccgcgaagcgtactaatatgctaaaaaacgg

SEQ ID NO: 14045 - DNA, 1312 bp, Heterodera glycines
  unsure (1)..(1312): unsure at all n locations
tatttatagtgagactgttttcaactcgcttctattattaaagggtttaaagatgcgcataaaggccttaattaaacacaagaacatattcacatattttgtgtaattctatctcggactccctcctgctcaaaataatgagtttaatgcaaaaaagatttgagtagcggatactgcgaagatattttaaaattttcatctcttaattattttcatttaaaagtagttatactttttctgtctgcagctgtttgactttgaatactgcggagtaaaaataggaattttttcttttcactaattgaggataatttttgtcctttcttgattagctaataattttgaaaattactctccaattaaaatatacttgcttttttcaaaagaggtattcataattttaaaataagcacatatttatagtgagactgttttcaactcgcttctattattaaagggttaaaggatgcgcataaaggccttaattaaacacaagaacatattcacatattttgtgtaattctatctcggactccctcctgctcaaaataatgagtttaatgaaaatagatttgactagcggatactacgaagttattttaaaattttcatctcttaaaattattttcatttaaaagtagttatactttttctgtctgcagctgtttgactttgaatactgcggagtaaaaataggaattttttcttttcactaattgaggacaatttttgtcctttcttgattagctaataattttgaaaattactcaccaattaaaatatacttgcatttttcaaaagaagtattcataattttaaaataagcacatatttatagtgagactgttttcaactcgcttctattattaaagggtttaaagatgcgcataaaggccttaattaaacacaagaacatattacatattttgtgtaattctatctcggactccctcctgctcaaaataatgagtttaatgcaaaaaagatttgactagcggatactacaaagatattttaaaattttcatctcttaattattttcatttaaaagtagttatactttttctgtctgcagctgtttgaccttgaatactgcggagtaaaaataggaattttttcttttcactaatagaggacaatttttggcctttcttgattagctaataattttgaaaattactcaccaattaaaatatacttgcatttttcaaaagaggtattcataattttaaaatagcacatatntatagtgagactgtttttcactcgcttctattattaaaggggtttaagatgcgcataaaggccttaa

SEQ ID NO: 14046 - DNA, 3301 bp, Heterodera glycines
  unsure (1)..(3301): unsure at all n locations
cttgcatgggcctgcannggtcatctttcaaaaaaaaaaaattatatcatttaggtgagggctttcttccgctcacccacggttctaaggctgccaaaagttgcaaaatttccataaacttggtaagtttttaggtttatgacccctcagacatccgacggagatttgatgattaaaattaaaaaaaaaaccggcaccaatttaggcttgtttctgtcaaaggttggtggttttacattttcttggctttgcaacctgttgcgcaacagcttgttgcccatcataaacgtccatcaccaggccgatgtaacggagtgtcataatgcaaaagggcgttgtccaagtgatgtcataggtggtggattcagcatgcccaaaatggggggagagggaatttgtttgtttccatgaaatttggcaaataaaagataagcgaaccaatagccgatgagcagatgaccctgcaataaaagaaagaaaacttgatgatttccttagttaaaaaagcgatttctgattgaaaacttacggcaatcgcctagatcattggtcccgaaaattttttctttaaattttttttctaaaaattcttataacacgtttctaggggtgttttgaggcgctgagcatgaatccggcctccatttcgacctatttgtaacaccggacctgacttcgaacattttaaatttttttataactttaaaaatcatgaaaacatgtttccaggagttttctgggttgctgatcatgaatacgacttctatttccccctaattccgaaccccgatctcaaattccaacaaacattcgaaaattcaagttctttaaaatttcacttttttgttcaaccgttgtttacacacacggaaacgaactgaaagccatcaccgatacgcatcagtgctacaataaaatcgtttaaaccattttagactaaaaatcgaaaaattctaattttcgactctgttcgaattcgggtctggtgttacaaacaggtcaaaatggaggccggattcgtgctcagcgcctcaaaacacccctagaaacgttataagaatttttagaaaaaaaattaaaagaaaaaattttcgggagcaatgatctaggcgattgccaaaacttaccaagaaacaaaaatgcccaagtaaaatagagagttttgtgccgggcaaaaaattgacgatcaaatagacgagaaaagtgctcaacaaacagtggtaaatttgaagccctgaaagagggaaaggaaaatttttaagtttatttttcatgtaaatccctattgcattttcagggtctttgactaataaacatttatacactttgataatttgaaataaaacatggtcagtcgaaaaaacaaattctaaaagattgtcaaggaactccagcgtttccctgcctaacctgcacctggatccaggaaaaacccaggcctggatccatgttcagggagagctctaacaggcacccttcaaaaaggcaacactcattgaatgagctcaaatttcaaaatttgaaataccgaagcccaaggggcagcatattaaacagacaaaaaggaacgaaccgcaattgaacagataaagcagcagtccgatggaagcgaaataggaatgttggatcaccgcgggtttgttgaaaaggaatgtgcggtggacagcggccaagggatagccggccaaaacggacaaaatgagacgcaccgcatcctcacgcacactgatataatcggcaaaggtggcaacaatgccgaacatttattacaaaaataatttatttttatttataattaaaaccctgaattgtattgtaaaaatttatataaaaaaatagataaatagcaacagagagtttctctcaaaagcatttacacaccgagtcaattttgagcccccagttcaaaaactaattgatttgttgtctcagtggtctgtgagtttgccaccaaaaagggagtcccaggttcaatcccacctgagttatatatttaattaagcaatatttcacgtttttctcaacgaataaaaataattaagtcatattattctaaaaattttttaagtaaatttaaaaaacaaaacaaaatttgatcacccaataacatcaatgacagcgtcatcttcattttcaccatccgaatgctccaaaaaattgtcgttttctttttggtcttccagcctctaaaatgtttaaaattcaaataattggcgcaaagtctcatcaattacctaattagttaattaattaactttgatgcttccatttacttctaatctattagtaattaactttaaatcgttttaaataatgaccttttatttgtgcacttttgggtcaaaatttatgaaagtttagaaattaaattaacaaatgttttcttttgtaaaaatcacccatcgtttttattccaccgaaccgttggtaaaaaaactaacggtgattggctcgggtttgatgggcgcgggcattgcccaagtcagtgcccaggcaaacgtaaaagttgtgctggtcgaccaaagtcagtcaatcgttgagaaggccaaaagtggcattgaaaacagcatcaaacgggtggcgaagaaacaattcgaagacccgggggtgagtgacccaccaattccatcgaatttcggataaatgttaaattattgctttttttagaaacagaatgaactcgtcacccgcgctctttccaatatttccctgtcgacgaatatttcgcaggccgtgtcgggcgccgatttggtcattgaggcaatttctgagaatttggacgtaaaacggaaactgttcgcagaagtggagtcggctttgccacagtgacttacaattggataattcaacatttattttcggatggcatttgtccctttagaaatgggaaaatggccacaaacacttcttctctgacattggccgacattgcggccaatttgaagcgcaaagattcctttggggggctgcactttttcaaccccgtcccaattatgaaacttctcgaggcaattaataaagaatagtaacccatgctttttaaaaaacaattaggttgtccgctttgatggcaccggcgaagagacgttcaacgttctgatggactttggcaaaaccgttggcgaaacgaccgtcgtttgcaagttaattgtttcgactccgtttttttctttaattggcggagattttaggacaccccggggttcatagttaaccgtttgctggttccttttatgctggaagcaatgcgaatgttcgacagcggcgatgcgaccaaagaagacattgacgtagctacgaa

SEQ ID NO: 14047 - DNA, 2408 bp, Heterodera glycines
  unsure (1)..(2408): unsure at all n locations
aatagaaacttcttaaattaagattttncgggaatttccctttcggtgcccgtctcttggtttgggacagtttccgttgccacatcagcgaggacacaaagaagacgcttcgtcgcttggcccttcactccgcggttatatcccaggtggcaccaccaaatacattcaggtcaaccccaaaattttgcttattgatacagacatttttaggcgccagatgtctgttggaacgcgcccttcaaagaagcgattcggaagctgtacaacgattggatggcccatggcgaaaaggcgacgacatcaggcggaaatctgaaggccccgccaatggaggtttacctggaatggattgccaatgcatgggactcgcttccaaagcaaatgattgccgactcttttttgacgtgtgggattagtaaggaagaaaaaggccgacacgacgacaaaattcacgtttttaaggtcctcaagaatgttaacattttttgaaattcttatttttaaccggacggagcaattcctaatgggctcgctatgttgaagcaacgccgacaggaagaagaagtactgaaactggtggaagaaatcgatttaagcgaagacgaaagcgacgaagaaattgatgcagaagtttcctaatattttttttgttaatgttttattaaaacaaattgttcaatagtttttgcacgtttctgacttcaaaagttttgaaaaaaaaattttttttgacgggggcttatattcgaaggggggcttctactcgagggggggcttctattgttcaaccccccaccaaagggggcttatattcgagggggggcttccattcgagggggggcgtataatcgaggaaatacggtaattatttttttcaaatgactaatattatagaaatgcgccacagagattgaactgagcaatccgctgactggatcatctacaacggcatgcttgtgctccgaagcgaaatcaaaggaaggaggatgaacgaagagaatttgagcgggccttttcctcacattgactctctgctgacacgccatcaaaaaactaattcatgacagcaatgttctgaggtttgagggtagccaaaatttccaaaaaatatattctcaaaacagaaaatcccctaaacctcaccgccaattttcccatgtcaataaaattaattatattgctcatccacctgcgatacccatgacatcatttacctcacatgacgatatttcttttacattttcaccatttatttattctagggaaaaggccgtaaataccaaatccaaaattaccccaaaagtcagatctcccacaaaatctgtacaaatttcaaatgttaaatttcaaaaaaacacacaaaattttaaaggctgtttaacaaatgcccagtctattttaaacaaaactgaccttcttttagcctttctcaacactgaaaaagtcaacttcctcataattaccgaatcctggcttaagaaccaaaatttaataattttaaactcaattttacctgacaattatcaaattttttctgccataagggccgaaaaaaaaggtggaggcgtttcaattataactgaaaaaaaatatcccatttactcctcaacaacggattccaaattcgattgtgaaattgtcgtattacgttttaaaaatttaaaaaacttttcactaattggggcctacagacccccagatattaatttatcgaacacaaaaaatcttttttcttatttggaccaaaaaatcaatggaccgaccttaattttaggggatttcaatttgaatagcaaatgtataaaatgggaaggtaaacaaaccccactttcaaaaattggacaacattttgtaaattttttcgcaaaaaattctctaagtatgcattgtaccgggcccacccgaggaaatgaaatcttggatctttgcttgacaaatgattctaggctggtaacagatgttgaaattaaagacagtctaataaattcagaccatgaatctcttttcataaatctctctatctttctacagaaaaccaaccacactgtaataagttacagaaaatttggcccaaaaaatatccatcaaataaattccttcctaagctttcatctaaatgactcattgcaaactgaatttgacttggatcataaatataataggttcactaaagaatccattgatgcaatggacttattttaccaaaataaccttcaaaaaagaatcaaaaaatgtcaaatatcccatttcactccaagcttctataaaggaaaaggcaaaaatctggaaaaagcttaaagaaaacccgaacaaatacaagcctttatataattaaattagcctacacataaaaattcagaatagaaaatttcaggagcgcgaagaaaaaaaatttcttacaaaaatcc

SEQ ID NO: 14048 - DNA, 440 bp, Heterodera glycines
cagttgtaatcagttgtccgagttttggtcccgttcccgctctacatactctagtttacagaataccgggcccgcttgactttttagcacctggaacctgttcacaaggaacatttcgaactggaagtgttcaaatcactttaaaccaattttatcgtgtagagcatggtcgatttagtattgtaaattttcggcgcttttttatctaagtcgccaaatgagatcagaaaaaattgggcaagtttcggcgataaaagtggttaatttttcaaaaattcataaaaaaatttaaaactgttgttctagatgcaattttttttaaactgatcagcaataaattctctcaattttttttaaactgatcagcaataaattctctatctttttcatcatttttagtcaaagatgcgaataaataaaaaaatgttaaaaaaatttaa

SEQ ID NO: 14049 - DNA, 1979 bp, Heterodera glycines
aaagggtttcatttttcataaaattcatttgaataaggtttgttttgtggtaacagaacaaaattccgccgtcaaaatcactcggctagaaatcttcaaacagtatcttttcagagaaaaattttaaaaaatttttatagaaaaatttaaagaaaataaaaattttaggaaagttttcagcgatttttttagaatttaatgttaaataaattactgttttgaaaattttaaaaataatttgtgttctattgaaatttctagctgcgttacatttgtctcggcgtgattttggggtgcaccccatttgtcgtgcttggcttaccattttgaaaaacattaattggtttagacggtttgtttggcaaagaccgatctactgatgaccaccaaagagcgacttttcggcactatccaatcgcttctcgcaggtcaaatcgctgaagaattgtggaatgatgaagaccaggtctcaacggcctgtgtgcgtgacttgcaacaagcggaaaaggtgaaatttgtcatgtttgcgattattcagtatggtgctgaattcagttggcctattttgcggcagcaaagtgcggattcgataaacagttggggctgatcactgtaaaaaataatttgtttttcttgatttaattaaaatgactcagatccccgaaagaagagagcctggcccggagctcaaaaacaaaatcgatgccgcggtgcagagaattctcaatcattgcaaaaccgaagcgcatacgctgttgttgaacattgaagtaaattgatggatttattataatattaaaatttttgtgtattttaaaggcagattggcaaggattggtccgagaactgtatgagaaggagcatctggaagttcagcaagttttggattttctcagcacaagccgaaattaacttaattgatttgaaataattttgttgaatttaatcgaaaaatgactaccgtttcaactaataaaaatggagtggcgcaaaaatattggaattaaaatttaaatgatagacatcaaagtggaaattcattagcagaatcaatttgcacagttcaatttccattcattaacattaaattaaaagaaattcgcttactgaacgtcccctgcaacgtcatttcaagtcccgttgcagaatggaccaacgatgtctcagaaagggcctccatctcggcaaaacggcactgtgactcacgggcaatggttctggcaacatgagatttgccggttcccgccactccgaacaagaacaatgctttaggcaattggcagccctcgtaatgtcccggatttcggagaaaatcgacttgttttttcacttctttgagcacgtctggcaactgaaaaatcgcacacaaataggcgataaatgatggaaaaatcaaccaaattggagtcaattcaaaaacaatttataaatcgatttttggaaaaattttgaaaaagcttagagttgatataaaatttgaaaaatcgctattttcaaaaaattcacctagaaaccggtagtattattttctaaaaagaaattttgtaaaaaaaagtttgaaaaatatgcaaatttttctttcgatttttcaaatttttgtgacgaattattgtttacaaaaaatttacaaactatttttttgagttttcaggtaaaaaatttatatgattattttcaaacatttcttgaaattaatgaaatgcgcggagggtgaggtggcaccgatggggaggggggaaacaaagtatacttgtacaaggggtctcagcccaagggccatacgacggacgattgtgacagggggggggggtgtctcgggaccgattttccatacgaaggtccaaatttttctccggcgtcgaccctttttttttgctattcaaagtacctttttttgcggcgcgttttttccaaaaaacttttgggaagggggtgccgggcggtccagcggtgccgataggcgccgccgggaaattttt

SEQ ID NO: 14050 - DNA, 1802 bp, Heterodera glycines
aaaattataaaaatccaattaaataatttaatatatccaaattaaaatctccattttaaatatatacctataaaaacatttgctatcattgtactacagaattggaaagaaccaattttaatttcagcaataaatcaacaaagtgcattcacacaaaaaattagaaaaagtattcaatgatattcttagtttaaaaattaaaatttaaaattaaattcgtcgtccattggcatcacctaccccacaaaccaaaatcctgggaccgtccctggtgcaggccagtaaaacgcattagaactatttccggttctcaacaaatttaagacggtaaattagggaattggaaaaatcaaaatggaattatgaataaatgctaataatcttttgaccattaacgtttttgttgctattcaatcaaatcaaatttgtttacttctgtcaatgcgttcgtccagcgcgcgaagcgaacgttcaactgtaagttttttaaataagtcaattatgcaaaaaatcaagtttcccgcccattgcggagaagtcctgtcgtttgaccaattccatttgagccaacttttgagggccataacttatttcaaaagcgactaatttacaaaatgatagtaacaaaaaattctattgaaaaatcaaatcgactaaaccaatggaaaaaactgaaatggaaaatgcacataaatactttttttaagggttttaaaaataaactgtttaaagggttttcggttgttaaaaatacagtgagtgaaaaccaattttttaaaattaatttttggtgctgtgttaattttatcatttcaacttttttagagcccgggtttcgaccaataagtccaaaaatagaaattgacaatattatccaactttcttttttatgctaattgtaaaaaataggcctttttgaaaattttggccagaaaatctgcctcaaatggaatatagaagagggaatttttctatgcttaccgcttcggatttccccctccttgttgtccatacgagcagaaagtgcaggaactgtaaaaagttacaaattaaattagaactgtttgccctttctcgcatttataaattcctgagaccctaagctttcgcttgataccaagaattttcatttttaattaccaactttgaaagttagttttgaaaatgttggccagaaaaatttgtctcagatggaactgatccctaccgcatgctggcggtcttttttttgagtggggggatgggaatctgtcaagactttgcattccccttaatgcccaaaaccattaccgttttgaatttgctgatgttcaagaatgtccatccgagcatgaagtgcagcaactgaaataagaaactgatgatgctcattgatatccaaaattgtactagagcaccaaagttcaatagtttttcacaatttctctcgaactatataaaattaaaggggggggggggtcactaatctgtatttcggaaatttttcactattttcttatcccattcattaaaatttctgagtgatgcctattggcaaagcctggcccaagctctaacgaacttaaaaatgtctctttatgaatagcaacaaactggtttcaaaattcaagttttaaaaatgccaaccggatccaatgggaaattatttaaaaaatttattgtcaaaaaactttactttgctggttgtcgttgttgcccgccccacgctctcgctgctgttcacctccaacgccctgctctgcacccaactgcaaacaataaatgcacgacaatatttattttcgcaccctctcaaaaaccga

SEQ ID NO: 14051 - DNA, 2798 bp, Heterodera glycines
cttttgctcttaacggtgtcaattctgttctttaatccttgcttttcctcctgtattgtgccaattcgcttgttcaattcgtcaattctgtgtaaatttccgcttttcctttgctttgtcccttccctctcaaaacctatttttataatccgtctccatgctaattgcgtaatcatcggcttcttcgtgcgcctttcttttcccttctgaaatggctttttccaactctctaaagtgttatcattataattaattgcttaattattcttttttgcactgtttgagtcgtcgaatttcattttccaaattgttttgtgccgtttccgcaattgccttttcattttgcatgcttttcagcttttcttccgtccgttttctgcttctttccgcttcttccaattgtctcagcctaattaattattaactaattaattaattagtgtcttttccctcctcgctttcctcttacatttctccgttctctcgccttgccccgtttaattccttctccacgcgtcgtcgtgtctcctcattttggcttagcttagtgccgagttcctcaatttggcgtccgtttcctttaagccgttgttccaactgctggatttcgttgtcgcggttccgcaacgcgttgcgcacattccgcaccgtttccgccgggctcagcaccagcgcatttccggcgggcgacagggaacgcgaacgcgtctcgccctcgtgggtgccgtgggtgctcatttcgttcacttttcgaatggctttctgtgggcattttaattggtttccgtccgtttcactttcccattttcacttggcattccgctagcttttcctgcgttttgcgcagttccttctcgacttcggcgacgcgtctcgcgttttcgtctccgtccgtctccaattgaatgttccgttcggttgcttcttcataccttttgatcaccattgtgattttcccaccgatcgctcttttctcactttttgatcagttcccggtacaattccggctcaaccgttgccgtcgtctcccctctgagtttgttcagcaattccaaatccggccccaatttccccgcggcttcagcgcctcccctttctttgatccgtcggatgagttcgattaggacattgtccgtattaacaattgttcctcctcctgtcatttggcttttcctttttctgatcacttttgtccgctttaccttcgcttccgtctcccattgttctcacatttcgcattattctgctgaattcgtgcctttgttcgctcaattcgcgttccgtttggtctctcaaatcggcgaattgccttcggaccctttgcaattcgttccaaaggtccgtcacttttttctgttcttcgttcaaatattgcgttaaattcttaataattatttcgttttttattttgcttttcccttttcctcaactgtttctctgtttcgaaattggttgtccttttcttgcatttcttgctcaaattgtcgctgcaaatgcaccaaatccgctttcagtcggtcgctttgcgtccgttcgctttccaattggacgcgtaactcatcataactgacaaaagcaaaaagcaatccaaatcagcagttatactctcccacaccgtactacgcctttctcctttttaagttgtaggagtaatacggtatttttcactctttcccctgtctctctcaattctttttctctctctgccctcgtcgttgttttaccgttggcgttcctcgtccaatcgcatcagaatggcatcataattgtaattggcatcccgcccgtaacgtgcgctccaatccgtcgtcgtcatgtccccagcccccgcggggaatagcgagtcgcccaacgggaacagcgacgagtcggcggtcgtcgcactcgtgccgcgttgtaagtcggcaatgtgccgtcggtactcgagcagctgtcaaaggcaaaagcatcgtacaatgccagtggcaccgtccgtcactttgttttgcattgtggcaatgatttccgagtattccctttggtgctccgcgttcgtgtcgatgcgctgtctgtacttgcccaagtcctcttgcgttcggcccagtcgcgcccgtccggccaagctcgactcaaagtcgctgatcagctcgtcgctgaatttgcttcgggattttgtccctggcgttctgttctttctctccctttgcttactctataaaatattcgtgcggtttctcttccgacggcgttttccgatgttcttcttccattttgtgccgttcttctgctgcatttgccaatttatccatgtttttctctctgtttttgctttacccaactttcgcacctcttccgcttctttttccctcctttccgatctgtcccccttcaaatattcttcagtttcttctgcgctaagcgctttgatcagtgagtcgtcgccgaggggcacccaaaagccgtgccttagcggacgacttctgctccgcttttccccacgcttctgcccgcgatagaattgcaaatccgacgacgcactgctcgtcctccgctgcggcaatcggttgtgccgagcgaattcggcacttgggctcgaagcggaagaaaggagggcaaacgtaaaatggataggcttttcagagtcagcggagaaggaaaaggggcaaagttcgccttgggctttttgttgggagggaacggacggaaggaaaggaaggggtgggcttttcgattttgggctgcttttacagcaaacgattcgatgcttcggatcggtggcgaaccctccaaaagcatcaaaagcaaaagcaaaaggcata

SEQ ID NO: 14052 - DNA, 1464 bp, Heterodera glycines
tttgatctaatatctttaaaaatgaattccaattataaactattatgcaattttataagatcgaaggaatttttatgattttttatattaattttctatcattgttattttgtttctttaaatagcagttaaaacaattttgtacataatttgaggtactcaattacgctttacccttttgagcttaccatttctttctaattgattattaagtgaaattttatttatttattaaataattgataatacttctaattcagacaattatcaataatttttcttttatttttataaagttatgtacataaattaataaatttcgccttataaacttatttttcttcacataaatattttggtgcaaaattattatttcaattttggcgcatatatttaattatttataaataagaaagtttctctcattcgactttattaattggaatatgaaattatataaaataatttttctttttattgcttaaatttgtaacgaaattatataattattgtttcatgctttagtgctttttataaacaatggatttaattttatcaattaattatttggattaaaatatttttttatttttagttttttttttaatttgcatttattcttacatcacagtattaattttcttgtttattaaattcatattaatgtttttttatttgaatagctgcaatgcagaattttttcaaaaatattatcaaatgtataattattagggctgccaaaagtatgcaaatgcatatttttttcctggcttctccatgctctaaatagtacgaaaaacactttcttttttgtgtttgcgtataaaaatcgggacttttatttgcatatttttgcatattttgggcctttatgcatattttgcatattttggcttgttttacattttcatgcatattttgccattttttgtgcatattttccgattttttgcatattttgccattttttgtaaatattttccgattttttgcatattttgccattttttgtaaaatattttccgttttgaatatcccttaagtaaattttggcagacaataggatgagcttaagggaaggaagggaaggaagggaaggtgttgttgcattgtgttgtgttgtgcttttgcgcttcaattgagttagtgaagtgcttcaattatttagcctaatatattggcctcctcctttatccaattaataatcactttgtcctccgattttgttttaatttccctttaattgcctcttttgttcctttgcttttgctcatttgtttttttttgtttttttttaaattaatcccttaaaactttggacaatgaaaaagcatttcattacaaatattaagccaaaaatatcaatgaaacataataaatggtgaagaaaatgggagatcagcagagaaatcagggctcctaatggactcctaactttttttgccgtaaatttccaagataaat

SEQ ID NO: 14053 - DNA, 2186 bp, Heterodera glycines
tcagaaaatgtctaaaaagagtgcttttttacaaggccgaataatgtaaaatgaaaaaaaaagaaaaacctggctttatgtcgcgatggatgaaatccttgctgtgaatgtattggatcctggccaactaaaaaaaacattttattgtcattaagaaagaaaatgcatttgtagtattgtactactactgcttggccaggtgacaatttttcatgaaaaaatttgttaaaattaaaattctttaatactatgttgcctaaaatataaaccccattttgtgggttgaaaaatagaaacaccagggcttatattttataattacggtatgtggaataatcctcaacaatttccgttccaaaaaatacgtaatttattgctagtaaaatcaaaaaactgaacgcagaaattttaaaatgtcatgtgtctaacatttttgaaattcatttacgtatttagtaaatgttgaaaaaaatatatgtaccatttggtcggcgagcaacagcactgttttcagtgtgaatttccgtgagcaaaaattgaacagatcctcgagcgaagggccaagcagttccatcaccatcacattgtattcaccctcaaaaccacaccaccggacctaaaacaattagaaattatgaaaaaaaaataaaataaatattgcaaatttgccggttattcccatttatttttgctgaatttttggtgtttgactattttttaatagaaaatattgtctgcatcctaaattacacccaataaatataaccaaaaaattttttggttggttttctgaaaaatttttgtcatcattttcttcgtgaaagttagatcactaattgttttggcttattttctttggataacctgtggaatgccgactccgccggacatcattttgtacagtttggcctcaatgtgaagctgtggatgtttggttttgacgcactccaattttattgccacttcctcgtgtgtcataatgttctcgccttaaaaatgaataattaaaaccaaccaaatcattgtttattatattagatttttaatcagtatttatataattaaatacatgccgaaaacaaaaaaactgaggtgggaaatgaaatcccggcgaaaatttgaaaaattttcaaaaaagcacaccattttccttaaaattttttggttttttatttcggggaacctcttggttacaggcctgttgatcattgggtattattattaatttaaaaattaaccacctaaataaatatctccgaaggaaccgctgccaattttacgcccaaggcggtaacgacctccgacccgcaattccatttactggcaagggcaacaaaagcgtgttgaagataattaggtatatacaattatatatatgtatatatgctatagaatggcctagattataattgtaggtatctctggcctctaaatacacgaggaaattaaaatttgaattaaacaaacaaaatttcagaaatttaaaaatgtgtaatattgcgggggagaaaatagggacgaagtggacagtttcattcccgaataaatgacgaatgaatacatagaattattgtgatcacgagaacttggattgatggaacggaggggacattttggttctacgtaaaaaagtgattagcgtttatttggtaattgatagggaagagcgaaaagtgttactgtcaaataattaaataaagaggaagaatggagaatacatatataattccgaggtcccaaaatttctcggaaatctctgatccaatgcccaaaacttgttgggaatcgaaattccgcgccacccctgttgagtgccacaatttgccaaaaactaaattttatttttagaaaaaaaaaattcaaacataaaacgaagacaaatttgctgccaaatgcatctcttttttacatagcaatttctttttaaaacggttaattttatatgtagttaaaaaaatgtttcatctatgaaaaaaaaaattcgccattcaacctcaacctcactcattcccccccccactcttttttctccccttttttcaaagtaacattagaggatgagtcagtgggggtgggggtgtagggtgtattatgtgtgtgtttgtgtttatatatgtataagaatccgaatggggagggggtgggggggggggggaggttgactaaaaaagcatcgtacaaaatgg

SEQ ID NO: 14054 - DNA, 1307 bp, Heterodera glycines
aacactaaaattgtctcccaatttaagtgggctctaaaatacacattggaaaattttcggttcatggacggtaaaaaatcgtcaaaaatgttagaaattttgcatacagatagcccactattttcattcatctatccttaaaaccatttttaaatacatgctaaaaattccaataatgtgcattgaaaaggatttaagggcttcaacctttgattagaaatttgatcacggttatgacactctgttttatatttgaatggattggcgctttatttttatgccacgatttattggcgctttttctttaaatgagctaaaatcttagttttttgtacactcatcagcgctttacatatagccgaaaatgtgccgactccctcaaaaaaaaaaaaaaaattcggcaataggaattctaacggcccgaaaaattaaaaaacattttctgagcaaatgtccgctgaagtgttaaagttaaaattaaaatgaaatggaaagagagcacctttccctgcggctacttagtgaacaaaaatgtaaaaaatttaataaaatagagtggaaatgtgcttttccataatatgaatgtgcctattatctgtcttttggtaatggaggtgtccccattaatttgattcttctaaaagattttcttccttttcccgagcgtggaaatggacaccttttagtggttagtcgtcgggaagagatttgacgacgctcatcctcaaaatgcatcaataatcctctccatctctgcccaaacgctctgaccgtctcgcccacattctttagctctccctttttctttgggcaactgggagcttaaatttagtgccttttgtaagctacaaacgaaaatcagctgataatttttgattttcgagttcgaaagaattgtttttgtgtacaaaagaatggcaaaataactaggctaatgcattaattcaattattaaataaaaaataattcgttaaaaataaatttttggaaaaactgggagcaaacgaaacttaattaggtaattaatgaattgtatgcatattaatttaggaaatatttgggataagcaatttaagaatgaattcaattaaccaattctttaagggaatttcttaaaatattgaatttccataaaatgttaattttaccccaatttcatttctctcgcagtgcttccttccccgggggcacattaatcacaacaaccaaaattcaatctccaatatggggagagagaacgtacaaattttgttaatttaaaattattccatccttacaaaaaataaaataatatattcttacataaa

SEQ ID NO: 14055 - DNA, 220 bp, Heterodera glycines
ttaaatgacgcttgtgtaatttgaaaaatgaaaaatggtcaaagaatctttttttaataaaaattggagtttggccgcgtctgttctccgagcggaacccgtcagttgggccccagcggttttttggctataacttttttctttgtcatccaaatcaaacattgtagctataattcaaaatctgtaaatggactctattatcctggaaaattttgaaaaa

SEQ ID NO: 14056 - DNA, 4106 bp, Heterodera glycines
  unsure (1)..(4106): unsure at all n locations
ctataacttttttctttgtctccaatcaaacattgcctccctggggcaaagctgtaaatgtactctattagcctgccttttttgaaaaattatgtaaaagatcaaaaaaattatggccagaacaactcaaaaaaaaacagattttccaacttttatggccataaatttgttcaaaattgacgaatttttttggaaatttgcaggctaatatgtagagcatctgaagggatttcgaatgataccaaaatgtttgatttggatgacaaagaaaaaagttatagtccaaaaacatgctggggcccaactgacgtagaccgtctccgagacaaagacgagtccttcggaattttgcaaaaccttaataatttcgtatgaaaatagttagcaaagcacattttcacgaataattttcaattttaagcgacaattacataaaatttctctgagatttttaagcatccataattcagctttttaaactttaatttcaattaattcaattttattttattttattcatattttaataaaacaaatgccatgaaaagttcttacactttttaccttattcatctgttgctcaattttccactaattcactgattttttgtttccatacaatttaattaacgcattaattgcccattaatactaatggcaatttcattgatcagagacgcggctttacccatgcgattagccaatttgcgcaactcttttgctgatcactcaatttgttttcatgttccattggttttccgctgctgaagcgaaagggatgatttgatctgccgctgtttctgctgggctttttcatccccaattgtttttctcgtctctccgtcattctcgaccactccaaaaagtaattaatgcccaccattaataaattaataattgtgctcttgtttttggctgaaggaattgccaaactttggaatgggtggcactttttgcaggacccacgcgggcattgctcatttgatcacgaagttggcattatcagccgaaactgaaaattggtgccctcaaatgtctttagacacggaaaattcgctgcaaaagagtcggcttccccatgatggccccgtcctgtcaatgctcctcctgtacaaggccgagttcattttcctcggcccatccatctccgtgccatgggtctgaaattggcttttcaacatgcgattcgtcgtcagcacaattttcaacatttgacaccaattccaataatcactttggggatgggtgttcatcaacggcgagttgttcagaagcgaattccgcttctgcttcttctgtcggtggtgagccgacttcatatcgcgaagaggaagcagttcaaggagttgaacacgaagagaactcagcggggcagcagcagcaagcacaaattgagcagcaacagtacttcccggcatttccaattgggccgcaaggacaattcccggcattgccaattgagccgcaaggacaattcgtgccccaggaaattccttctgcgccacagcagcaatcctttgcggttgaaaatgccaacaatggtcccgcggcgccatcctttgtgtgccaaagcaatgaggacgataaaggtggacgagaaaacaatatgatcaattcaataccacagcatatgctattccaaaaagaagtgttgtttgttcagctccctattgttgcaacggcgagttgaagcgggtgatgagggaagcatacgcaagtgccggggtgaactgtccgaggaaggaccaccccgaggcgagctgcttccactgctgcaacatccaaagattggcgaacatcatccaggtggtgaaggctaatcaattccatgataagcatggaaccgaccgataaatttaatgaaataatataaaaaatgggattaatttttatattttttatttgctaaatttaaatcttaaaatatgtgtatatgtaagcattgttgttaagcatcactgcgagtgtcggtttggcgtcactttcgaagtcgtcgtcggactgcgcgacttttccctgcacagccattactacgagaacttgttgtgcaaaatttctgaaggggaaaggttggtttttggctttaattttaccaatttttatcaatttccattcgcattttctcagccaaatcgccgcttttgccagtgcccagggcgtttgtctgccggacggaaggccggcaaattcaaataacggcacaattccgccaatgtgcggccaaggggcaacgagcaacggcgaaatgtacgaggaaaagcaccagcaactgagagacggggacaaatgcgcgggggcggaggaaaagcggacagtgcccgaggcggaggaggactatcagctgacggaggggacggggagaagcgaaacgaatgccgacgagcaatgaatgccgaaaggggaaggcgcgtccaatttatggccaaatgttggcactcgcatttgcttttttctcacattttgcccagaattttttgcttataattttctaattagcatattaggcactttcagctgatcaatccctccccgccactccctaacattgattgtccttgataatttgatcattttccatcttttccccccattgatcgcttccttttgttgtgttcaaagtgtctcatctccgacgattcattcgttcggcgcatattggaaaagcgccgtctcgcaaaaaaggaggtcatcagccgcccgccaaatcgtctcaactgtcatcatttatttgtccatctttgctccgtcgtcggcggaagggatcgatcggtcgttttcgccaatcccagcaaaaatccatcgccaatttttgatccattatggaagtgtttgttgtttcttctcattcccttttcggttggtcattctcggcttggttcttcaccgattgctcaatcatttacgacccaatttttaattattttgcaattaatttaattggctttaaaattttgtctcaaatttaaatggccattgtaatggtcgatgaacagcagcagcaccaccaccatcaccagcagcagcccgtttcagcggcggcgattggtccaattgaaacgcaacaatccgctgaagtgtccacttcttcctcgacaattcagggtcaattagcgttttcttcccttaattacatgtttaatttgtgaaggcttcgaagtgtccttattttacatgatttccccaaaactttctcaattttcattcgacccattgcatctttttgcttaattacttataataattggcaaatgcctttagccgccccattggaagcgaaggatgagccgcccgcgccttaccaattcgaccccaacgacgagttttatttggcaccgccaacttgtcaatttctgcactatcgcgacgcggctgtggtggtcggaatcgtcgagattctgctgctaattgggacttttttcacagcaatgagtaaaaacaattaaaaaattaccattaaaattttgtagaaatttctgtgacacaaattggccaattaattcattcgattgttgcaatatgcacagattattatgccggaagtcgccttgtgggcgtgtgggcgccgttgctcgtcgcttctgtgctatgtatcgcaattggcacaaccatctccatggttaggcatcgatcgccaagttcatggccaaatccacgaatttttaaaacaaccaattaaaattaaaattaaaattaaaattttccatcccttggaaataccattaacaaatcgccaattttaaaaattaaattggctaattttaaattcgataagcacagatttacgggattcggcatgagcagccgcaaatgttgtggccacaaatttactttctgaaggtggagatctgcttactaatggtaatgtaaagacccaattaaaaagtcattttcaatcgttcgttgtttaaggcgggcgcagtcttctcaatttcgtgcatgtgcatgggaattgaagcgaccaatttgatcttttcgcattttatcaggtaaactgaaggagcaaaaactaattaattaattaattattttttaattttttcgccattttccgtttctctcatttttatgcattaatccacaaatgactgaatgcttcaanataatta

SEQ ID NO: 14057 - DNA, 647 bp, Heterodera glycines
agaaaagaatgggcgagggggggcaaaagaggggaaaggggtaaaagagggggacgggggttaatcccccgaaccaaccaacgcgatcggagcagggaggaggaggaagagcagcaagaggtggattagggagtgtaagtgctcgcgcgaatgaaccaaaacgagaaaatgggaaaaaggaaaaaaggggggagggaattttggggagtgttaatgacaccaaaacgaaacttacaattactttgaaatcggacaaagaataccaaataaaaatatccgaattttcaagtcgaaatttttcctaagaattaatgaattactcatttttaaattgatttttgcaagttaaactaattttaaagatattttccaattaatctgtccaacagacacaaattaaccatctctctctgttctcagtatttgcatttctttgcctaatccgtccaaatccaatggtcactgaaaaacgcacagccaacgaacccccggggcaaaatcccccccccccccctcccgccccggacgaagcactacctaattagccccgccagccaaattctcggcgaatgggcgaaatatcttctccacaaacattcacctcgaggggtaaatgtataaatggggctgggagggggtggggagag

SEQ ID NO: 14058 - DNA, 1756 bp, Heterodera glycines
ttgacatttgcgcataatttccaagagattggccaattgtgcgggaaaggcttttgttggcattttcgtcttccacacccataaaaaaacgttgtgccaacaaacaaaactatctgttcccccgaaaaggcaattcattggggcaattaaagttaaatttatgtgcgatgaattttcccttttttattagcaaatatatttaactctctaaaatttaaaatcgaaatggaaataaataaataaataatgtagattttctaatcagtcattttccacatcgttcaccaaattgccgcatcgccccgactgtccatcggttgcggtggccatccaaacccaacaattgctggcactgcttgaacttggacattgccttaatgattcatttcgttcccgcatttttctcttaattatgatgccattaaccaaccacaaccatcgctgtgattgctctggtcattttgtgccgttatttttctgcgctttttcggatgctcagacggaatgccagacgagccgtccaatgccaaaagcttggcaattttgccgccttttatctgtcgaatggcgtaccgcgcactgttgaaaatgttattcctgtccttttccaaaacgttcgcgaggacatcgaccggcaatttctcgcaaggatcatacaatgaaaagccttctgaaaaagagacggcgaattgacaaaaagtacataaaacgcacttcccaatattaggccatcggaaacggcattgaaaaacgcaaaaagcgcatcgccggcgcaaagttcgcccgattttttgttgtccgacaaaactttgtccacaaccaattcgatcatctgacgaataatgaaaaaaagaattgtcgaaacaaaatctaagggaattcaaaagccacccaatcggtcagtgtttgccaagccgacactctccgctttatgtcccgcaaaactttgatcagcgaatccattggagcgagtggagcacatttgacctgatggaaaggtaattccaatcattttgaattaagaaaatacttggtaaaattttgtccgcctcatttccgccagtgccctaaggcacggaccgctgggcaaagcattcggtggctcttcataggggtaaaagttcaaatctgaaaatgatgaatataaatctggttggagaattttataaaaagacctccgggcgaccattggcgcattgctgagcaagtcaaagtcacgaaaacattgaccgatacgccaatttgggaaacgaaaatggcagactcggacacttttttcactacataaacgtacggttcaccattttcctaaaaaatgaaaagttatttccatgaattaaccaatccatcggacatttattgtcagctgaaagtgaccgataattttagagagaaggtcaacagttgggacgatggagcagagaaggaccaagtcagcctgaacaattcgaacaaaaataaattataaagacgtaaccaccccaaagttgtggaattctataaattttgtttggaaaggaaagagtccagcgatgtaggaaaaaatgatgcgattcgttaaaagattaggtatgccaaaaatagttgcgatcaacatttatttcaaagaaaaatacgataaatagattttctttctggttctttatagtatgcatctttttgcacatgcgaaaaaaaccagcgatgagcaaaaaaaaggtcgtcaaaaattttggaccccgtcgtaaggaaaatcgcatatgaccacccccccccc

SEQ ID NO: 14059 - DNA, 1438 bp, Heterodera glycines
atctactgaatggggtttttggctgcgctgaacccgaatttgatgccgccgttgttatatgagcccaaataattttttaggaattttattgtacctgtttcgaggtaggctttaaaatgaggcttttgccaaattagctctcgagaatgtagccagacggatgcagggcctagccgttcgtccagttgattttttatagaagtttggggtggtatttttaccaatcagttttttatactgttattgatcgtatccaactgagaatctgctgaatggggtttttggctgcgctgaacccgaatttgatgccgccgttgttataggagcccaaataattttttaggaattttattgtacctgtttcgaggtaggctttaaaatgaggcttttgccaaattagctctcgagaatgtagccagacggaagcagggcctagccgttcgtccagttgattttttatagaagtttggggtggtatttttaccaatcagttttttatactgttattgatcgtatccaactgagaatctgctgaatggggtttttggctgcgctgaacccgaatttgatgccgccgttgttataggagcccaaataattttttaggaattttattgtacctgtttcgaggtaggctttaaaatgaggcttttgccaaattagctctcgagactgtagccagacggaagcagggcccagccgttcgtccagttgactttttacagaagtttggggtggtatttttaccaatcagttttttatcctgtttcgaggtaggctttaaaatgaggcttttgccaaattagctctcgagactgtagccagacggaagcagggcccagccgttcgtccagttgatttttttatagaagtttggggtggtattttcaccaatcagttttttatactgttattgatcgtatccaactgagaatctgctgaatggggtttttggctgcgctgaacccgaatttgatgccgccgttgttataggagcccaaataattttttaggaattttattgtacctgtttcgaggtaggctttaaaatgaggcttttgccaacttagctctcgagactgtagccagacggaagcagggcccagccgttcgtccagttgattttttttatagaagtttggggtggtatttttaccaatcagttttttatactgttattgatcgtatccaactgagaatctgctgaatggggtttttggctgcgctgaacccgaatttgatgccgccgttgttataggagcccaaataattttttaggaattttattgtacctgttgcaaggtaggctttaaaatgaggcttttgccaaattagctctcgagactgtagccagacggaagcagggcccagccgttcgtccagttgattttttgagaggagtttggggtggtattttcacccaatccagttttttata

SEQ ID NO: 14060 - DNA, 1965 bp, Heterodera glycines
ttagttcaatttttagtgacactttaataaatccatggccatcctccgctgctgaatgagtgacagcctcgtcaatttgggttgggtcaggccaaatgccatcggcacaatcactgcttctccccccccccctccccctctcacttgtattgcgtctcccacagatttctgtagcgcgactctccgctcatgtcataagcagtgaaaagcatccccgcagccgaaaaccttaacggatcgaattcccaagttggctttgtttggattcacttctccgtcgaatagccaaccgttgggacaatattcgtcgattgcgtctcgggcggtttcaactaaacccccatttaaatgttcaatcaattaaatttcgactttgcctggttcaaaaaggtcgtttttccgctattgtccaacccgagaaccaacacttcgacctttaaaatgctaaaaaaaagaagggacggcttaaattttgcctgtcgtccggaagcggtgaagaaggaactcaacgtttggaagatgcccattggaagaacagcagaaggaagaggaagaaacaaagagaaaagcggaaggagagaaagaaagaggacgaaaatgaggaagagggaaaaggagggacaaaaggagagggagaggaaaagcatagtcacaggggttgccatggtaatggttttaagcatttttggaaaaagtttaaaacggaattgcagccttaaaaaggggggggggggacaaacgattgagtgattagcgaactgaggcaaatgacttgtgaaagtgaacggcttcatcacttcaactattcactggtcttacaaacaattcaaattcagtttcattgagaatttatttgagtttcaatcattctttcttgcttgatttttcgcgagttttccaatgtttcgttcaaatttactgatcacatttatttattctttaagtgaagtgacaaatctgaaaaacattcgaatccataaaataactgatcaaattgtggtcaatcactcgtcgatcatttgtccatgccttttttgtctgcagcttctctcatttgtcgttgaatctctccttcgctgactcactctttcctctgctgattttgaaagatcaaagttcccccccccgtttatttcccccctttccccgaattttccattcgtcgattgatttgctcatttatttgttcattcattggtttgctatgtcaacaaaacattgttaactttttttctttttcagttcctccgttttcctttttctctccaaatttttccatgcgttttcaaaaagccaaattcgccatttttcgactgaattcccaccaaattttcattcttttacttttgcttatcaaattggcaatgactgatcagcagaattcaattgtcgggggatggacagagcaaaatgtgaacgacgaaaaaatcaaggcaatgaaaaggaaatttggctaactgttcataaatggcaattacaaattcaaatgtccgttcgcttctgctcaattctctcgctttgttcagtctctcgcttctcgctcagtggccaaaataaactccgagtcaaacgatcgcttcagtcttttccccttggaggttctcagtgccaagtcacaagtcgtggcgggcattcagtaccaattgcgcattaaggtcggaaggtcgaactgttcgaagaatgtaagtgaaagggcaaattcagcaacccaagttcagcagttcccttccaataataaatatttttattttttatatttaaaacctaaaatttttctcaaaaagaatgaacggccggcccattaagggaatgggaaaggattatttaatggaataatcaaaaaaggatgattaatcccctcgaagcagtcaaacttggctgaccacgcaaactgtgcaacggaggatggtcagacagcgcgaaaggtgacactgtgcaaatcattactgtaaattagctaatttt

SEQ ID NO: 14061 - DNA, 1275 bp, Heterodera glycines
  unsure (1)..(1275): unsure at all n locations
cggtaaanaatggcgaaattatcacaatgtcctccttcncagctgatctgtcaatcgatggacgaaagattttcttgtcccgcattgatcacttttattgtcttccactgctgatcagtctgttttccatgtccctttccgttgggtacattatgttcaaaaattacaatttcaagacttacacttgataaaaatgaaaaattcatgctaatataatcgtgcttcggatgactaaccaaaaagcatcgattcgctcggtggaaaaatgaaaagaacaattcatttaatattggctaacatttatcattgaattttcaaaattgacaacaacttgttaatatgaaatgcttttgataattaatgaaatgaggcattgtttttggaagcaattaaccaattaaattttgggcgaatgggaggaaatctaaaggaccaattaggaaataatgagggagaacatttaagaatgggcggaccggggacaaagcaaataaagaagaaaaagagaggggcggagaaaaaagcgcaatcgaatctcattatggaaagttaattaataattatgccgaaagaaaaggaagaaaagttttgagaatttaaagtgtcaaaatatcacaacaatagaaaagaaaagggaaaggtcaattaattaattaattatttggaaacgatcaaatggccctgcggcgttatccgaatggccgaagtgagaagaaaagctgaagaaaacagaaaaccatgaaaaagtgccaaaaggcatttaccaacgaaaggaaaagaggcggtgccgaggaatgcccaattataaccgatggactgcaaaaagaattcgctgccaatggccaatgcgatgccactaagagtctgaagggaaaatgccattcccaaactaaaatgccattaccaaattagggtgttttgtgagcccctggaacattgcttattctacatgggtttttgctggaatttatttaaaaaataaatacacgacatcctgccaccataaattttttttttgttttttggtcattttttatcttagctaaatttttggaaattttgcagggactgtaagcgctttaaaaccataccaaacttatttaatttggatgattaataaaaatgttatagcctttggccccaaagtggtcggttcccgctaattgcccttccttttgtgtctttttgtgtgacacttttttgatgtgattgactttgattttgtgtttttttttggttggcctacagtgaaaagatgagacagccgtaatgaca

SEQ ID NO: 14062 - DNA, 2851 bp, Heterodera glycines
  unsure (1)..(2851): unsure at all n locations
ctattttgacggcttttgctccgcccctggccgccagcagatactgactgacacctgcgatggccgaaggaaggaaaaatcatttaataaaattaaatattgtgatcaaatcatttctgttcatttttaataaataaataaagtgatttttcagaaaaatacatcgtttgcctaaatgcctcccaaaataaaccctaaccaaaaacaaatcacatcatttttcaatgtttctggtaccagttcccaatgtgttgatgagaccgggtccgatttggacgatgaaattcctggggatgaagctgtcccccaggaaagggacattgaaattccacctcaaattgtaccggagagagattttggccacgttttggtcaaacaacaacggcgaattaaattgtccgaagaagaggtttattcgtggctgaccgactttttcgtgccacctgcagttttcgactggccttacaaacttcgtgccggcaaaaaaagatatctttccccccacattttgcaacgccatccgcaaatgtgctactcccaacttttgaatgggcttttgtgtcggtcagagacagaatttgagaaattgaaaatttaaattaattaaaccagatgttgcgtgcttttttgcttcaaattcaattggacaaagtgggcaaagcaaagaaaatgtcatgtttgttactgttgcgtacagagattggtcgagattggaaagtcccgcgacgctcgtgaaagatcagaagggtatgaatatgatttaaggcaataataaacgaaaaaataggtataacaaagcacgaagcaacacaatatcattcacaatctgttcaaatggccgcacattttttcgcaagtttttgagagaaagcgtaaaggaattgacgccattgtcaataatttgcaacatgaacaaattgaacgaaatcggtacggcattaaaattaaattaatgatttgaaataatatattttcattaattttaataattattttatagtgaaatattgcggccaatgatcgaaactgttatttatttggcaaaaaccggtcaaccttttcgaggcaataaagattacggtgttttgtcagtgccaaaaacagttggagagattaatgcagaacagggttggaaatataaattaatgtaaaaaaactaaaaaattaaaggcctttttcgtgctagtctgcaataccgatgtttgagtggagatgaaaaattaaaattacatttggagacaggtggtcaaataaaatcttaaaaataaaaattgtgaatttaataaaggccataaaaatgcattgtatgtttcgcccttggtacagaaccaaatgattcgttctgttggaaatgtcatcacaagcaaaatttcccgggagattttgcaatcagatgtgttcagtctgattgcagatgaatctatggacatttccggttatgagcaactttcagtcagttctcgtttcgtcaacaaaacaaatgaaattgaggaagttttcttgggttttgtggaacttgaagaccaaacggcaaaaacaatatccagtgaaattatttctcttgttcggggtaaatacggtaaaaatgggtgacagtaaaattaatttttaagaccgatatgggcttaatttgaaaagaattgttggacaggcctatgacggggctagcgtaatgtccggaggacataatggcgtccaaacaataattaaacgtgaagcagggtacttaagaaaaatgcaattaatttttattaattcccaataaaggccggccgcattatacgttcactgcagtgcacatgttttaaatttaaatatatgtgcatcattaaccgccgaacattaccacaatgtcttcgagatccttggccgcttaagcaacttttaccactgttccgccaaaaggactaaaatccttgagcgatccatcgaggccatctgtttttcaaaaaaacacaggattccaacattgtcagacactcgatggaccgctcgtcacacagtgcttgagtccgtaaaagagttgctcccggcaattatcacttcattatgccaaatacgaaatgacgagccatcaatgagaacagaagctgttcttttattggatcgctttagccaaagcgaattccaatttagcttagtcatggtcgacaaaattatgtcatctttaaagccattaactcttctgtttcaatccaaaaccgttgacattgaaaaggtaaaaatggattttagaaggaactaatttgatactcttccaaaaatatagggccagcgtgctgttcagctttttattgattctttaaatgattggttaagtggctgtggatttgcatcttttgagaattgcaaaaaagatgctttaacagtgcactcaatagtttgtgaatcaaattatgagcgctgaaggagtggacgttttcaaatcaatgaatgtgacttcgatgagtttttggagccctatgaaaattttttggtttcgcttaggtcctcaaaacaaaaaacccctaaaaattttccaatttacagaaatgcctttgaggagatgttttctgacccggctttggaagttttgaaaattcttcaaaacatactcccatggaaaatagggaaagctaattttgcttccgtattgccagctttcaaattttaccatgattcaagaattatggactgttccgaaaatcaaatacagggaaataccaaatttaaaaacataactttttgaaaacttttagtctgagtttgaacagtggaagaatttttgtttttactttaatggagacgacctgaaaaatgttctcgtattattgcgatccttcatactttccaanatatcaaaaaattattg

SEQ ID NO: 14063 - DNA, 1881 bp, Heterodera glycines
  unsure (1)..(1881): unsure at all n locations
ataaaagccccagcaatttgtcagctatgtctcatttgttctgctacaatggtccttgtcatcgaattttgtgcccaaattctcggctgttccccgaaatcactccgcgacaagctcaatcatcccgaggaccgagtgaaggcactgaaggagctggtcggaaaaaaggttcggacgacatacaaggaccggaatggaatgcagaaaacattttttgtcgacggaatatcggacaaaggagcggctttgaccccggcgtatggcagactcagacaaccgtacaacatcaacattgctgcccatttctacgctctccaccgtatcaagctgcatctcccgtacgtgccgtgtgttgtggagaaatattctggatgtggcgaagacagatactatccaatggaactactcgaaattgtggatgacgactacaaccaacaaaagaggcgaggcttggcaaattgtttaccgaaatcgaggacgacttcatttcctgtcaaacgctttggtcgagttgaggaagtagaagaaattgacgacaacgangantggggtggtcgctacgaatgcagtcaaccgtcttacgtttattggtaaacacatgtatgttatcttaattatgcacttttctacataaaaacgacaagttcgtgcacataataaaaattgtatcttccactccttaattatttacaaattgtaacttctttctcttaattctgcatttttctacctaaaaatgacgttcccaaatgcttaataatttacaaattgtatcttccattgcttaattctgcatgcatgttcactccttaattatgcacttttctacctaaaaacgacaagttcgtgcacataataaaattgtatcttccactccttaataatttacaaattgtaacttctttcgcttaattctgcacttttctacctaaaaatgacgttcccaaatgcttaataatttacaaattgtatcttccattacttaattctgcatgtattttaactccttaattatgtacttttctacctaaaaacgacgagttcgtgcacataataaaattgtatcttccactccttaataatttacaaattgtaacttctttcgcttaattctgcacttttctacctaaaaatgacgttcccaaatgcttaataatttacaaattgtgtcttccattgcttaattatgcatgaatttttattaaaaacgcaaataaaatgacaaaattacacaatttgaggtataaaacataaaaaacaaaggtggtacatgcgtgtgtacgtgtgtatggggtgtgtgtgtgtatgtgtgtgtgagagatacaatgaatgataaacgataaatttacaaagtgtgtccaaaattgagaacatcataattaggacccactatccctttgcctacatatgggcgataacatttttggagggggcctgaagtgacgtgtccgccatccctaatgtcgggtctcaaaaagttggggtacatcacatttattggctcatactctccggtttgggcataccgcaacacttcttctttgaatgtgtcgtagcatagggattggttctgcatcacgtcgtagttcagtgtgatgcccctaagcttcagcacaaattcgtcctgcccattacgccggagtttgagtccatactgaaatgataaagtataaattatgaattattaaaaggtgaaaacctgcttcgctccgccactacaatactccacaatttcatgcttggggtattcatcggtgaattgtcccaagtgtggtcctgtctccaaacggttcatgccgatcgggtggacgaaaatcagcgagtcggtgtccgtgtagaggaggccgcatccaagcgttcttatcaccttctgcatcgctt

SEQ ID NO: 14064 - DNA, 3254 bp, Heterodera glycines
aaaataaggtcagattcatgcttagcgcctaggattctccccccgggtcattataaattgcaaaacaaaagggtcccccctctttgttttttgatagaattcaaaaggttactctttgcaaatagcgcccaaatttggctaacaattttttgctctattatataaattttatttggtatttttatcacatttttaaaaaaagatacaaaaataaaagtgattttgggattcgggaccaaaggggagagggagcacatgatttttgagttgagaaatttttttcacaaaaatcttccaaaaacatgtctttaggggttatttgggccgctgatcacgaatacgtgatcagattttacttttgacatcgttaagacctcagaatccctgtgtgattggggattctgaggcatcattttgaggtgggggggcaggttcggatccggacggtgtacattatttttctgcattttttcacttttttcaatgtttattaattttaagatttgttgtaaattattttaaaaaatttttaaattaaaatgcattcgatttttaacctttaataaaaacttttccttatgtttgatttataaattaataaaaaaataattttaaagtaaaggattattttttaatttttaaaacttttttatgtatccaatttttactcttatatttaataaaacaattctcttatttattcatttaaacgatggttgtacctcttttaatcacagttgtacctcttttaattacttttatacctcttttaatcaccgttgtaccttttttaatcacttttgtacgtcttttaatcactgttgtacctcttttaatcacttttgtacctcttttaatcacttttgtacctcttttaaaaaattaatttcattttaaataaaataaatattattaattttcaacgttgtttattattaataatttaaaattaaaatgcattcgattagattttgttcgtttttatcaagtgtctctattttaaattaacaccccatttttgaaaaaaaatcgtaaaacttttttccgtcatcatttcggtttctcactttcagaatcttaatattttcagaattgctacgtacagttaaaaattcagctcgatcggttcatgggaagtggtcaaactcccaaaaaacagggtgtctttattttaaattaacacagtgtattaccgatccgattaataattgagtaaaattttgtgaggcgggaaacgtgaattcggaaaatgcgggaccggaatcccgtgcaggaatcctccgtttttcctattcccgcaagaatcctacaaaaattttgagggaatcccgcgccgggaaacgggaaaattttttctaagaaaatggagtttcaaaaataaaatatttcaatttaaatttttgaaatattatttttcagccaaaataagaaaatttaaaatgaaattatagtaggtacctaatcttggggggcggaagtttgggcaccaggaagtttgggcaccagaaatttgggcaccgggaagtttgggcaccaacttaaagagttaaaaaataaaaatatttttaattgtctatgaattgcaaccatctaatttaaaagcatagaaaatttaatcaagttaggaaatagaaagttctttaacgaatattcattcgattaagcatgcttattttgctaaactcattacaattaattcaatatcaatgccatacatatgtattatttataacttataacattacaaggctcagtatgttcaagacttaaagtttatgagtttaaacaaaattagacgggttcttgttatttcgggcccaactaagccggtattcaggtataagtccaaacagaaactagcacacgtttaattatacgtttaaacaaccgtaagaattgattaaataataagattgccaggttcccatacataaattttttgattttcaagaacatataaattttaagaaaaaagggttgctaaaatttactaaattttaatgatttatataacattttatttatttattttgttttatttttttgaaatcccccctctggtgcccaaacttcccggtgcccaaacttcccagtgcccaaacttcatgtcgccaaaagtgttgcatcaaattttttttttaattgtatttgtcaaaaatgactgcttaaaaaatttcttttgttatacaaaaaactcatttttgtaacagaattaagtgaaagaaactagggtcacgacttttactgacgaaaaatctcaaaatagttaactaaaatagtgacgaaaaagtgctaaaaaagtgacaaaatagtgaaaaaagtccgaaatagtgacaaaaagtgacataattttcagccaaaaataagcaaaaattttttttattccctgattgttgttgcaactaaagtaaatttactttctaataattcttgacaaatattgacatttttaaaccaaaaattttgtcaagaaaaaaaattggttgatgaatttttgagaaaatttttctaaaaatttttaggtcgattcttaggggtgtatttttgaaaaaaaattttaggtcgaatcttagtggtgcatttccgtctttattgcatttttcttgaggatattttccaaaaatgtcgaaatagtgaaaaaatagtgacaaaatgccaaaatagtgaattttcactattttagttacgaagcgacaaaatagtgatttctagtagagtgccacgggaccgggaccgggccgggaattcccggtcatccgaggtcccggttcccgggttttgaaaagctcaggtcccggtcccggtcccggtagggcaaccgggaaccgggaaaaacaagcactggtaagaatggggtctgagtgaaaaattagtgaagaaaattggagtcaaagggaaaaataaaaaataataattaatatattctttaaaagtaacactgcccaagtgtgcaaatggcctaatggctagtctccttgactttcacttcttctttcccctggttcaatccctctacagaaattagattattttcaatttttttttgtatactcgtgggtttcctataaagaaaatatgattcctcatagtttttttaaattgatacatattttatcattttttaaatgaaaatcctaccaattgagcttaataatcgcaaaaaccaaccttttttgttgaaaatctgttaacaaattgcacccaaatttttaaaatttcccccggcggcgcctatcggcaccgccggacccctt

SEQ ID NO: 14065 - DNA, 4279 bp, Heterodera glycines
  unsure (1)..(4279): unsure at all n locations
ttatacaaaaaaaaaaaagatttctttactcgggtcactgttttgccgtgaattttttgagaaaaaatcagcagagcatctgcgcattcaatatttaaatttttttatattcttattgcgtttttatttctttttgcaagtatttcaccaaaatttttaaaatttgccaaatttttagttgaataaaacattaataataaaatattatggaatcttttcttatgacagattttacttgcacattgacgtcacatttctgtaataaatggatcgtgagcgaccaaattttcgttgttaacggacgtcgtaaattaaaaaatttcgaataaaagttcgggaggaatgaagctagtcattctaagctaaaaagagaaaattgtagaattatttaatttccaatttttatgatttggttttttataacttaggagtagtatattttggcactttccatcgcgtgggttcaaatggtcccaaataattatgcgttcatagtttaagattgttggaaaatttaaattttcataaaaacaatgttattcagtttttcacattgaataatttcatggaaagtggttaagcaaaataaaacttaattaataatttatcccatttgaaaaataatataatgatcactttttaaattagaaaagaaaaactaactaaaatgaaaaggaataaatggatcactaatgagtaattgccccggttaagttcatataacgccgaattggcatcaaacttttaatcccccttttgtacttacgtatgtacatatttggtcaattttccaccattaacaattggcacaaatttgccccaatttataaaaacatttccgtgccatttgatgaggtaatcagtgacaactacggacggctgagactgcggcatgacaaatggccgtcagtcggcaaatgcgacacaagcgcaaaaatgacggcgaaacagtggtgacgggggaagccaataaaaattaatcagttttaattattatttaaaaaattgtttaaaaagccgagaaaaatgtatttgatcaagaaaacgatgtgccagttggatgcgtaattagggaaaactaaattggccacttttactaactttcatcatgtaaaacaatttaatcatggtacggcctattgacttttataaaaaacaataagcgataatttgtttctaaagtggttttttaatttctaaataagaaaagtttaaaatagttaaaaaactataaatttattaaatatattacaatccaccaaaagttaccattttccaactgagaatgggatcaattcattcactcgctttagctttacattctcgtccaggaatcgttctcgacaaaattgctgtcgggttctcgaatatctgaattgattataaagaatcatttttaattatttggcacttttttatccatttgaaccgcagaaatttattggcacaccatcgtccccgccttgagcaggtgcccgtcaatggtcacaagccggcgcattactgttccaatttaaaaacatttactcaaatgcgtaattatgtcaaaccaaacgtcctggtttgccattactattacatcaaatcatccctgttttatacacattacttacacaaatcactgcgttggtgtaatgtaatttgagtcggttcgctaccgtaaccgttcgatttgttgccccattggtatgttggtgttcatcttcatcatcatcgtccaccatccactgaagctcatcgctcattttggcttgaatttggacatgatggttcagataggcaatgccccaagaaagcgtattggtaatcgtgtcctgaatgacccaatacgaaataaaaaataaattattgctaattattccattttacttgtccagctgaccataaatcgttgcaaatgccctttagctgctcaatgcttaaacaatttggaagatgagatgaagcagaactgattgtaaaagtatttgcgaaaagatggacaaaaattttggaagactgtttcaaatgcatcattttatgggaacagattttgcagccgctcacctgaactggtgcatcggatcgccgtcgtttccgtccgtcccgcttcgtcttttcctttagaaaagcctcaacaaaatcagttggctctgtgttgtcattatcccattgctgtagctgattaattttcagtctgtgctcgtcgatttggcgctcaaagaatgcgtccaaattacggtacaccgttttggttcggttgaatttgccgtggaggaaaggcaaatgccgaaaaaggcggggactcagacggaagagcgcggtcagcgggtgcacactgatggcgaaatgtccgcagagcaactgcttaagctcattgaactgctcaagattgtcctattgcggatgaaaagatagcaatgcattaggattagtcattgtttcatatccgaaggtttgagcccgagattcgattctgatacccaaaagtggcacggtatttttctcacctaacagggatggcaaggaattacaatatacgactaccaatttccgacgttttgggctcagaattccgatttctttaaggatttttagggagcaaaacacgtaaaacctaatcaaaaaattcatttttggtcattaaatgattattaaaatattttatagctttttttaataaggaaaattttaaacctagaatttttatcaagaaaaaatattcttttggagatgaatttttgacaaatttttcatttcttaggagtgtatttttgaaaaaaaaatttgcaattcatagtggtgtattttcataaaaaatttttgattcatttcataggggtgtattttcccgattttattcaatttttaatggtttttttcggaaaacgccaaaaaaggcaccaaaatggcaaaatgccaaaaaaggcatttaaggcacgaaaatcccggaaaaggcaaaaaaagacataataaaagtcaacgtagaagcctcaaaccaagtggaaaaggtgttatttatgcttaatatgtcgaaactagtgcgcagaaaaaaggcatatgcctcaaaagttagaaaaaaggcttagtaaaaggaataaatttaaggaacaaatttaaaatagttttaaaagataaagaaaatcaaaaataaagtagattttttttgtgaattcatttcaactttttgccataagctatgtttttggactaaatgatcaaggtttaaatttatgcaattcatgaccaataaattctcggaaaatctgtattcgtaattacggtaagcttaaaaaaatccgtaacgcatttttttggcatgataaaaagccgtattcccatactttataaatattaaaaattttgaaaagatgaacaaaatttaatgaatcctagttactgttccaatttanaaacatttactcaaatgcgtaattatgtcaaaccaaacgtcctggtttgccattactattacatcaaatcatccctgttttatgcacattacttacacaaatcactgcgttggtgtacggtaatttgagtcggttcgctaccgtaaccgttcgatttattgtcccattggtatgttggtgttcatcttcatcatcatcgtccaccatccactgaagctcatcgctcattttggctgttaaaaaattatggaagggtgtttcaaaatgcctcattttccgagactcaattttgcagccgctcaccgaaattgtgcaacgagtcgtcgccatttccgtcccacttcgcctcggtctcgactagagtgccacgggaccgggaaaatccagaaattataaaggttaaaaatgatttaaaaattaatataaatgtaaaatttgtgttaaattctttttaataaaattaaaacttttaaaatttttttgaagagttgcaacttctgttaaaacatttatcgtaaaaattaaaattataaaattaaagatttttaagaacaaaaaacttaaataattaatttaaaaaaatttaatttttttaaaaagttaaaaaataaaaaaatagttatcacttccgggagcccggaaaaatgttctgtaaagtccggggggatatgaactatacaattttcaccccagctaaaaatccggaagatccggaaaagttcccgaacccggattccgacttttcaaatccggaattccggaattctgagcccggatttggattccccgagtccaaattagccggggaaaattgttattgtttgccgattttctgggccaccgtaaccggtccaaaaagtacgaaaagtgatttggcattttccgga

SEQ ID NO: 14066 - DNA, 3068 bp, Heterodera glycines
aaggaatgatttcacgttatttaaatgtttttatttattcttttaaatccgataaaataaacctaaatataaatgtataatttcaattccattttattcttttttcctggtttatttttgtttttatttacatttcattcattatactgttcgtaaaaataacaatttaattatgagaagtttaattataagttgttgtttctactattattttttaacgaatatttataggatggttcccttgcttaaaatgaagccattagacatattttttaacaaaaaacgcaatttttaatcacatagtcagtttaataattttaattgtttttatttataaggaaatattatataattttttttatattttggattttttacgaatttaatttttatgaaatcttttttattttccactcggcttttcattaaatactttttgttcaatttaaattctttgaggttataattgttagggcttcgttttttaggcatttgcctattttgaactttttgtgtttaatgcctaaatgctatttttgtgccaattacgccaatttgccacctattttcaggattttcgaataaatctttaaccaaaatgcaataaaaacgaaaaatacacccctaagaaatgtccgaaaaaatttcaaaaatacacccctaagaattgaaaaaaatgttcacaaaaattgacccctaatttaatttttttttgataaaattttttgggtttaaaaattttccttattcgaaaaaactttaaaacaattaaaatataactaaaattaagtgtttggatgaagttttatgttttttgcttatgttgtcaaaaagggaagcttctacaatagatattttttcgttttccaattttttaaattttattttgtgggttttttttaattttcattagcttaaaaattttcggctctttaaaaatataaataaattttgttatctattaatttctttaaaaatatttgaaagtaattaaattaaaatttttattaaataagtctatattaatcgatggctatcggtctgtaatagaagaatccgaaaaaaattttcgcggcaaccaatccctgaagagttacagacccgggactgaaatggcctgagaaggagaaatttttgcaaaaaaattaaataattaaagcatttgttcatatgtttgtgtggtttagtgactataccttctgcctttcattattggtcgctagtgttcaattccccaccgggatagaatgttttttatattttctttacattatttcaaatgaaatttaattaataaaaaatcaacttataaatttatttttcttttttaaacagcctaaaaccgcaaatttaactttttattgatttttcattcgataaaaaaattcttatcgatttttgaacatataataaaatttgtcaattgacccgaaacccgaatcctgaaacccgatatttttctcgtcccgatcccaaaaccctactcgatcacgaatcccaactcgatattttttggacccgcagctaccctggttcagatatattataatagaaaaaataataattttcaaaattgaaaacatataattaatattattttatattcagaatacgtattctgttataagtaaaattaatagtttagtaattttaaattaaaaaacaaaaaagaaaattatataaacaaattaaaaaatatgcaaatatgcggcaaattctaaaacaaggatttctaaaatgaacaaaactcaacctaaaaatcagcataaataaagaaagtatgaatgacgaaaaaataaataaaagaaaaaaatttaaaaatttaaaacttaattatttaaaaagaagcaattaaaatttttatattaatttataaaatatcggaagaatctaattaaataattatattctatattaaaataggggacggaattcagatttacgatttacgaaaatttttggtgcttcggaatgccatccttgatgtacaaaattctaaaaaagtcggcataaattttctagaagcattcaaattgtttcaaaaagataagctcactcttacttgtacgaaatactaaaacctcaaaaagttacatttttaaaaaccaataatttctttgcctattttcacaaagaaaaactatcatatatatatatttatattaaaattcttatcttaaaattgaaaattcaatataactaactttatttatacattagtattaagctaatactaatgggtacagtcaattaaaacaattgaggagaaaaagttgcttcaaagtcaaggaaaaaatataaaatttgaaaacataaaacattgactataataagcgatgtcaattgacaaaaatattataattgttctataaaatgaaataaaagatcaggaagcacaattttttgtcaaaatttttacacattaataaaaaacttttaagaaaaataaatgtatttacatttttttcacaagaaattaaatgttccttgcaaattatgaaattaaaccataaagagaggattttagtattattctgtgtatagaatattataaatgcatctgcatattaaatataaataaaataattatcgaatttaaaatgttaaaaataggtaaataaaatttgtaacataaaggaacaatgacaaataaaaatgcgaaccggcctggacaagagaataaaatttaaacatttgtttttaattaatataaacaaagaggctaatattaaatataaaaataataataaaataataaagtcaaagaaaatatatgcatacatagaaatatttacaaaatcaaaagaattaaatgaaaaagcacagaaataaatcaccataaaatgaaaatagttaaaataattaaaaactttaaatcaaattaaatgttatgaaataaaaaatgttaatccaaagaataaaaaattctaaaaaaaaccagagtattcgccagttaagtaataaattcaatggtgaaaatcttaaaaaaaattttactcactctatattggccgaaaattaacataataaagtcgacaaaatgtagcagagaattttcaatgggcgag

SEQ ID NO: 14067 - DNA, 2408 bp, Heterodera glycines
ttttcaaaaatgcaaaaattccagtaccaggatgaattgtggggggaataaacgaaaacctttttctccaggaaaattttaaaaggtttttcagtttgttaacttcttgttaggtatatatttatttctctgttttatcacctaaaaatcctagactttctaaggaattagagcaccaaaaaatatttgcgatagcaaatttttattatggtaaaatgtttttaataaaatccgaaaaattcattcggactttcaaaaaaaaattaatttacccatttagcacctcttatgaaaatcaataaatatttcaatcatataatttgtattaaataattttattaattatgtgactgatcgcttttttcaataggcgaggttcaatagcagcaaaattgttacgatattttcatgcaggtcgcgtgtagagctatccatctgtcaggtccatctcaacggagtattatctcacaaagagagaagatatgttactgctctcagagaatgagaacccccccccccccccccctgtcccacaaaattttttgcaaaagcgcggcgcaaaaaaatgcgtttttaaagcagaaaaaagtcgtcgcaaatgaggaaaatgatcagccgaaacaaaaaaaggttggaaaaatccattccgatgacaaatacaagccattaaataaatattaactatttttcattgtatataataaaaaattttaaatgtccttgggtttcatgaatttttcccattatgtccttgcaaatcggcaacccgtccttgaaaacggagcatggacgatggcagccctgaattaaaataaagtaagaaacgccaaaccggctattcactttaataatttaaaataaaagaaaaaaaaatttattctgtaataaccaatcaatattcatttaaatatttctgtaaaaaataatcaaaaatatccgttttattattgctaaataaaagtttgttgtactaaaaatatttcattaaaaataattccaaaatggaattatattaaaaaaattagtatagaaaattaataattggatggaaacagttgggtggaaagtaacgagcgataagaagggattcagtcaacatgaaaaaaaactaaatttatccaaaataaataagggcaaattcataataaagaaggaaattaataaaattttcaaatacttactgcgcatataataaaataaaaacctttattaattcaaaattaagaaaaaaaaacacttttgataagtcatataattacttttaaaataaaaaaaagtattccaaagaaatttttataatttttatgattaatatgtaaatttaaaataaaaaattaacaattttatttatttaagtaatcttttgaccttttttctcttactttttaatattataaaataatttttaaccattttttccttttaatccagccttattgtgtaaacaatttttgttggtattaagtttttattttaaaaattcctctagaaaaataaaattcttttatgagttttaaagaactaacaaattgtgtacgtatttatgttacaaattttattaacctatttttaatattttaaattcgataattattttatttatatttaatatgcagatgcatttataatattctatacacagaataatgctaaaatcctctctttatggtttaatttcataatttgcaaggaacatttaatttcttgtgaaaaaaatgtaaatacattttatttttattaaaagttttttattaatgtgtaaaaatatttgacaaaaaattgtgctcctgatcttttatttcttcaattgacatcgcctattatggtcaatgttttatgttttcaaattttatattttttccttgactttgaagcaactttttctcctcaattgttttaattgactgtacccattagtattagcttaatactaatgtataaataaagttagattatattgaattttcaattttaagataagaattttaatatatatatgatagtttttctttgtgaaaataggcaaagaaattattggtttttaaaaatgtaactttttgaggttttagtatttcgtacaagtaagagtgagcttatctttttgaaacaatttgaatgcttctagaaaatttatgccgacttttttagaatttgtacatcaaggaatggcattccgaagcaccaaaaattttcgaaaatcgtaaatcctgaattccgtcccctattttaatatagaatatattttattttaattagattcttcccgatattttataaattaatataaaaattttaattgcttccttttaaataattaaattttaaatttttttcttttaatttattttttcgtccttcatactttctttatttatgctgatttttagggtgagtttttgttcctttta

SEQ ID NO: 14068 - DNA, 1537 bp, Heterodera glycines
  unsure (1)..(1537): unsure at all n locations
ccagatgtccacatagaccaagaaattgaatttattaagaaacatgttacgaaaaattggaaatttgccggaaaaatacttaaacgatcaaataatcttgaaatttttgcaaatatgctttttaaacgggtgaaaattttctacatagaggcatttagtgcccctgaaagcgaaaatttatactattcatttttagaagttctcgataaaattcaaaaattacctaaacttattatgcatgagtatggaaaccaagcattagctatgcaaaaattagaaattggactcaaagaaataaatatatttaaatgtcaagaagcagagattatatccgataccaatttatcgaagataaataaattccaaaaacaagtgcaaaattatcgatttgacatgaaaatgttatacaataaaatacgattgacagctattaaacatgtatttaaacccgaaaaaaaattttttttagtccttttcaaatagaaaaaaatagagaaattttttattcattatttcggcatatctaataaaatcgcaactttttttttgcaaaaacgaaacgttttcgttactaaagaatcggatgattttttgtgtaatatttcatggttacttgcgcaaaagaccaaaaagttttgcaagtttgaaggtcgttcactaatttcatttgccgaatttgaactaaattttacaatcgaaatagtttgagtatttaaagagaccaaaattttttattatcctatcaaattttttgacttcaatcattaggttacgctattttattttgatttaacatttcttttccacttttagaaatgtccgagcaaaatcatgaatcggatgatgttttgcccacttgggccatggtcgattttcatgaaatgagccgtcgagaaagactgcgaattcagcagcaagaagaattgaagcggcaaaaccaaaaaaagcaaacattggagcagtttcggcaacaacgggtggaacaaaaacttcaatgggagaaggaggaaactgaaaaaaagaccccaaaacatggaagaagaggaccgatgagatgaagaaaatctgtgaggagagatggacgaaagcaaaatatgctggcagtagcaacgacaacaagaaccacaataaacaatcaaacgatgcccaatacacttgggattgagcccaattggaaaatcaagaaaaaacatatttggcaggcggtgggttgtggtaaaaaaagccccccccctcctcaccctcccactctgacgtaatcattgaatttgttgttgtgtttgtttttaataaatatgatagaaaaatgtattattatagggtcttgatttatagtaagtaaattttaacacgtggtgtaaaacgaaaacttccaattctganttcactatctgccagaaaataaattattttggttattcgtcataaaacaattaaaatttcataatttnggcattttgtcaaaatttttcagtattttgacattttttgaaaattttttaataataacatattaaattaatctgttctattaaaa

SEQ ID NO: 14069 - DNA, 2387 bp, Heterodera glycines
tatactattcttttttagaagttctcgataaaattcaaaaattacctaaacttattatgcatgagtatggaaaccaagcattagctatgcaaaaaatagaaattggactcaaagaaataaatatatttaaatgccaagaagcagagattatatccgataccaatttatcgaagataaataaattccaaaaacaagtgcaaaattatcgatttgacatgaaaatgttatacaataaaatacgattgacagctattaaacatgtatttaaacccgaaaaataaatttttttttagtccttttcaaatagaaaaaaatagagaaattttttattcattatttcggcatatctaataaaatcgcaactttttttttgcaaaaaaaacgaaacattttcgttactaatagaatcgcatgatttttagtgtaatatttgagccttactgcacaaaagaccaattgaatttgttgttgtgtttgtttttaataaatatgatagaaaaatgtattattatagggtcttgatttatagtaagtaaattttaacacgtggtgtaaaacgaaaacttccaattctgatttcactatctgccagaaaaataaattattttggttattcgtaataaaacaattaaagttcaataatttggcatttgtcaaaatttttcagtattttgacattttttggaaattttttaaataaataacatattaatttaatctgttctattaaaaatcaataaattatcttttagaaataaatgttttttcttgtgccgcataccacaaaacttgtcatcaaacattttgcctaagggttttatcgcaaataaaaacgaattttgcgcttgagatagggaatttatagcgcaaatataactagttattgtagcaataaaaggactaatcacatgatttatgtttttcccgccgtaaaatagcaattgttgcgcaaaaaccccatataaatagagtggttaatcgtttagtaataggcgaatacaaacaaagctatgggaaccgtacgtcactgtgaccatccaaatggtaaacccaaattgctaaaaataaatcaacatttttaagacgttactacgtttattggaccgttgaatccatctaacaattatcctattttggcatattatgaggcgaaattccgtggcgacgctgggtattttcaaaaatattttaacgaattattttaaattaagaaccttcggtatcggcctgtgtgatggatcccttgaccgtagcgatttcgtgtgttggagcccgaaatcttatggctatgagtcgtcaggcgaattgctaggattttccgctacaggcggtccaccagttgtgcattcgcaccgtttttttccaaatgatattgtcgggtgtggaattaatctagcaactcgtgaggctatttttacattaaatggccaaaaaatcagtttgtttacttgcaaaacattgtaaaagtttgatttgtatttttagatactactggcctcagaattgagaatccggccgtttcaatgataggcagcggaacgtcagctactgtaaattttgggcccatattgatgttcaaactttccaaagtttttgagccgtaaacagaaacacataaaaggttaaaattttgttggcaaaaatagaaataagtcgtaacagagattttgtccatctccatcgattttgcccgtagtttctgcacttttttcccgccacgtctattctttttcaaccttttttctttgttgagggtgccggcctaaacgtttttgttcatttttattttgttttactatttccaaaaattttcctcatatcgcaaaaggcaaaaaatcctattgcttaaaaaatgattttcaaaatttttcttacaattctgcactacaaatgtggtcttacacaattaaaagaaccaaatttagcttacttctgctcccaaaggaattgtatcttcctcatcaacaattccaacaatttgatcaagtaaacgttcaggatcgtccaatattttttccgtttcattcatctcggaaagcaatttttcgttgtatttgccgagagcccctggtggctgtaagcatttaaaacattattttgagttgagaaataaatatttagctaaattcccaaaatattgctcagtatccagccctgccctactattggaaacagaaaacttaggcccttttgcacctaatctttgccggaaaaagttatgcttatgtgaaattaattcaaatttctttaaaatcaaaatccactccatcaaaaataaaaaattactatattataatcccctagccagctctaaaataaatctctcaagagcctttttagaggcaaagcagtctaaattttcaatgagttcaattataggacaaaaa

SEQ ID NO: 14070 - DNA, 3520 bp, Heterodera glycines
ttgtcataccaaacggacaaaagatccaattttttaaatatatttgtattaccgcgatcatttattttgacaattcccaattcgtcccaaaattgatccctcttttcattattctttctcattcgtgttgttcagtttttatgttttaatcttctgctgcagttctcctctaaattcatcgtccctccatttttattatatttcttccgccgttcccaatttactttaaaataaatatttatcccaactattggcaacattcggacaacacatcttcggttggcccatccccaatcccccacaacattccatatatttcgtattcccgtagaccccgaccccattttgtttctactctttacgcgttcattcaatgcctaccctaagtttcttaggccaaaattttttttattttttagttggtaaatagctatcttctttacaacaaaagaacgcttaaatttataaataaagaaaagagctaacaatgacttcaagaaaaataaattgagataacacgaaattcagcctttttcgagtagtaggaaaaaagcgatgagggaacagttcaatttaaaaagcagaggaatgagggagtgacttgggaaggacacaaattggcttgggtttgtagcaaagtgtaacacattggttgggatgggaaaataaattgtaaagagagaaaagttatacaagataatgaaagataaaaataatagttaaataaattaaataatgactttgtccaaacgggatcccacaatttggttgttggccgttaattcccatcaatttgtccacttgttcatcgatagttttttcgttgttcttgaacacatcatcagcaccaatgttttgtattgccaatttgtaagcatttcgtagaattatgccgacactaaattaattatacacaaaaataatagttaagtctaattgtgataaataaatattaattaattttctaacatttaaaaattttaagctttttcattaagtttcaaataataaaaattttcgatttattaaactaatttttgaaaatttattttacaacaaaaaaataataaataattttattttcaataaattagcctgtttttttcgaaattgtcctttaattcaatttcattgccgaatagatgtaaatggtaaaccaaatattcaagtgagtacctgtaaattaattaattatttaaataatttaaatcgctatacatcgaattcggcttaacatagtgaaaagaaatggcataatcactgcaacagttgggcccctaaatgtacaatttataaagtaataaaaaaacgatttgttctaatttaaaatagctatcccaaaatctaatattaaattaaattagaatttttttcgtcctacttcttccatcggatagtaagtgtatttccagaaccaaaatgatttgtccatatggtctggggacaaatgagtttccggcacaaatgggaaaaagcgatggtggtcttcggcatcacgcgaatcgccagccttgacgccaattttgtccaaacatttgcccatttcaacgtcctcgtgaccccattcatcggactgaaaaattagggagggatgagtgattagtttttagtttctaaaaaactcctaaaatagttgctaaaatggaaaataggtaacaaaaagtttcatattatggatttgtattttcagaaatttttggtccattcttaggggtgtatttttggaaaaaaattatgtcgatttttagagatgtatttttctgaagcgatcggttttaggggtatattttttcgtttttattgcatttttgttaatatgtttgggaaaacgccaaaatacgttaaaatattttttccaaatagttttgagtttttaggttctaaaaatagtaacatagaaaataggttctaaaaacacgaaaagtacttaacaacgaccgaaaaaaacatattttcatgcttttaagcctattggtaactcaggaaaaaatagataaaaagctaaaaatatcatccctagcgataatcaaataaaaaattttttcattccaaatatcaattttttttttaaaagatggaaatatttaaatgtaatttaattatgaatatttaaatataaagcaaaagttaactcaagtaaaaaatatataattcaagtttaaaaaatgttaaatgcttaaaatagataatctgattttttacatattaatgtttcaagaaataaggaaaaatttctaatattcaaattatttgaatttagtaattggtgttttagattttcggaataaaaatacccggcacttctttgcgtcggggagtccttcttcaacaaattttttcaatgccattcggctcaaaacgtagccagctccgccgctcatatagccctaatcgattttaaatttattaattattattaatttcatttaattgcctgttcaacaaagggtttgaatttgcacccataataaatgggttcttctggcgaatgagccatcagaaggaagcgcaaattctcaacaatcacaaaagtgtcgtcgtcagtcttgagaaaccaatcaaagtcattctaaaaataataaccaatttattattttaataaaatataataaaaatggtttttgcaaattaaaataaataaaaaatggtttttaattaataaaatgttaattggtaattaaaatttactaaatactgttcgtatgcgtatttgaaggctgcctttgttttgccccataagtgctcccttgaaaaggtttgaaaattttaataaagaaattgataattttttcaatatttcaattaaaattaaaaattaagaaaaaacgaatgtgctttaattatagagctatataataagtttagaaaaaataaattaaaaaacatttaaaatgtttcggaaaactaatccgattccgacacctatttcggcccatttcgaaccccgaactcgaattcgataacctaaaccattttcaattaaatgcaaatttatgcgacaaaaccgattcattgtttaaatgttgataacttatttgttatattaatatgactgcacagaagggatttgaaatttcactttgaaaaaattgcatgaatggcttataatgacaatgttttggacacatagtcgaaaatatagggcttctgtaaagagatgaatatttttgggacgttttttgaaggttttctgagttgacaaacgactgtcagtaaactttgtggactggtttaattttttttagagatatttgtacaactttttgtccttctgccatcgccattggatgccaaggtccccaacatttttttttttgtttttctaagctttactctaggtcttttcgttgaaatatatgaaatgcttgttggaaaaagaaaatatggagtcgttcgtgtgcttgtaaagcaagaaatttgattgttagctggcttagaacgtgatccgaacgggaacgcgtttttatggttccagtggaaatgcgtggagcgaaccttcttatcccactcattcaacaga

SEQ ID NO: 14071 - DNA, 2923 bp, Heterodera glycines
  unsure (1)..(2923): unsure at all n locations
cattttgtaaatttctgtcattggatacgctcacaatcaggtaagcacaaaaaataaacaaagttttttagtttgctaataaaagttaaaatttatttgcctttttatacctgcatgttcgagaaatttagtgtctttttaatgcctattttgcgattattattattattatttttttgccttttacctaagtgcgtgttttgtaattttcgtgcttaaaaatgccatccctaatacaaattggttaattcgataatttatgttttgagttgggtaaactaggaaaaaaattttaagacgaataaaatatatttaaaaattatagaaaaaaattcttggtatcattcaatggcccttcaggttttctatctacataaaatgtttcaaaaaagatatgagcaaatattgtaaaaaaaaaatattcgtccaaaactttttttttaatacatgaccaaattttttggaattttgcaagaaaatagagaagcttaagggctatcgaatgttattaaaatgtttaatttggctgaaaggacaaaagttgatacgattttttgtcgaaatgcgagtcggggcattacaaattggccttgtacgagttgggtttttacccaatttgtaaacctcaaaaagaaaaatagggcctagatatggttatatattatggaaagagtttttcttttacatataacctcaaaaataatggaatattttcagcttccggcgacacatgatgcccaatattttagaagcacaactgccaaatgactattttttctacattttacggctttttgccgttaaacttgacgaagaagcgaaagagaggcatggattgaaaaccagaaatttgcttaataatgaaattttagtctcaagactagtcgccctgggtgcagaattatcacagaggcaggaactactttcctgcgtgcctataatgaaagtgggttttttaaataatgaaataataatttaaataattaatntaaaagaactgggattttttgttgcggtttatatttgttcaatcaaattaaacacttaattagatttcaaagccctttatgtaatttgggtgctttggcttttttttttaatcatatatttagacatataaaatccaagttctgattattagataattgtaattaaaaagataaataataatttaataataataattataaaattaagttaaattacaattaaaattaatacacaataaaaccgttgcataaaaaaagttaccccctttaaaacagttttatttttgaaagttgtataaaaaaacatatagataactctctaagctgaacaaaaaaaagtaactattgctaggtcgtttttcatgtatatataagactatccaaattgtctaaccccagaaaatttaagacggggtagggctttgtatgtccaagtatctctgaaaattggtaccatgccatatgtataatattttcaaaaatacaaaaatggcgtaataattttacaccgatcggttcacgggaatggtcaactaagcaaaaccgggatgttgtacttttttaatgcaacgaaattgtaaatgtatacataataacaaaaaaaatttttttattaagctagcggcattttgaaggaatggccaagcggccaggatgtagagtctattatccaattaagatttaatatttagaaacgttggtttgttttaatgttatattttaggaaaatattgttgaacacatttaattactcattataataattggcccctattcctttaaatcatttattcataatttcattttaataattcatttatgcataattacattttaataactcatttattcataatttcattttaataattcatttatgcataattacattttaataactcatttattcataatttcattttaataactcatttattcataatttcattttaataattcatttatgcataattacattttaataactcatttattcataatttcattttaataactcatttattcataatttcattttaataattcatttatgcataattacattttaataactcatttattcataatttcattttaataactcatttattcataatttcattttaataattcatttatgcataattacattttaataactcatttattcataatttcattttaataactcatttattcataatttcattttaataattcatttatgcataattacattttaataactcatttattcataatttcattttaataactcatttattcataatttcattttaataattcatttatgcataattacattttaataactcatttattcataatttcattttaataactcatttataataattggccactattcctttaaatcatttattcataatttcattttaataattcatttatgcataatttcattttaataactcatttataatataaatttttcaggtttattataaatttaattggcccctattcctttaaaatcatttattcataatttcattaaagtcatttaaaaatttccatttaaatatcttttaatgcatttattttgggtttaattgaataaacttttttaagtcttgaacactgaagagcataaaaaataattattgtttttttgtcgtttaccataatttttctttggttcaattggggataaaaataaataaaaaatgcaaaaaaaaaagaattagtaaaaaggtgcttatcggggggaggcgggtatatttgaatattccatgcaattgaataanagaaaacacgaagaaaggcaaaagagaaacaaaacagggacatttgggacaaaaaatgaataaagaaaaaatgcaaaatattttaaattcantaaaagtgcttattattgnagggtgntatatgatttaataaccattctcctc

SEQ ID NO: 14072 - DNA, 2085 bp, Heterodera glycines
  unsure (1)..(2085): unsure at all n locations
cagcttggaccgctgtttttcgcaaattgattgggctatatggacggacaaatgagtggtgtggcggcggtggtggcctttgaaacagtttgaccgcagcacaaaatgtgacggggcgccacattcactgagttttgtttttatcgcgccgccagagaatgtcacggacacttttagttattcacttaactaatttgaaagaagagataagggaatttaaaaaaaatgtcatgaaaagtgtgagggtttatttctacaagaaactccccaaaaatttaagccaaaacatttgataaaacaaggtccccatgccaaggaagtccttggatttgggcttagggtcatggaaaattgaagacatcctttttcccaagaatgcccttggaaatcggccttagaaaaaaatatttaaattttccaataatttataaaaatcccaaaaattttcccgacgcctaatctttttcttaaaaaaattggccaaaaattgcaaatttagtgatttttactgaaagcctgttaacaaaaaatctctttaaaaatcccaaaaatttttccggcgccgccggcccaaaattttttggaaaaaactcgccgtacaagtgttgtgaaaatgtaaaaaaaatagaaaaatgatcagcagaaacaaaaaaaattatgaaaaaaatctacaggcgcaaaatacaaaccatttgaagaaaattaatcatttttcattgcatatgataaaattttaagcgtctttgcatttgacgaaattttcccgttatgccttggaaatcagtatacccgtccttgggaagtgagtttttccaatgggaaactcaggtaaaatgctttaagagctcttccgaggtaaaatgcatatggtttttggcaagaatattttttgtaaacagaaaaggatcgccaaaaataagcacatttttaaagtgccatataattcctaaatttgcatgtttgtatttttagtcccgtaataaaattggcgtgagccgtgcatggaaattcgaaattttccaggacaggatcgggaatcccgtaaaattccgctgtgcaaaaaaatgtgggaccgggactttcacagaattcttgcgggagtcccacttctcccatcaagctctagtaaaatcaaagtttggttgccggatttttaaatttgaaaaaaaaaattaaaaaattccttaaaaacttttttttactcacccaatgcgatggttgtgaatacaaagtaaaatttcgacacaagcatataaatttcgtcctcccactgaactgccgtcgtcccctcaaaattgggcatcgcttcaacacatatttattagcaaattcatattcgcgttttttgtgcaatgtcagcttttcattggtccgtcattcaccaattcaaatgtctcaattggcggtggatttcgtttcaaaacaaatattataattgacagaagaattggtggtggtggcactgagagatgcctaaacaaatgccaaattgagcaaattaaaaagataaaagccgcgggaaatttgaaaaggaaatttattaaaatttaagccaaacactcgaaggtaataccttaaatagttgtctctcgttttttgaggaaaattcaaatttcttaaatggttttatgaccagggaacccgaaggggaggggggaggggcagtgaacacttggccactctgcattaaattctcacattttcttcaaaattcgtttattcgttttctttgccactcgaaaacttcgccgtttatagaaatgcgaggacggaatcgtcgttgtagctgaacaaaaagaatagttcctcgttaataaatgattttgaatttgatttactcaatctgctgaaggtccttaaagcgaattttgttgggcagcggacggtccggcaaaggaaaatccacataattggcaccaataaacacacgtaaacttggcacttctccgaaaacgcctatgcgaattctaattgctctccanattgtcaattcgtttttgccatcgaaatgtttgtccaccaacgcatcgaaacgtggcccatcccaacatcgctgcaaaatcaactgaaatatgaaaattaaat

SEQ ID NO: 14073 - DNA, 1231 bp, Heterodera glycines
aaaatttttgactaaaatttgttatccaaattctgtctcaaataaacccaataaattggtgctgattttcaccaaatgtggcagattaaataagcaatggtcggcggagaaaagtttttttttcgtccggcgatgccatggaaaattaaattcgcttaaaatatatttggtatgaaatttaagctagattttcaaattaatcaaggtaaagatccgccggtgtatcagataagtttcataatccggattcggaagaaatgtgcaattgaatgaatggtggaaagctttataagtattttaaaaaattcattcccctcaaaacctatacacccaaaattttttcgctttgtcatagcagcaataaattgcctaagcctagacctaggcccaggcaagcctaagccaagtcttttgtacgagttgtcatgacaccggtgagggacttggatatcgcgcaggattttgctggatgagccaagtccgcaatcctgcattttttggaaattttgaaatatgtgggtgtggaattaatcccgcgggatactattaaaacatgtgatattactttaccaatgtcgtcgccttccaaaagatgttgccataaatgaacccgacgattgctgctgactttcagcaatttcgacagaagaaatgacggcgaaggattttatttgtcccataaaaaatgaattttcggtctgaaaatatttgagaaaaatttggaaactctaatattttgaggatttatatgtagggagcataactgtttaaatgggggagggggggggatgatggcgatggggtcagttgggttgggtcatgacgcggaacgcaaggggtcagaagggggggggaaaatttgctgacgaagttgagcagcggacagttgggcaatgtaatgcccttaagaatcgccattgttctccaaataatattaattcccttttgccatcgaaatatttgtcaattaaaacattgaaacgtggcgaaaaaagtgccaatgtgaggccgagtttacggccaaaatgaggaaaaatgtccatccaaacgtcgctgcaaaccagggttgttgcgaatcgaaaataaaatgcgaaatatgaaactaaaataaaacacaaaaattttttttcaacatccctgctgcaaacccagctgaaattgtggaaaattgaaacggtctcaaaaatgaaagttataaatttttaaccccaataaattctcacattttcct

SEQ ID NO: 14074 - DNA, 1754 bp, Heterodera glycines
  unsure (1)..(1754): unsure at all n locations
ttcagcaatattttttctacgaaggtgaaaatgattaaaataataataaataatataatttaccaattttgatntattaatttgttcagtttttgccggtgatgctgcttatccaagcggcacttttctatctgccaaaatggacgctagacaaattgctgagtgattttatgaaagggcaaaaaaaaaataattaattcaatgaatttaaatattttaaaattattgtttataaaattcagcttgtttgttggcaattgccgtggcacaatttgccgtggttaacgcattgaccggccgagggcaccgctggtggggcattgaaatgggaaaatcattgcgcagtggtgatgaaatacaggtggaaaattgaatggaatgactaatttaagaatatttaacctattttttttagacaaaccctgacttacaaatttaaatgtttttgtttagcaattatttcaaatatttcggaaaatttatgtttattttcaaagtgcataattttatctaaataaatttttttaattccaaagattaaattgcaaaactttatcaagttgtgagtacatagttttgctttatgtgcatttatttgttcattagttcgaccactttcggcactttggtttaaattttaattagaaagttaaaacaccgaaaaagactctcttaatcactgcacttttgcccttttaaggatttgcccattttcccccgtctgatcacttgtgactctgtccttgctccgaacgtgttcatccaatgccatctgcgcatcacctggttcaatgagaagattttcttcctcatttggtaaattataaattccattttcactttttctaattaaataattaatttgttaataattcccattatcaatttgcttctgttttaataattgccattctttgctcttttgtcaggtggtcacttttctgcgtctcccttttgactctgatcactttcgttttcgccccacaaatgcgccaatgatgaggcaaaatgtgtttaattagtcggacattaataataattgaccaatttttttataatttaattcacccaaaagcgtgcatttattgttttaaattttaaattatttctactactttttagccatcatttatactaccaataaaatcgtttaaactgaattcattaaaagtttcgtttattcatttgacacaaatttcttcattaaccattaagataaaaaaaatataaatgtactgctcaaaaagctcggtttcgaactcgactcgtgaaatgcctagggtttttgggtgttttgttctgatcaccggaccaattttgggcgttgtacttgcaaaaaaagtaaaatttcctgcaaaatcattcgcctgattgcttaaatagttgtagagaataagctaatcaatcgatggtgccgaaaatggatgagtcactttgagaaaatggcagtaagcgaaatgggccacggaacagcactcactctctgctgctgatcagttggagcgatcactcaccgttttactctccccaaaaaacgcatcagtcaacgtaatatccattcattttaattatcattattaccattttcattttattttattttgtcaaaagaatgtccgtccgccgttatttctgcttcgttttgctgttgtttttccagcaaaatgtaaaaaatttaatgcttttttcacccgccggagttcgcactgaaatttttcaaaatgacatttaaaaaaagaaaggataattaaaaa

SEQ ID NO: 14075 - DNA, 2934 bp, Heterodera glycines
ttaattgctcatcaggtcgaaacttgggcaattattttagttcattaaagtttcatcctttgcttatgaggaggtaagttacgtcaaataaaaagggttcgccaaaatataaaacttttctcccagtcaaaagattgatttgtgagactcgtgagcaaacactgcaaaagttattattagcttatccgcaaatggcgactaaccattttcaataattacaatagataattaaatcttttggtgacaaagttcaattttgacccgcaggaaattaaataaattttaaaattcaattaaaaaaatcattgccgtattggcaccaaaaagaaaaactatgataccatattaggtaagtgaagttgatcatctttcattgttcttttttttcattttgcccctaaactcttccaaaatggcattaaatattagtgagaaattttaactttggatttacccattcatcatccattttccattttctatgcttttcagacaaatttcacatcttccaattcggctgcatccagcgtcgggtcacgctgtgacgattttgtgagaaattccgtcggttcccggtacaaagagttcaacagcgacccgtacacatgcgagtgcttttttgggggaaccggtgccaatctgtccaacaaaaatgtccatcttccggtgactcatcctcggcccgaaactgacgacgccggcacaacagcagcaggtcgaatttagggaaatacaaattgtaaaagttgtcgtttggtctccttaacccccgggtttatctcctctaaactcgaagacgagcaacagcaggccccaaatgccgcagcattcaatcacaaattaattttaataattgctattaattattattatttatttctttccatcttccagtgactcatcctcggcccgaaaccgacattagtgaaatgtaaattgaaaaaagaatcatatgtcggcatttcattatcaatataaaaaatgtaattaatcttttttattattttctttttagattcaattaaaatttttgtcgaattaactggcataaatgcgaaaagtgccgctgttcgtcgacaccattttgatttgaatattctgctgttgttgttgttgatcagctgttgtttttttagaatgattgtgaggaggaaggaataatttttgtgatttaatttcaaaggaattgaaaatatattaattaataaatattatttataaaatcagtcaccgaaaaaaaatttgcatcaaaaaagtttaagtaccaaagaagccttttggataaaattgagtcaaatccgatcgaagagccaaagatttagaatttaaaaggtacaaaatcatttttaatgataaaaatgcaaaaattataacaatgagacgtccagtaaaattcagtcctctttcgacaacacaacagtattgaggacaatttggacaaatagcaccgatttttctggaaagaaataataaatgataaaaagcaaataagtattaaagttctaaagattttactcataattgatttggtttagttatcaccctttctacttttaaaaatcattattttcaaaatgaaaataaagttaattattattttgttgcttttccctcattagtcccatcccttttgctaaacgaccgtttatccgctcaaaaatgggcaatgtccgctgcgggaagatgaacgtagtaaagcatcaatccgacgcccaacatggccacagtgtaatcgatgctcaacgggtgggcccatgccgaacagcgaataggacctgagtgatgttacaactgctcgggaatcccggccgaggcaaaagccggaaatttcgggttattaatgcccgtccagattttgtcgtaaattctcgaactatgaacccctaatttttcaggattaagcagatttagagggaatgagtaccataagggaaagtgccggcttatggaagcgtatttcacccatcggatatattatgaaatattaatcattgagatgttaaaaaaccaaattgtttaacaataaattttgcaaaaaacatatgcgtgtgacaggattcgaacctgcgcgggaaaatccctttgtgacctagagcacaacgccttaacaactcggccacacacgcgatgtttgccaaggaaattgtgtcttgaaaaggatgcaacaggacaaatgaccaaaggtcaactcaataattaaccaccggtggaggggccatttctatcgaaacgagccaaccgggcagtaaagactactgggatttcgaaataaacgggaccggggctgacgatggaaaagtggacggaattaacggaaataaaactccgttttccgggactatcgctttttgtaaaatatattagtaaatcacataaatacatataaaaatggcacgataatgttgaatttttcaaatgttcactccaaaattctcaaatattggcattttttggaaaattcaatcagatggtatttaattctaaaactttcccggcggagcctattggcagtagaacctttctttttccaaaaattttagcataaattatcagaattaatgaattttgattgctcttgtattttgaaaatggaggtcttttagagccccaatgagtgtttttaaaatagagatcaaagttcagaccaaatgaacttaacgcgcaaaaaattaataccgtaccttaattaaggaattttaagttttttgaatttgaaaggttttgttaaattgtaaaaactgaggttcaaaaataatttttcatttcaatggtttgggtttgtacgaatcccttacagcagaagtacagtaggagtaaaaaaataagacaaaaaatgcatgtgacaggattcgaacctgcgcgggaaattccctttgcgacgtagatcgcaacgccttaaccactcggccacacatgcgacgaatgccaaaaggc

SEQ ID NO: 14076 - DNA, 2568 bp, Heterodera glycines
  unsure (1)..(2568): unsure at all n locations
catattgttgattataattgtcagtccaatcatcaaaaaaatgtatagtttccctggttcagaccagatagcagcgaatcacgtgtgaatatgaaaataaataatttaacaaacgatttttttaatgtgcaaatataaatgtattcagtttttgggcataaatcagtgaaatttaaaagtgaattataatttcttgagaataaacaattcttttgcagtacctttacgactgttgcgatttgcagcatactgtaaaatcttaagatattaataataattattaatgtaagaaattatagtaatatttttaaagaattaaaatttggtactttacggttatcgggatccagatttcaaaaaaatttttgataaaaacttgtttttaggaattttcagagtcaaggaaaccgattttggcatcggttttaacccattcgagccccgaaaccagattcgaacaaaaaattcaaaatccattttttaacaaaattcacattttatacacaaaatcgcttcaatttttataaagtgattatgtatggcacgaaaagaataaattatttattagacacattaaagaatcactcgagaggccaatacttcgaacaggctcatatcaattcttcgaatacatctccgtcaccgatcatccttctctacatgaattcggcaaaatagctctccaaatgatgacgcgcggtgcctctttgcttgttatttcgccattttgcacttccccacattctttccactgtttgagtgtgcgtaccattcattggattaacaaagttgaaactgaaatataagtttatcaaaaaatttcaaaaaaaaacacaccgatgattgaatttaaaataaagccagcatcttcaaattcaggcgttttgtatccagaccaggaatcggagaaaatgatgcttccagttgcggtgttttgtacattagcattgagaatggttttggcgttgcggtccggaacctagaaattagaaattaggacaaaaaacccaaacacgtttatttgtataaggaacattcgtttggaattcgacaaattcctccaaaaatccaaactgcggcaacacactcccggtgttatttttccgcttgctgaaaagcgattcgtcaatttgaacaatttgattttcacccccgatcaattggttcgtctaactacttggaccaggaatagatgaaacgtaacattttggtgaatggtgcttcgtgttgcagaaacaattgcaattacgcagaccaattctttgtcgacaccctttattattgcacttccattcttgcctttatcccaaatataatttcattggatgtccatttgtacacttgcgtttggcgtgaagaagcctgcgttcctggaaaaattgatgaagctatcctcagtgcttggccaagccccaaatttgtaacattattttgttgaaaaatctaaaaatcagtgaaaattatatgtataaaaaaatataatgttaattttgttgaaaaatttttgaatttttgttcgaatccgggttctggagttggattttgtccaaatatatgtccgaattggttttccggaccctgaaaacccctaaaaatcatttttgtgcaataaacgtgaattttggtgaaaatgaattttcgacattttttctcgaattttgttcgagttcgggaactgaagtcggattggagcaaaacagatgccaaaatcggcttcccgactctgaaaatgcctaaacccaagttttaatcaaaaatttttttgaaatctggacacagataaccgtaaagtaccaaatctttattagttccatgctcatgaagtgagaaaatattattgaacatgaaaattttttcataattgaaaattctattgttttttaacaattaataggaatagtagttgattgatgaatagtaggatttgttataatgtttagatacttattttaaatccaaaaattgtgaagaaaagttaaaattgtacgaaattgattaatttgaaggaattagaaattatttttaaacaccattttccctgcagcgtactataaaggatatataaatattaatttgctttattttcaatttctttttcgttttaaaataaactccaaagcatataaatgaaaaaattaagctgtcttaattgaacatgataataatttataaaatattaaaatagaataatttttaaagcagcattttttctttgccaacccaagccaaaaatttaatttataattattttgattaaaaaatcttttgcaagttaatatttgtttaatttaaaaaatcattaaaattaatgttttatataaatcgaattttgtattaatatttggattttttcagcaaatgtttttatataaattttaacaatattaaaagagagatgtcaatgattaattttgcaataataataaatttttaatttataatttttgaatttttgtttttgaatattagcattttactgattttcactcttaatgcatgaagtataaaacctcgtagccgctgaaacaaattattttattaangttatagntaaaattaattaatagt

SEQ ID NO: 14077 - DNA, 2378 bp, Heterodera glycines
  unsure (1)..(2378): unsure at all n locations
tttccttcactttcccgcgattttccataatcatcttctttcattaggcaatcgcattataccccgcctatctcgctatcggatcccgccgttccctttaaaagccaagggtaacccagctaaagcggaggagagccccattcatcccaagaatcccacttactctcctcccgtccctttccttctccatcccctccttttcagtcagttggctcatcccggacaattcccccacagagcaactccggagaaggaattcttctccgtcccttttctcgttatcccggctcccttttccgctcccggacaaaaattcacctttggtttcccttcccactcccatcccggaccgtccctcaggtttccttatttttggccattttcgctcagatacatttggaactcggatcgttttcatctcttattaatttcacatttaattcatattttcgccttcaccaattccacttttcaattcacaaccattttccattttaagtaaataaatcgatcagaccaattggataatggagaagtcaaagaaaaggatgtggaagtgtaaagagtggagaattaatttaaagggaattggacaattaaaatggaatgggaagattgggggaaaatcacaattatcccggggaacccaaattcgggaaaagccctattttcggcccggcacgagccctttctggtagccccggatggttgcaaattgcaaccttttcatcgtctctctgaggatccgcatttcttccgttttcgccccaatttttttttctccccataattcccatttttctctccctcttctcttccatttctctctctcctcttctccttccgtcttcgtccattttctccctgtttttctctgctaattcaattccccccgatttctccccgccattcccccccccccccccacttttccctccgtcttctgtccacattggcctctgctcttctgtcctacagtgcgctcgaacgaacagccaagctttgtcctttgccccccccccccgattttccccgtttctccttctcttccgttcgctttcccatcagctcgctgcgagttttacagcgtttgtctcttccgccgagctcttctcctccttctcccttccctacggcgctgttggtcctgctcttagctctgctgacacttcccttttgtcctttgcccccccccccctcgatcgttcgcgtccactgtcactcggccatatctctccgcttcatcgccattaaattgttgcgttagcgccagccgaagcgaaagtgactgcccttccccattttccttgctcatctcatttacaattccgttcggatgtgattccccccccccccttaggcaattgaataataatcggaatttggaatttctttgaaattttcaacccctctcttttagccaattttgaaaattcaaattctcttccctctcgcctccaccaagaattctgtgccgtgccgaaaattgccgaagaaacgccaccagcacccccagactccgatcacctcagccaacccgttccaccaaatcggaagcattgtttgccccgatcactttggcctgtccgcccaccagtccttgaatttgcctgcccacgacgagtagctgccgtttctcgtcttgttcttccctggttagatttcaactttggggcgaattttacccaaatttcgcactcaattaaattttcatggtccggtgtccctgccccccccccttttccaactctgattaatctcaccaaaccgaaatttggcccacctttcgaactcattagttttctccctgttcaatttctcttctccttttgtgttagcataaattcgatgatcaaaaattcggtcccaaaatgagactgatcaataatagccaattctgaattagcggtttgatcacataaattcgcttaacacattttcagccaattttttttttctctttctctgaaatcattgccattttctttaatcatattaaatgcaaagtcagatcgccaattgatatcttaatcaaaactgaacaaaacaatttgtgacaaatgcctgagctgatttaggacaatttcaaaacaacgacatttcgatttgatttatccaaaacaacaaaatttgatcccagaaattcactgacacacttttgagcaaaaacattcatattactgacattttgttcgaacacatcgagtcaaattttgttcacataaactcaattatacacattctgtctatcttttacaatcaaactgaacaaaaagaatttatgataatgtcttatttattctaacacattttctttaaatttctcnaattattggcattgtgaaaattcaatcagatcacaaattcgattataccta

SEQ ID NO: 14078 - DNA, 1015 bp, Heterodera glycines
caacccttttaaaattgtttgttagtgcgctgcaactgttacagtttacggcatgtccaagaaaggcaaacagataaatgctctgccgaaaaagcatttaccgtatccccgcttcaaccatttccactacagcccgcccctaccgtaccatcaattctatttgtccgtccgccagtgaagcgccaccctgggaccggtctgtcaaaatgaccatccgcgttttgtcgtcctgtacataaattcggctaaattttggggaaggttttaaaaaaaaaattaattaggtaattaaattttgcctgttcactgggtaataattggctgccaccggttcggtgccctcaaagaatgacgaatcattgcggctgaaattcaaattttactagtacatttcataaaagtgccattccccacaaattttcaaaaatcatgaaaatttttaaaattaaaaaaataaagaatatttaattaatggaatactttaaaacgaaaagactcagatttagattttgaagaaatatatcaagcaaaattcccaaatattaaaaaatttaaaaaaagttcttcgattcaaagtcttaggatttcttttttgtcaaaaatttttccattaaaattctttgaaaaaattaaattttttcgaattaattaatacatttctttaaatattttttatatttaaaaatttataatggcaaatttaagaaacacgtcaaaactaaaatttctctacttcattaaatactcaaataataaatttatttgtttatttaattaattcaaattatttcaagaaacgataaaatcatttaattaatgagctaattgttttctcaccgtcttttcatcatttgccgtccgtttgaatcagtccaaaaaattccttcagagtttagttcgctcattgtgtaacgtgtgatcacttctattgttttaggtcactaaattaagaccaaaataacataaattagcccaattttaatatcaaattcattaattcattaattagtccacc

SEQ ID NO: 14079 - DNA, 1223 bp, Heterodera glycines
taaaatcaaaaaaaaaaaaccgaaaaccaaaaaaaaacggctgggaagaaaaaaacctttccaattttgcgtctaggttataactgctaaaggcaggattgtccacaattggttcattgcctggagaatgaattaattaagcattttctatttttcgacagaattaaaaatctaattaattaattagttgattaacaatgaattatcttttttcgatttttcggtggaattaaaaaatcaaaatgattaattccccatttttattatataaagtatctttgcttaaacggtatatttctaaccacataaggcatcaaaacataatccgtcaggtgccgctaaaaattcaaaaatttttttgctacagtaattagtctttttgtttaccgtaagtcccgcgcaaaaagccgccggtgagaatatttgtttctaaaaatgcgaaaattacagaaatttgtttattttattttttttttgtactgatgtcatcggaaacattccaaatcatttccagcgctttttgttctgcacgtttttcctgaaaaaaagagaaaaaaaaaacaggtgtaaaaggaggagagtggaaaagaggtgagcgcaaccaaaaaatagtacaatgtgatattggagataagcggaagagaaagagagataaatgagagagtgaagcaaaaggaaggaaaacacgtaagaaaaattgaaaaatttcatctgctctttttatgtgtttttttaccaattcaatgtagtgcatacgtgaaaagaacagtgcttcatagccaatctgaacagtccattttaaatttttaaataaaacaaaaaaagttttaaatacaaaattagcactggaaaaatttagagaatcaaaaaattaaaaaaaaaaatttttttttcaattaaaatttacaaccaggaaaaaatttgaggctcttatgcattattgtatataagttaatcaattattttattaaatatttaaactatgtttctcgaccattgcggccaaattggcatgttccctgctgtggccaaatggatcaatttgccaggccactttggcgtgtccgcaatcgccttaataattaattaggcaacaatatattaccaattttataacaaaattttggcatatattcatataattgaatctctctcgagcagttttatcaattaccatagctggcattgagtaagtcgagtccaatggtgtactgatccatgat

SEQ ID NO: 14080 - DNA, 1343 bp, Heterodera glycines
agacaccgaatataaaagcttatttttctatacaccctataaataggaagattttgattatccatgttgccatatttacactatatttttatcacctgtgaatttttaacatttgattgatttatttttattcattttttattacggtattcattttgtattttttatttgaccaactttatttcttgttttctttttggcaccatataagagcactcatgtgcctttggtttgctcgataaattaaattaaaattaaaattaaattaaaacaaaacgaaaaatctaaatctttcataaatgcatgcaaaaaagacaaataaaatttttatagttctccatttttctcttatcacgaattaatcttgctaaaaattatagtgttaaaaattaacaattattcagatgatccgagaacaatgtcaaaaaagagcgagcattaaatgttatctcatttggtggcttttttggggttatacattttccttaaaattccaatcattttttaatgtaatttagattatcaattcttttttttgaacaatgggattattttcattaaatggcaaagtctcgccacttcttacttgatgaactgcctaatttttgtccttttgtatgtgtttttttaatcattgccttaatttgttcgtctttatattttagggttgtacgagaatcatttttattacataattttaactagaataactttttttgttttaaataatttgaataaaagttttcaatattgtttccgtatttttaatagtatttcataaaatgaatgttaaattttaatttatttaatattgaatgattcttttatatcgagataagttttctgttttttcattaacacttctttctaataatttaaacctttctttaataattaataaattcttcaattgctctctattttaaaaatgcttaattatacatttttcatgttcatataacggaaaacaaccattatcttgaactttgcacattggctataaatgaatgccttaattttcgatagaattaatttttattaagttttgttaaaatttattgtaagagcggaaaataaatttgcttcttcttataaagatatgattgaggtctttattcgttagaagtttgaatccatttataattaatataatctacaggtatattttattaataatatttatgtatatttattattattgttcactaattctttattctttaattaattttaatattcaagtattctagtttaaaaagtatattgatattttaacatgtaagatttaacttttgtaaaaagcacatttttttcttgcctttgttattttaaaaattactcat

SEQ ID NO: 14081 - DNA, 1435 bp, Heterodera glycines
tcctggtctggatacaaaacgcctgaatttgaagatgctggctttattttaaattcaatcatcggtgtgtttttttttgataaacttatatttcagtttcaactttgttaatccaatgaatggtacgcacactcaaacagtggaaagaatgtggggaagtgcaaaatggcgaaataacaagcaaagaggcaccgcgcgtcatcatttggagagctattttgccgaattcatgtagagaaggatgatcggtgacggagatgtattcgaagaattgatatgagcctgttcgaagtattggcctctcgagtgattctttaatgtgtctaataaataatttattcttttcgtgccatacataatcactttataaaaattgaagcgattttgtgtataaaatgtgaattttgtaaaaaatggattttgaattttttgttcgaatctggtttcggggctcgaatgggttaaaaccgatgccaaaatcggtttccctgactctgaaaatccctaaaaacaagtttttatcaaaaatttttttgaaatctggatccagataaccgtaaagtaccaaattttaattctttaaaaatattactataatttcttacattaataattattattaatatcttaagattttacagtatgctgcaaatcgcaacagtggtaaaggtactgcaaaagaattgtttattctcaagaaattataattcacttttaaatttcactgatttatgcccaaaatactgaatacatttatatttgcacattaaaaaaatcgtttgttaaattatttattttcatattcacacgtgattcgctgctatctggtctgaaccagggaaactatacatttttttgatgattggactgacaattataatcaacaatatgagttttatgaacgtgagttgatattaggaaataaaagataaaattattttccaatataataccgaaaaagtaaaataaataaaaaataatgtatacaagtatgtattttaataaaataaaaaataaaacatataatttttaatgatcaaaacgataattatttcctaataaattaaaatggttacaagcaggaaataaaattttcgatatttttttcctactaatgggcgctttaaaaatagaatttttgacatttcaaagcatgaaattgataaaaataaaagctaaaacaatgtttaaataaaaaatgaatgtttattgtaatgttttgtaaactattaattatttgataattaatataaattttaaaaataactataaaaaactaaatataactatttcgttagtgaagagcagagtaattgatttgcgatcgaagctgttcgtcgtaaagtaataattaataacaattaaaaaaattatttcgaatgttctatcatgataaataaagaaattcaaaattaaatcttattttttaacttga

SEQ ID NO: 14082 - DNA, 2169 bp, Heterodera glycines
ttcgtataaaacgcgcatcttttatttccaagttttcaattttttgttgctaaatgcttaaataaatttcattttttaaaaaaaagttaccgtttcttgaattttttccaaatcaatattcgatatttgactttgtaataataggactccaactttttcaaaacaagttacatttgaaattttcccagtgccatccgataattgcattttaaataatattttttggtgtgtcgatgcatcacaataacagccattaaaaacactcctaccacattcccagcatcccttaatttttaatccattataattttaaaaaatccacaccttatatgtttgcatttttaaatcagatatatttgcatgcacagtgaaataatcactatctccttcattaaaagttttagcacacaatcctttaattgttgaaatgttggtcatgtttcctttaagcagacttttgtatacgataaatcccgaagtcatttttaaatagcttaaaatgttaaattaaatttattttttaaagtatttaaccgatcgaaaacaaaaattaaaattaaatgagtttaaataataaaatttatttgcttgccaatagggtttttatattttttagaacattttatgaaccgcaaagccatcccaagaaaaaaaaacacaagcaaactaaaaaagatgattaatataattattcctaaaacatgctctttaaatcggtcattccagaattcatagtcataacacattttatctttaaaaaaattaaaattaataaaattaaaatattgtacaacgaaaaacgttatttaagaaaatttaaaaaaggtttcaagttttattcaccaaaatccatagggaataatatcaaaattttcgtcgattattccttttttttgaacgggtttgtattctttcgtcattttttgggataatattttactgtctcgcgatggtccaaatttatcataattgaaatattttctcttttcgtctttataatttaaaatcattcctttaaagtcctcgtggtcgaagttattttttttgttaaaggttatccctaaatcattaattagtacatttttgattgtgataattacctctcattttagttttataccaaatttttccgtcaatttcattttcaaattttattgagtattgcttactaccaccagaaacgaattcgagaattttatttccattgttttcatgagacatttcgcttaaattaaaacaattaatgatttaaaaaactgtataccctaagtattctccaaaagcgatggggtttttacccttttggtgtttgtatattacactatctaaaacaaaaaaatagtattttcctattcattaatagtacctgtatctgagtataataaatgattatctttatccgatttaacagtttggagccatttatacaaaattattctcgcctgacttgtggtcctaggaaaacgtcataattaaatttttaaagaatgttataccatagtgcgattattatatttgacacgctgtgcggcctaacaaattcgttttgttctctgtatataacgcgtattgcgtcattattaagaattactggtttagataagacaattttatggtcaaataaaagttcaaaatactctgaaggttggcttattattttgtttttcgacaacttatttcgcattctaaaaacttttttgattttaactcaatatttaaacaaacccaaatttgccccaaagtgaattaagtaagagttttgcaatgtatctcataccggcgttcggtttaatgttgttctggtctaattttatgttaaaaattcgtttatattcggaaataaaatgttgtttttcttcatcattagtaagattagggggccatcccgatgagtcaacctatattaataaaattagacaaatttttccatattcatactttgagcttaagaaatttccgaacatatcttttaaatagatcagaatcaaattcttcgaaatgatatgccctaaatcgaaatgttaaatttgtttttaatattccttacctatagaatttatcgattttatatcccaattccatagcttgaaaataaaaattattacaattacatacatttactaacctaattttaattcattgctttgaaaaacccccatgaagccctct

SEQ ID NO: 14083 - DNA, 2165 bp, Heterodera glycines
  unsure (1)..(2165): unsure at all n locations
attattaagtgattactgggtttagataagacgatttcattttgagataaaagttcaaaatactctgaaggntggcttattattttgttttcgacaacttatttcgcattctaaaaattttttaattttaactctaaatttaaacaaacccaaatttgccccaaagtgaattaagtaagagttttgcaatgtatctcataccggcgttcggtttaatgttgttctggtctaattttatgttaaaaattcgtttatattcggaaataaaatgttgtttctcttcatcattagtaagattagggggccatcccgatgattctacctatattaataaaattagccaaatttttccgtattcatacttttagcttaagaaatttccgaacatatcctttaaatagatcagaatcaaattcttcgaaatgatatgccctaaatagaactgttaaatttgtttttaatattccttacctatagaatttatcaattttatatcctaattccatagcttgaaaataaaaattattaaaattacatacatttactaacctaattttaattcaatgcttgtaaaaaccccatgaagccctctttcagaatcagaatgattacattttttaacatttttcataaaaacaaagttagatttcgcccgttggcaacatttggaacaattggtgaagaataaaatggaatcataatggtacggtaatagcggtattgccaatttttttggaggaattgccctaacttttaacagtcctataaaatatttatatttttgtatacggttacggttaccatcataagggatgtcttcgggacattgccacagaacgtcttgagattttggtattattatttttggtgtcttaaccgggtacggtgtgaaataattaacctagaattaaaatttttaagagagtttaagctatattaccgatggatataatgagactatgtcggctatatttatttctctgttttcagaaatctttgaatataaacaaaatgcttgcgttcgcccacccgcaaaagcatcccgggggtcgattggtcataaatatttgttaaattgctttttgttttgactaccccacccttatctggaattgaatcgaaatatttcttcatttctatgtcataattttctttatcacgtggatttagctttcgtcggacctcacattcctaaaaaatattaatcgagaaatcattaacttgtactgacccatatttcctccacccgtattccaaaattattacataattttctaagcataaacattcggttttttgtccttacaaaattttcttctgcagttttaccattgagcccaatttgaaaaggtttgaaacattttttacatccttaatatcatatttacaaagattttgatataacaaaccgtgaaaaacacatccctaaaattatcatttttttagttaacatatatttataacctgaaattcgattatggttttgaatttcccgcaaataaaatcaactttgaagtcttaattttaaaattaatgaatgattttcattactaagacctcctattttaatctcgcccccgttagctgcgtgtctccctttaacacaatgtttatgcatataatattcaaaatattttattgctatcatgctttggttattttgtttttcaaagcccccctcagggactatagctaggtgtttttcctttaaaaatttggctctgtaaatttttatcgccgctcctgcgattgtcgtactgtccttaatttggcataaatggtaactcaaaatgtaaattaccttaaaaacatcataaccgttaggggtttccgagtcttttgttatttcaataaaaatttttcgcatactcagtatcgattttaataaaatttctgtatcctgtccacaataaatttgtaattgttcctcctctaaattaaaatttttttaaaaggtcgctcatttttatagtacctaacaaaaagggttttttttttgtttttttggtaccattctttgaatttttcaaattcgtcatctttcatgctttcaggacaataatcatccatagggggaagggtcgggagtaatttacctaaataaattgtatcaaaattataatcacaaaatttaccgtaatttctttctgaatccgtattatgag

SEQ ID NO: 14084 - DNA, 1354 bp, Heterodera glycines
ttcctgtttgagttcatactttttattttcagaacattgtgctcagtccgaccatctccaagcagttgatcttcagcgccggtcggctcgcttttggccaatccatcgacgtcatttgcagcaaaaacaaattctcttacactgtggtcagtcagtctgtcgctgatccttgctctgatcagtctgatcatttgcttaaggtcagctcaaaggttttctgcgaagcttccaatggaccggtcacctgttttgcctttctccagccataaattgttgctaattgggcagttaattagctttgggcaaccaatcaatcgatagttttcccttttcgctgccttatttttaagtgtctttagcagagtcctttccgttctccctcctgtgataaatgtaaaaatggtcgagaattgttaccaaagttttacggtttgaattctcatcaattttatgcctaatcatactttgtcctttttgttttgatcacttttggtcattttttcgtttttttattttatttatttttttgtcattttatttttctttccttttttatattatttataaaataaacaaaaaaatgtcttctctctttcattttctccttctccgtcccgcacaatttttcgtcgtgcaccaaaagaaccatccgtgttgtgtcttcagttgggaagggaattaaaagcattgatcagcttagggagaagcagcgatcgctattttgttatcattcgatcaaggtgcttactgactgatcactgcattggtcctaatttattagcttatcccattatttgccactacatggttggttgatcccttagtagtccattgatccgcctgatcactcattgcaccacttatcacctgcatcggcacgttgcgcatcccctggcggccgcttgagtccacgtacatttggttgtgcggcgacgcatccgcccaattctcacgtcgccacgggttaagaccccattggtagtttgaggggggcacatatgccggttcgggggcggggggattagtggcagcaaattgggcacggataaaagccaacagagagaggaaaagaaggacgaaaagcattctgagagcgaatgaaatcaattgacaatttggaacaaatgaacgaacaaaacgaaattcaaaaattaaaggaacagcgatcatcaaatggatgagaaaagtgatcagaaggagcagtgattgggatgagtggaatggaggaggagatatgcgacatttatgtggcaaatatgcaataaatcagctgctttttcgggcaacaaatgccgatggaacatgttttaatgcaccaagccgaaaaaataatgtcggagtgaagtggacagcc

SEQ ID NO: 14085 - DNA, 1910 bp, Heterodera glycines
  unsure (1)..(1910): unsure at all n locations
ttcagctgcatgtaatcagggtggaagctatgtttcagcgtgaccagctcgtcccatttgcccatcagatggacanaggcactttcggctntctgcgcatttttggtgactccgtcccaaatgccttaaggggaaatgaatgaatggccaatcatttggcaaattgccaatccctttttcttctcccggtcttccgctgtcttctcacctcttcaatagttcgcagtatctttctcgctgcgttctgatcacttcgtgtgcctccaatgggtccgcctgggggcagaaaaggatcatcgcctgcagcgttagcatcaccgtccgatcggtgcgccactgctcgtcgaatgttagcagaaatcagaaagtacaatactgaattagttcgattcgtaaactcattttatgccttttgtgctcctgatagtgccgttccgtggctggcaatacgttcaaattgagcatgaacggtaacggcccgcccgagccgctgccgacgagcattgcgtggcgccacacttcgttgaccgggtcgaaagccatggcaccacgaagtatcagcagttggacgagtccggcacggagcaaagtgatctgatcggactgtggcagagcacggaaggtgcccaactgtttgcacatggccaccatccgtcgcatggccaattcgcagacgcgcaacgcgtctatgagggttctgctgatgggacaaaatttaatacaaaaataatagatttaaagttgattttgagttagtaaagcttctttatcaaataatgccaaggtttttttgcactataaagtgattgtgattgctcacagattgaagggaatcgtttgttggtttggcacgcgaaggggcgcatccaaaacgtcgttggcacggaccaattccttggaaatgatcagaaaaaaaacgtaagagccaaacattgagaagggtttgctgcgcatcttcgacgagaggacaatcggcaaaagtttgggaggaaaagccaaaaacggcggcggaaggacggcactctgagaagggcacaaattaatttgtcaagtcaacatttgtttaggggtgggaaaattaggcaatttggccgttttggtcgtccccactcttcaatcttttcttgtccccttttatggcaccttttgccacttttggcatttccttctccgtctgtgtgcctttctcctccgtttgttttcccttccaacttttacacttgcaacaattccctttcccttctcttccttttttcttcccattgactttctcttcaatgtttctttctcttccattttcaatttccgtcgtcttttttctcattttcttccacacatccaccaactcttggcgcattccgttctgaatgtaaaaaatggcactttaaatccggtgatgctaaggttaaattgtgcccgattgattgcccattgcttttccctttctccttttgtccgcttcgcttttctttggcctttccgcttttccgcttacccttacgcatttggccaagcggcacgcctggcacgccctccgggatgcttttgtgattcgacaatggccattaaaagggcattcgagagactgcgaacggacggagcagcggcggaagaacgccttgcacgactcgcagctgagacagccgaagttaacgccacagccggcggaatcaccgcaaatctaagcgaaaggcaatggagaaaaaggaaaagcggacaaatgagaacagccgatcggaaagtaagcaaaatgatagagggctaaacagattgatcaccgatacatttcaatttgaaaaggcccaataaaaaaattaacaacagagggaagggtagggatggattctgctgaatgatcagcgattgctttggttcgggctttttttcctttggtggcaccttgcagcagt

SEQ ID NO: 14086 - DNA, 1026 bp, Heterodera glycines
  unsure (1)..(1026): unsure at all n locations
tcactaaaatacaccattaagaattagaaaattttataaccacgttcttccccaaaattttttttcttgacaaaattttttttgttttaaaaaatgttaatatttgctaatttgtaagaattttataaaggaatgtacctcattggcaactgcattagtgaaaaaaaattatttttgctcaattttttgctgaaaattatgtgatttaaatgttttgcacaatttcaagaaatttaaaaaaatatatcggaattttttgagagaaaatcacccaaatccatgaaattataagtcattagtttaaataggcaaaaatagagggcaatagtaatctgatttcaagcctcttagatcatttttcagccctgggttgacggagcattaattagttttgcataatttgatataaccatgaacaattaggactctattaaaactctaattgtaagctaaccataccatcataatttaaagtaaaaaatttttgaaactttttttccctttttcttcaagctccctatttccccacggtcccgagctgctcaactcataagtgacgtgaacattgtgatttttgaacttttttgacattttggctacggaaattttaattattttaaaataaaatataaatatatttattaaaacaatcaataacgtaaaatagatggccaattgttataagaaaactataatgaaaaaagatgtgactaaaatattattgtgaatcaatattcataactatttataaaaaaattatagaaaaaaaagaaagaaatattgtataaggagaaggaaaagaaaaagagtatttttatagagagcaatatgcatatgtatgtgtatattcatgcattaacatattcataggcttctacgcatttaaaatgcatatgcataaatttttcattgctaaggcctaattcacgtcagcataatgcccatgccacataatccacgtncattaatgtcaaacaatgaatgatgnactgcataaatagggcctgggccccagcaaaaattatc

SEQ ID NO: 14087 - DNA, 3935 bp, Heterodera glycines
  unsure (1)..(3935): unsure at all n locations
ttaaatgactcaaaaataaaaaaaattctaagaaanagttggatgctnncaataggcagattcattaggcacttattaccaattatgtaggatcattaaaggcattttccttggctgaattatccctttttatccaatttatttatttatgaaaatttccttattttttgagaaaatgatggaacgcttctccgcttcatttttttgctgcttatttctcccactttttctctcaacatttgaacttggcactgctgtgacaagtaaatattaattgaatgaaagaatgaaatgtacatcaaattgaacaaattgataagtgaaactaaactaatatatgagcaaattaaatctgacactaatcctgtggataaaaaaaagaagataggggaaatttgtaaaataacacaagcattttgcaccgatgtaaatgacgataattgcttatattcaccaaacattttaaaaaatgtgaaagaaatcgaaacaagcattatcatgctgaaaagcaataacaccaaagtgtttaaagattgtaaggaccttcaaaaacttattgaagtcattgagaaacaaaatgggtctaaagactaaacaaacggttagtcatcaataattttaaaatttattcaattcttaaaaattgatgaatacccgaatttagaaacaacaacaaaaggacttgaagaacagaaaatctgtgatgtgtggacgtacagttttattgtagaagattgtttctttcatttctgtctctttttctttcctcttttattggctttcatatttttaaatgttatttttcgcttattttttgggagtagaaaaacgtaaattttgttgcattcatttatctaattagtatgactctcatttaaaaatactttggtagccaaacgagttagaattattataataaaattatcattggaattaaattaattatatgtaagaaaaaaagagagagagaaattgcgacacatatgagaaaattaccgtaaaaaaaattaaagtataattttgcattttgttaaaaatatataaattaatttttattttctgagttggattaatcctttctgctaatatttacttagtttaaaatttccgaatccaaaaaatgttttaaacattttaaagaaattgttttattggggtgtaaaacaagtctttgcatagtgcccaaaaaatacatgttaaaattcataacaattcaagtaataaaataaacttaatcaaactttgccagattattcccttatattagccccagctttacgctctttgagtagtgttttcactttgacttcaaaaaattatggtcccgtaaattggccgaggtcttgcaaaaaccactcacatttcaggaggcattgctcagcccctatttttttatttgaataacaaatattttttagaagaataatttagggcgaaaagaaatttcataagtaatttttttcattttttattggacgctgttttctaaattggccccagagagatttttgagaaagggggctttttcagaatttctttcctattgtttcaaaaattttcaaaaattcggtgtatgtaaagcttaagtctgatcataacaataacatgaaattttgggaatcggtctcctattgaaaaagttatgccacccaaacactttttggagcttgctgaatcaacaatttatgatgctcgtggaaattttgaatgggccatgagataaataacaaatagcccttacaaaatatacataattggttttttaatttggctgagtctcggaaagaaaattcattaaaaaatttcgaaaaaattgcattattggaggttgaatttaaaaaatcataaaagttcacaaactcaaaataaaaatcataaataatgcttattaaaaagcccatagttttctccttagaataacatatccaaattaataataatttgtttgaccgatttttaaaaaatccataaacaaatcaattcacagctatgcaaagacttattttacaccccaataactcacggaattgaatctaataatcgtttggttgttttgatgtggtggtgacactttatctgctctaaattttaattttcctcaattgccataaataggcttctgagtctgtcttggtcttgtcaatcgtgctttatccggggtacaaaatcaacacttatttgctcaatcgagaccaaggtttttttatctaacgttgggattggtaattaatttaggtcgggatgattattctaaatcaggacccatcaataatatggctggctacacgacatttggggatttgtaactttggggcctcgacttttggtgatcccgacatttggggacctgacacttagggattcctacattttggccacgacttttggggacccgttgaatgaaaaacaaaaaattttttcaacatttggatattcaggcccaaaacaaggcaaaattacatctgcttttgcccacacaattctaaaaaacgagagatgaaaccaataaatagaaagtcagaaaaaatgacatttactttcctattttcttgtgcatttattgttgatgggtataaattgggtttaaatgttaggcaaattttattttttatttttttttaattagtataattaaagaaaaattttctcaacagttaaaatatatatattattcctgttttgtgattttttgacgcattttgagaatttggttgaattaaaaaatttaaaagaataataaaaataatttttaatttaaagcttctagacccatcgaaatttataatacgaatttttacaatttaaatgttttctacctattaccaagatacaatttttgtacctatttcggcatttttttttatcattttttatgattttcagaacattataagttaataaatattaattatttggtttagagcttccaggtactaatttataaaacctattttaacaattattctggtgcccaaagttcatgtcgccccgggcgaaaacgtaccccacgcaaaatggtcactcgaaaacgagacagaccccgaccatattttttcggttttttgacaatctgtcaaacaaatttttaaatgataaaaaaaagagaaaaaattggacagatcccatgttctccaacaatagcacactaaaaagcatatcacatagcaacaactcttcttctgctgctgcaccttcaaaagttggccaaattaagcattttcaattttgtcctcaatcatttgttgaagatttgccaaatcctcaaccacttggtaattgtgcatttttagctctgtgatgttttgttcaatttgtttgatgccgttctcaatgttatcggttttgatgtcaaattctcccaaaatttctcgaaaaatattgcaaaaattttttgtttttgcaaaaatttcttgcaaaatttgtttttttaatgccaccggattatcatttgttgctggtcgaacatcttttaggtttttgattttgcttttcaattcttcaagattttccaacacattggttaattttggattggtgccaagattagagttttctccaatcacttctttaagctttgcaaaatcttcaaacaatttgggatcattgcttttcagttttggaatgctttcttcgatcactttcagttgatcaaaaatttcgtaaacagaaaatatgtttttgttgtcttttatactgttttgtacgtatgtgcaatattcttgagttttttggcaaatttcgtctaagttagcctttttagcctcagggtttgtttgtgcgtcaatttcaccaaaaagttctttgcttcctttctctaagactttcaatttgaacaaaagttgatccgataatttgatatttttagcagcattgcaaagttcaaatgtgagagaaaaagtgggagaaataagcagcaaaaaaatgaagcggagaag

SEQ ID NO: 14088 - DNA, 1727 bp, Heterodera glycines
tgtgtaaagccacgctttcttgtggagcagggcgaattccaactgagctcagcaatggaagcgactaaagctgtttatcggcatttattcttatggggaaatggaaacagattaaaaacagaggtaaaattattttaaaaatttggtaaaaaaaaatttatttacggttaaatttgataaggacattctcgtgttgcttttgcatttggtcgtcatttttgttgccatttgcagccccaaaataacaatttccttaaaagctatattttatcgcatttttatttgaaattaaaaaaaacccaccataatcatagacaaactcggcatttttagcgcaatgctccagtttacaaaaagcttaaaaacaaaaggattaagaaatattttcacttttttggtttatatggaagaattattcaattaaatatgtttgcctcagatggcaaactaaaagaatcaatgaatttttcattatttttatggggaatcagggctgtatctaaggccgaaaaaagcccatatcccgattacctttgtggcacacaactgaattgacctcctaaatttaaaagtttactaggtaaaattatttatgaaaaatagctataaaaatgccataaaaattattaatttattgtattaatttattttatttttatctttgttttctgctatgacatttggcttaaagatgatatttatctgcttattctgatgacactggtaatcacagaaaaggccattaccacaattattcatttctcatttaacattctctgctgcagtttgggagaaaattcatttacataatttggtgcaaaaatgacataatgcaagagaacattgaaggaattttgaaaaataatattaaaaataaagacaaaaatgtttttaaataataaaaataaggacaattaaaaggtttaaagagtttaagcctcggcagcccatgcgggtgtcaagaatctcggagattgcgaatttcggggatggaatcagattagcggtcgaacccgtcaattttcttagggaaccgaccgagccaaatatgatgtacccacaatttgttagtaaatttattttttaggcagttcatcgaaaattaattttaaaaaattaattcaaattaaatttttcgaataaaaaaaataattttaaattttaaattgatcaaagggcggcttcactaataaagcttcattaactctcattatccatctcaacaaataccttttctcccttttgatcaatgcaatgagcgatcaattaacaaagtcatcacaaaaatgggattccttttaaggagattaattccatcttaatgtgatctagtttttttccattcattcatttctgttttttgttcactcatttatttgtttttgttcacaacacttggtcggagtccttactccccagtgtgttctttcattcatttctgttgatttttcactatttaaatttttttatattcgtttgttcatttctgttaacacttggtcggagtccttactccccagtgctttcatttttctattttttgttcactcatttattttttttgttcacaccacttggtcggagtccttactccccagtggtgtgtttcaataaattttttaataaaatttctcaaatttttacagcacaattatatactgttagttagataggtaggtcttgcacaaaagggccacctcaacgtggtgtgcaagtctagtacccaa

SEQ ID NO: 14089 - DNA, 864 bp, Heterodera glycines
acaacaataacaccaaaacaccaattgttgttgttgttggagaagctaacggcccgtagggaaaaagcattctctgttgttcattatacttaaaaaaataagagaaaaaattttaaattttagcataaagaaaataatgtctaccccctattcccttcctaaaatacctaaaaaaagtctacaaatgaacggatgcatgtatcgcctcttgacaaagtgccaaaaccacaaatgccaccaccagcaccaaaaaaatcaatttggagagttgagcaaaatcctcaacgcccgccttcacctcctccgcaaatgactccaagaagtgatgagcgtcagcaatttttgttgaatgaaggcccaaatattacaacgccgccaaatacatattgtaaaacaaaaaatatgtacagatgcttcaactgcttatttttgtatctaaaggtcatgcgtggcgtagtgtgtcttccgcacatatgcagtcgattgaagggaatgagcatttatcatactggatacaaacgaacccgccgcaatcaacatcatatgattatggaacacacgatgatgtttctactgccgaaatagatttggaacagcaacaaccatgtgaaaaaataagcgtactgcgacatttgcggatattcccgacatttgaggacatacacaatttcaaaaaataaactaaaaccttaatttatattattataaaaaagaaaaggccttttccaagtgccaacgagagtgaaataaatctattcgttaattgaagtatcgttttcacaaccttatgggtagatctgggattttaggtttttataggcaggcagttgcttaatttgaaaagttagataattcaaagattat

SEQ ID NO: 14090 - DNA, 1299 bp, Heterodera glycines
gctcgaggacgctgtgcccttcgagcgacacgccgacctttctcgacagtccagcgtatccaactcgagatcagcctctcacatggacttagccacgagcaacgacggaattggcggtggctgcgtgggaacaagcggaagtgcaagcggaactttggaacgacgccggtcgagaaggtcggccacattggcagacaacgagcgcatccgagtgaccatcaactgcatttaccatatggtggggtgacattttttgctgctgataatgaattttttttcccacgctttgttaaggttgaagcaatccgtcgcgaggatgttttacagatggtcgaggacttttctcagtcggaaatgcctttttcatcaaaacattccccgctgtcgtttcattcattgcatcaacaatttttgactgaacttggtccaaatcgcatttgatttaattcaatcccccttttcagaagaaccaatggaaaacaaagagtctctgttggtccatctctttgaaatgatgccctcttttgtccgcgggaagacgccccatttcccaataaaaaaggtttatctgtttgttttaatttactttttgattgttcagattctgctgctttcatggaaagtgttgcttgcgactctcggcggcaccgattttctccgcaaagaaaaggcgagaaagcgtgccgaggctggcctttcaccagtgacagacaccgttcaagtggccatgaagatgaaacctttgctcagttgcgacggttctgttgggactggcgctttgcttggtctgaactcggcgagtggtggcgatgggaaggccgagacggactcaggaagtaaaatagtaaaaacataaagaagacaatactaaaacaattatattttataactagcaattaccggacaacttgggcgtaaggtccgctccattcaccacccaatccgtccgttcaatcgccaagttgcctgctcctccaattccgaacaaagttcctttcctttaagtcagccttttgatttgttttcaattagctacagcacacgatgaacccaaccgtcgcgaagaaagcaataaaacctttccggttgacaaaaaaggcgaaggaggagaagcattcggaggaatgtcagaagaaaccaaacaaattgcggaggaagtcgacgaggcgatcgttggaggacggaatcaggaaaatgaggtcagaccgtaaagaggagaccttttggcgaggggaggaggggggggggggggttctcaagctcataattttgggattgtaatgttcgactttcactact

SEQ ID NO: 14091 - DNA, 1083 bp, Heterodera glycines
cagacatgaatctttttgcagcccaacggtaaatagacaaattaaaaatatatttgtatgtcttaatttttagcaaaaaacacttccatttccaattgccccccggcgattccaccaccgtttttgctttgcccgagcccattgtcaggggcagtttgcccgcgttgcgtcgcaatctttatgttccgctcaccgagcttcaggttgaattatcgggaattttcttaccctttttgaatgtttcacttccagctcgaatctgaagaccgatataaccgatttccattctcgcaaaaggaattcattgaagattgtccggcagaacgactttacgtccgaatccttcccgaaatgactgaatatgtaattgccctgctcaaagtcattctcgcttcgttgccttcctccaaagttctttttgctaattttttgcattgaattcttagacattctaaaatatactcatttaaggcgaaaatcgatgctgtcacaattctatccgatgtgctgacacccgaaactgacacaaatgagtaaataaagagccatttattcccttttgggacccttactccgattccctaattatttagagtcctttctaattcgatcagtttggaccttgccagtttttcacacacaaatgtattggaagaaactgtccgagtcgcaattgacataaatcgacacaaagaagttgggcttggtttagtaaattttgattattcatgcactctcttcagctgatcatcaaatcggcttcgtcccttctcattcttttgctgaaacacttacgtttgaaccacacactccaatttgaaaacttggcccgttatctcgtcttggccaattgtcttccgctggtgcttaagtttcttgaccagaatatttgtcgatacttccaagcaaagcacgagttggccccgttcaactatcctcagtgtgcactgttttttgtgaggaatggatgtgagtgggtgagaagagggcaggcaccaataaataaataaatgaccaagtgatgtccaacccgaaacacgcccaatcattcggcagtggcagttacgaggggggggggggggg

SEQ ID NO: 14092 - DNA, 1447 bp, Heterodera glycines
ttattagctgcaatttctgttttatcatatttggttagaattccgaaacgggtcagggtaccacagaatggctacatggttttatgaaaaatgttctataacagaataattttcctgactctgacaattgtaatgtcttcagatgaatggcctcaattaactgcggaaaatgtcgacggttgcggtggttccagcgactcgccttcgtattttctgtggcgcaatgtcttttcctccatcaatttgcttcgtgtgattaacaaactcacaaagggaaaacagtcgcgtacccaaatgttggtcgtttacaagtcggcgcccgtgttgaagcgatgtatgcgggcgaagctggtaagaaaagcggtcaatggccatgaactgagacgcatggattaatgacgtgggtggggggactttaccggtgctctttattcgagtaaaatataatgttacttttttacacttcatagggaatcttccaactgtacgtgttgaagctgctgaagatgcaagcccgctatttgggtcgacagtggcgcaagacgaacatggatttgatttcgggcatttacttacgcgtccgtcatcggcttaacgacgactgggccttcgccaatgaagtgatgcgaacgaaatctattgactcgcagcaagaagagaacgaattgggcctggccatcagacggtttaacgcacggcgttatccgtacatttacagagacggaggtgggcagacagagacttacagtggtaaaagtgaagcatactgactgacatccacgaattatattcaattgacatttattactctgtaataaatgaatccgaaaaattttttgtggcaatcactctgaaacgagttattagatagaccctttcgaacgttgtttttcattttcccttccggtagagaaattttttagctaacaaataagggaaaatttcacaatacgcaattttcagaatcccatgttggagtggcaagggaaggcgaagaacaacatcagcagcatgagagagtgttttcttcagtgactgacgcggtcaaattgggttttgtggacgaatgggagcctaaggaatgggagccgactgacaatgtgtggttcagtttagctggctaacatttgtggtcactttcattcatttctctttgagtctcttcaatccgcgttggcctgggaaccgcaattcagcgaacggttcacacaaaactacgagcaatggttggaggaagaagtgtacggtcagcagacggattgggactcactgctgcgcaactccaggggactgttggacatttactgctgattcgatagaacagatgatggttgagtctttttaacaattccacaaaataaattattgttttctgtattatttttagtttttttttaataaaaacacaatgaattcaagaggagcaaattcctgtttttgcgattat

SEQ ID NO: 14093 - DNA, 4866 bp, Heterodera glycines
  unsure (1)..(4866): unsure at all n locations
tttttccaatatttaattggtgtttcagacggtaaatcaagtggtcatctctgactatgctcaaatggaccgtgcgctgaaggaagaacgaaattacattttggagctgtgcaagcaaatcaaaaaggccgggtgcaatgtgttgctcatccaaaagtccattttacggtaagcggtgacgaactgtttgactcgttttccgacatggtttcctttttaacgtgatcctctttagcgatgccatcaacgaaatggcgctgcactttttcgcaaaaatgaaaattatggtgatcaaagacatcgagcgggatgacatcgaattctatgccaaaatcctcgggtgtcgcccggtggcatccgttgaccattttgtgccggaatcgctcggaacggccgatttggtggaggaaattgagacggctgatgggaaagtcctcaaagtcagtggagttttactctctcctttttggctattttgtaaccattttcaggtgaccggccttaaacagagtgggtgcgctgtgtccattttggttcgcggctccagcaaattggtgttggacgaagccgagcgctctctgcacgacgcattgtgcgtcattcgctgtttggtgaagaaacgcgcccttctttccggtaaaaaaaaaactttgttccagtttcgaccatcacttgtgcttctctcccacaggcggcggtgcccccgaaatggaagtgtccgtccgcgtccgcgcagctgctcagacaanacacggagccgaacagtattgctggaaggcatttgcggacgcactcgaagtggtgccatacactttggcagaaaacgctggactgtcgcccattgaaacagtgacggagatgcgcagtcagcacgcaatgggaaacaaagagcacggagtgaatgtgcgaatggtgagcaagcggaatgggagaaggggcggacaccccacaccttttcagtttatttattaatgaactgtctgttgcccaaattatggttttctcattattatgacatgtttgagtcctttcagggtgcaattacggacattcgcgaagaaaatgtggtgcagcctcttttggtcagttcgttcgccgtcaaacaggcagccgaatgtgtgcgcagcattctcaaaatcgacgacattgtgagtcttacccaggccatgtctcccattcattctctttccaattttaggttctgtcagtgcgttaaatgtgacggagaaaggcaataagaaattgttatgcaaccatttaataatgttatgacgttcattgcgtaaatcgctttttacttttaaatatttgtccaacaaaagtttaaacaaaatgatttgttatatttttttctttaatacaaaagtgcattttaaacgatgatacagcagacactgctcaaaatacaatgaaaactgctcttgagttggcaaaaaaaattgtttgtggtgtatttattgcacacgtttttcgccaaaaagttggccgaattcttacgggagtaggtccgccgaatatttaaaaattattttggtttttgaatttaaggtgattccatgctgccgactatccacgatggcgacattctatgggctcgagtttgggatccgaacgatgctttacgaccgggggacgtcgtgtgtttagttgaccctctcgatgcagaagagtaagggaacaattctataatattccgttcgtgcctcgaaatccatcctttccataggtatgtcataaaacgcatttccgctgtccacaaagactgcatagaagttcgcggcgacaatgcgaaaaagtcgttggactcgcgcaaatatggccccgtgccggctggacttgtccgctaccgcgtgtctttgcgactcctccccttaaatcgttgaacattgcgaaaaccaaagtgatcaaaagctaaccaaaaacactaattgactcggtcgctttgcctaattatttgctgtccccaaaaggccttcggttggctccgttcgctgtgtctgccgccgttccgcccgtcgaccctcccccaaattacgagtccgcccttctgctcagttcacctcacccataatgctcaattttcatctgattattgcatttaattttctctttttgcgctggtgaaataaaagtgaatcaaaatcagacaaatgggacaacatttggtcaatgaattgacaggaatacgaaaaccttcgagtgttcgtccctccgcctcattattttattttttttatgtgctaatagtattttaggttttactcacaaatccttcccccccccctctccttttttccgctgtttcttttatttattgtgtaattaattaattcgttgcttaattattccgcttttgttcgtgttccttcctctctttctctctctgatcaaatcacgtttgctccgttctcatttctcccccttttttatcgccgctttttgcccagccacgcgttcttcagcagtgcgttcagttcgctttcgctgaccacccttttcacgtatttgtcgccgccgcttccctctttaagttccgtcgtgcgcattagccaacgacgctgagggcgcggaattcgccgcttaaacttcgaaatggcaattaaaatggaataataataattaatgccctcttcgtttgtcccaacactcacttcgtcccattctttcgcttctcccattgccatttgtttgtgcgcaaatcgatcctttgcctccgacgacaatcgttcaaaaagcaatcggtgggaagcgtcgagtgaattggcaggcgaacggaccaattgaacagcgggtaaaggcggcaattgtttgtcattgtcagcaaatccattaaggtcctaattgtttaaatgggcaaaaaaaataattaaattgtaaaaaatgtgcgctcagaaatgacaaaggtccacatggattagttcgaatggaaactgcgtacgttcactcgtttatctcatcacagcgcacgacaataaattaacgaaaatattcaacaaagcaaaggaattgaaccgatccaaagggtagaagtgagaaccaaagtgacaacccactgagccaaacaaacacacgcaagcactcgctctttataaaacaaataccttaaaattctgttgttgctgttggacaacaaagccgttgctgaacattgtcttcatgagcagcgcaaggaacagaataagcatcggaagggacgaaagatgcttaaatggaggggacttttgggctgacggagagaaaagaatttcatttgttggacaaattaagagggaaaacagaaagaaactgcggggaaggagggtttaaatttggcactgaatgccaaaaacgagattctcgataatgactgtactgatttgtgagtttgtcatatgtagacgccaaaaagaaacaattggcgcccaaaaaagtgccatttgcctgaggacacgtcaagcccagtcagtcattaattaactcgcgcaattattatgcgacgtggcctagcgtgattttgacccatcaatcgtccgtctgtcttcacttctcgaaccgagggcggcacttttcgttggcacgacccaaaaacccacaaaatccaattggaaactatttttgtaaatgaagcaatggaatgatgttgagggcccgcctactattaaaattgccttcattttaatgataatattgtgggaatggccaaatgaaagtgaggggagtcaaaaggcgcaaaaacatcaatggaaaatccaaaaattcccaattttccaaaaatggaatgaatgattcatttgctgcaaaatcggcaacattttcccaccatttgttttttgttctgtcattttcagaatttggaagggataacaaaaacagtgaaaaaaacgagcacagaatacaactaccgtattttctctaattatcccccatgggagattatttttcaacctcttcagaaagggggggaggggataattggagaaaatacgataataattacatgaaatattctcaaaacccaaatttgtgccaaaaggaaaagggacaaaaaaagcaattaaaaggcaaaggaagtgaaatatgccaaaggcgactcggtctttgtaagattcggtgccaattcctaaataaaagcgactgctctttccatgcttatttccctcacatcaaaggaaaggataggaaaagcaaagaatggacaatcatcggctgctcacccaccgaaggcacttacgcactattagcattgctttttgtccctctttactactaaaattcgccctttccctccaatggacgccttttcccccgcgtaattcacaaccaattagcgggcaagggaacctccgatggccgaccaacggatgcgcaaattgcgcaattcccgccccctcccccgcccaattgagtcccctggggcatcgcccgcacagacgcttaaggagcaaattggccaacagctgattgaggaagaaaccaagccaatgccaaggaatagctgtttttagatggagaaacaatgctttaggggagggaatttaatttaaatggaatcaaaatatttgaggaacaaatttaaaatagaaatggtgaaaagttgatgggaaatttctacataaaaatagaaatgtccaaaaaggctaaaaatgcattttgagttcttanaaatttatttaaggaggcgtgagatttgttcacaaccaatttaacgtttttgtattcagtggaatttactanagaaaaaaaggaaagcccctttaaccaaatggccacttttattcggagttttagatttttggtattnngccagttnancatcngnattggtanaatatggaattgcaaataatttttattttgataaaaatgagaaaaacattggaaaattta

SEQ ID NO: 14094 - DNA, 2302 bp, Heterodera glycines
ttatactcccgaacaatcaagcttattggtagaaatgtgaagatggcccgtgcatggaatgacacgctttattacccggggatcatcggtctgaataacatcaaagcgaacgactacaccaatgttgtgttccacgtcagtttttttttttgaagagttactttccgacaacattttaggctctttcccatgttccgcccttacgcgattatttccttcgtgagcaaaattacatgcacattaagcgaccgcccggtgacaaattgacactgatgccacaacgttttggtgaattgttgcgcaagttgtggaacccaaaggcgttcaaagcgcacgtgtcgccccatgagatgctgcaagcagttgtgttgtgcagcgacaaaaagtttcaaatcatacgacaaggttttgctacatttgcctgtttcaatcctaaaatataattattcaaaaggcgatgcccatgagtttatgatgttctttctaaatacgcttcacattggcttgaatggcaccggaaagacgaattcgtcaatcgtttataagattttccgtggccgaatgcgtcaatgcatgcgaaaagtgctgcctgtggacgccagcgacgagtcacggcggacattggccgaaacggaggaatacaaaggtggacttttaatgaatgagtggtgggtaagttaatttttgcagaacaaaccaaggaaattcctttcctttcccttgcgatggatttaccaccagcgccgctttatttggacgaacggcttcagaatattatcccgcaagtgccgttgtcgacgctgctcatgaaattcaacggacaaacggagaaagtgggcatttgatttataacaaaaccaaatattgcgataattacccaatcggcgagcaactcttttttaattaaacaattaaatagtttaacatttttaactagttaggacaaattcgaagtaatccaaaaatttccattgatttaaggagtacaaaacgtacaaagacaatttcctaaagaagtttgaactgcttcatctccccgaatatctaatcattacttatgatcgtttccacaagaatcagtggttcatcgaaaagaatcccaccatagtaaattttccgatcaggtgaattttgaactgatatttgtacatttcaaaattggtatttttgcatttgggaggcgtaatgaaactgcttttcagtaatgttgatttatacgagtgtttggcaaccgatgtacgggaaaagcaccgatacaccacttacgatttgatctcaaacattgtgcacgacggtaagccaccgactgcggtgagcaaaggcgacatcgcagttgacaccggacgataccgagtgcagctgatccatgaggtggactttcgtcatttttacaatttcacacaaatgcaaactttgttaggggacaggaaaatggttcgaactcgaggatttgcatgtgaaggaaattctgccgcagacaatcactctcacagagtcatacatccaagttaggagcttttcattcattttttgtcagttaatttcatttcgcagatttggcgattgaataggaataaaacacgcgctgaaagagttggcgaagcgcaagaggaaacatttggcacggtgacgacagaagaaaagcttaaagacgagccgaaaagggaaatcgatggaacagagtcatagaaaagaacgaacaaataaattgtgaattttgtttttgtttttttatttgttaagttgcggcgtccactttgcaatatattttttacatattaatctattctaattgcaaatttagagataaagccagaacagatgtcctctagtttgggtgaacttgaaaattaccggctccagcttcaacaggtaatgggcgtggtcattggtgaaaggcatgaaaacagtgtgtgtctaatttttaactgagcgctcgaagttatacttacaaaggaaggtccccgggtgtccgtgggatttccgaatgaaatttggtgggtggatagagcatgtcatactgttaaattttgctttgaagtgccaaaaaatgacatgtcagaaattaaattgtgaaattttcataagagggaatcgaacctgcgagggcaaaaagggaaggccggagcacaagctccgcaccaccaaacagcacaaaacaatgcaaatatttatttaatttattgcgataaaagaagtttggcacgtcatatctcggcactcagactcatttcgcagaaaataaaaacacttttcttaagaacccatgggtgctgtatccaggcacttaatttaatttgga

SEQ ID NO: 14095 - DNA, 942 bp, Heterodera glycines
caatggcatgaaaagtgatcgggcaaagtcaaacaatggcatgaaaagtgatcgggcaaagtcaaacaatggcatgaaaagtgatcgggcaaagccaaacaatggcatgaaaagtgatcggacaaagccaaacaatggcatgaaaagtgatcgggcaaagtcaaacaatggcatgaaaagtgatcgggcaaagccaaacaatggcatgaaaagtgatcgggcaaagtcaaacaatggcatgaaaagtgatcgggcaaagtcaaactatggcgtgaaaagtgatcgggcaaagtcaaacaatggcatgaaaagtgatcgggcaaagccaaacaatggcatgaaaagtgatcgggcaaagtcaaacaatggcatgaaaagtgatcggacaaagccaaacaatggcatgaaaagtgatcgggcaaagtcaaacaatggcatgaaaagtgatcgggcaaagtcaaactatggcatgaaaagtgatcggacaaagccaaacaatggcatgaaaagtgatcaggcaaagccaaacaatggcacgaaaagtgatcggacaaagccaaacaatggcatgaaaagtgatcggacaaagccaaacaatggcatgaaaagtgatcggacaaagccaaacaatggcatgaaaagtgatcgggcaaagtcaaacaatggcatgaaaagtgatcgggcaaagccaaacaatggcataaaaagtgatcggacaaagccaaacaatggcatgaaaagtgatcggacaaagccaaacaatggcatgaaaagtgatcgggcaaagtcaaacaatggcatgaaaagtgatcgggcaaagtcaaactatggcgtgaaaagtgatcgggcaaagtcaaacaatggcacgaaaagtgatcggacaaagccaaacaatggcatgaaaagtgatcgggcaaagtcaaacaatggcacgaaaagtga

SEQ ID NO: 14096 - DNA, 2952 bp, Heterodera glycines
  unsure (1)..(2952): unsure at all n locations
cgaaatgtcccagcatcataatgtccaagcgtcataatttggaagattcgaccatgcataccccctaaaattgttgatttttttatgtttgttattttatgtgattatgataaattcttatgaacttcatattctgaagccttagaattatgtaattttaggatttttcgaaaatttttattgggggacatttttactgattttagcttgggggacatttcgacgattggacattatgacgcttggacattatgacgcttggacattatgatgcttggacatttcgacgcttggacattatgacgcttggacattatgatgcttggacatttcgacacttggacattatgacgcttgtacattatgacgcttggacatttaaaaaggcaaatcggtgccgaagtgacaaaaacggttttctattgggcgaagtgacaaaaaggcaaatgtgggcgattagacaaaaaggcaaatgagtggtgatcagaagaggcgggtcatttcagtaccgaataatgattttaattaattaataatataactattttaatctattaattatattgctggccataattataatttcgttattatttaatatttcccaatcaaattacaatattatattctgtctagagagagaaataatatccacatgcatagttgatcaattcgatcaattgcacttttatttattcacaattatatattatattctgtctagagcatttttcatttctttaatattccactattaacttgtctttaataatttattaccgaatttttaattgatttagaatgaaaagtctacttttgaaactttttgttggcctctgcttcattgactttacgtcaaatataaagtcaaaatttgaggactttcttgaaaatcaagaagcaatgaagttgatccaaaattaccaagaaaagcgaatcaaaactattaaagaattacatgctgaactaacaaaaaaagggattaaattggcagaacgtagtttgaggctatatctttgtaaaattaagagtgccaattctgatacatcaaaagaaagtccaaacataccagaaataaaatttgaaaaacaagatagagaggaatatttttggcagacttttactcccaatatggatcattccgtaaaagactaacattaatttttataaaataaaaaaaggctctctattatattaagatggtcgctgatcaagaccgtgaaacgccaaccatttttattttaaactcttcaaatcactttgaagtgatacttgaaccaactcgaatttgaatgctaattataaaatcttatatcgatcacacaatcatgtatttgtaagagtaaactatgcttatgaatattatttctctcttaaaaatgtaatttgattgggaaatattaaataataacgaaattataattatggccagcaatataattaatagattaaaatagttatattattaattaattaaaatattattcggtactgaaatgacccgcctcttctgatcaccactcatttgcctttttgtcacttcgcccacatttgcctttttgtcacttcgcccacatttgcctttttgtcacttcgcccacatttgcctttttgtcacttcgactcaccacgaaaatgacctaattcatcagtgatcaaatgcattttatgaagaaaaacctctcaatttccggtaaataaaaaaattgcataaaaatggcaaaaaatgtactaaaacacacaaatttgagatttgcacaaaataatcgacaaaaattgcgggtaagactatggatggtggtgggcccccttttttcgaatcccgaacccgaattcgaacaaaaagttcaaaattaaattttttgtaagtcatgaaaatacattttcaaaggttttcggggacgctgatcagtgatcacgagtccgtcatccatttcggccaaatccgcggattcaaacaaaaatttaaattttaaaaattcacatttgtaaattgttgagcttttaactatgttttcagcgcttaatatacctaaatggctgtattggaagagtttcaaaattttacattgaaaaaattgcatgaaaaactggctttgaatgacaatgattttgtcgaatggcttgagcatttgggactcgtgcattcgcgtcgctcatgtccttgatgtggtggaaatacttcgattgtagcagttggtggaaattggcgttgcactacaaagaattgtcgggcaaaaacaggttcttggttcgtagtgcgacttttcggaccactattctcgatagaactgtctaaataaagaaaaaaataataagaaattttaataaattcattattccaaattgaattagtgaaggtaagctgatgcaaagcgatctgtctcaattggagagaagtcttatttgtagggcagcaacttttagtgaaaaaactttttttttgctcgattgttttgaagaaaggttctcaaaaaacgcatttctgcgttaaaattttttcatttggacgtcacttttcgtcactagaaatcactattttggcgtttcgtcactaaaatagttaaaaatcactattttggcgtttcgtcactatttcgacattttttgggaaaatttctcaacaaaaatgcaataaaaacggaaaatacatccctaagaatcgacctcaaaattggactataacttttttcttagtcaaccaaatctaacattattggtatcattcgaaagccctaagtattctctattagcctgaaaaatttcgaaaaatcatgttaaggttcaaaaaagttatggccagaagaattcaaaaaaccaagattttcaatcttttttgccataaatttgttcaaaacaatggngaggcgaaaaatcattgccaaaaacggaagggacagaaaaattttggcatannatgaccgattggaagaggaagaaaaggggaacgca

SEQ ID NO: 14097 - DNA, 948 bp, Heterodera glycines
  unsure (1)..(948): unsure at all n locations
gcttngaaaatcagcagagttgggagccctgtacatacccaaaggggatgcatcgagaaagagagagaaaatttatattttaacggaaaacaacaaatcagagagtaaaaacgagcataaaaatggtcagatcactcttattcatcgccataattcaaaatgatcgacatttctcaaatgcattaaatcaccttcacataattggacaccatttgcgacgtggcgacaaaggcctaaaaattcggcacaattttttaaacaaaatcaaatgcttttttgttgctcacccaatgccagcttcgacgtaataatgaaactcgacagtgctaaatccgtccaaattttgggctgcccattgaaccgccgccgtctcccaatattggcaccgtttcattacccagcggtcttcccaaacatttgcgcttgctttgatcagtgtccgcttttccttggtctgttcgttcgctaattcaaatggcacaatttgcgttgacggttgccaaacagtaaattgaatttggtagctgaccgaagaaatggcattggcacggagaaaatgctaaacaatgggaaaacggacggacattaattaaatgcaatcaaaatcagttggctaacgaaaatatggccacacctttttgagagtgttggcccattccatatttggtggctccttcaaaaagaaatgcaattgcttcggcatgccatcttttctcggactgtgcaaccattttgacaacatttggccagcagaaattgttgcatttggcccatcaaaatcatcatcaccaatcgcctcgggcaacaaatcaccggaatagattgaattcaattggtcgagatcggtgagaattgtcggcgaaagtgccgaagtggctcggatactgtttgaattcatcggcggatcaatggtcgtcaatgatggaactgtttaaagccggtgattat

SEQ ID NO: 14098 - DNA, 1294 bp, Heterodera glycines
tttggaatgttacttctttttattatctatggattttttttttcatgtgcattattttggtgctagtaagatattgtcgaataaattaattggttttttctcttcattttaaaacatttcacgtccccatgccctgcccgcttcccgcggaattgatcaagtaaataattgacgctctcccccctccaaaaacacatcggcttttgcgcgtaaattttgttttggcatactttgttaaatgtcggttttattccatgatgagaagattgtttcgcccagagcatatatcaataccaatggcccgaagaactggaatttatttctttttcgatgttcatactccccctacttattttccactttaccaataataccatttaaataaaattataattttttatttcttatctgattaatttcgatcaatattttttgataattaaacaaattgtatttttcccaaaagaattttctcgcagtagcaacttatcggctttttttttactcccttcataaaatgtctcgcttttgccccctcgcccaaatcaaggaatcgggtcggcttaatacaccaaaggggaaatttagtgagttccaaacctatcaaattaaaaaagaattttgataatcgttttaggtcttttttatgctttggaaattgctcgcaattaccaattgattggaaaggggataacggaaaaaacttttcgttatctcatgaaaacggaaaagaaacaaaggcaattggccatggaattgatggaaaaggcagggataagcacggatgacaaaacttttggcgttcaacagcttgaggctgtacaaaaattttgggactcccaatactcgggcaactttcgcatcgtcgcttttgaaatggtaaccaaattcgctgaaaaaaatatcccgttacttatttttagaagacccgacttaagccaattttcaagggagaaggtgttcgaagaaatgagatttgtgtgataagagatggggaccactgggatggattaaaatcggtgtcctggtttttctgcgtcaaaaatttttgtgttagttgtgaaatgacgtacgatcgacctgaaagacaccgaatggagtgtaaggaaagatgcaagaagtgctgtagaatgggattcgtgttcccatgtgcggatgtgtgcgataagattcactgcgaggagtgcaaccgcaacttctataacaacgaatgttttgaagcgcacaagaaggcggcttgtaacgagtataataaatgtgaaaaatgtggagaagcctaccaaacacgttcgaa

SEQ ID NO: 14099 - DNA, 1701 bp, Heterodera glycines
ttacttatttttagaagacccgggcttaggccatttttcaagggggaaggtgttcgaagaaatgaagtgggtgtgataagagaaggagaccattgggatgggatcaaatcggcttcttggttttttggtgttcgatacttctgtgtcagctgtgaagtgacgtacgatcgacctgaaagacacagaatggagtgtaaggaacgctgcaaaaaatgttgtcggatggggttcgggtttccatgtacggatgtctgcgatgagatttactgtggcgaatgcaatctcaagttttacaacccggaatgttttgaagcgcacaagaaggcggcttgtattgagtacaaaattgtgaaaaatgcggagaagtctaccaaacacgttcgaaacacgtctgcagtgaaaagttttgcaaagtttgcaaagttttccacccaggacggcaatgtttcatcaaaaaaattcaagttcgaccgcagaaagcctacagaattgtggcatatgacctagagacgactgtagatgggggagaacaccggcctaatcttgttagtgcggcactttcttgcagcatttgtgcgggagaagagagggaatgcgagatttgtgaagtccccaggaaaatcacatggtctgtagcggatggttttgagccaatgagcgagtttatcgtttggataatgggttttcaacgatttgaaacgattgctttcgcgcattatgctgggaggttcgattcacactttgtcttgtccgagctaacaaagaaggaaattgcgacggagttgatgatggctgatttgaaaatttatcaaataaaggcgggaagagtgtagtttcgggatttttggatgcttagtcagaataggttggctgaccttccaaaaaccttggggttaaaaactgcagctaaattgtattttccacacaaatacaataagaatgagaattttgggaagagattacccaacctgccacctttggaagactactgcccggacaatatgaaggaggaagaagccgtaaaattggaagcatggtacaatgagaattttcaaacggaatttgaactaggtagggaaaatagcattttttctttgaaaataaaatttaaggggaacaactcaagacgtattgcgaaaacgatgttgaaattttgatggaatcaattttgagttccggcggttatttttggggataacaggagatttggatgtaataaaggacagtgtcacaattgcgggagtcgttatgaagatcttcagggcaaaatttttgaaggacaggcatattccaatcatgccagagggagggtatgagagagcagagaaccagagcaaaattgcggtgaaatattttgagtggcttgaccaaagaaaaggagtaaaagtgcggcatgcgtgtaacggaggagaagtggaatttggtgggctgaaagtggactgtgttattggggccgagaaacaaataattgagtttcaggttaagaaaaatggtattttatcaatattttaatgttaatcattaaggggtgtgcctttcacgggtgtccgagatgttttttaccttggactatagcgccaaacggacggacaatggaagagaaccacaagagaaccgaaattcgtatggaaatgggtgagggaaagtacaaaatttttcaatcggagaagtttgggtagaataaacatttagaatatttat

SEQ ID NO: 14100 - DNA, 1184 bp, Heterodera glycines
atgtgggtgtgatcaaacaaaagaagtaaatgacgttaaatgcttatgaatatgagaattgagacatatgatttgataaaaatagacagcattcatttgtatatttatgtcatcatttgaaacgaaaaaaaagaaataaaagatatttttatattttaaaataaatacaaaattattattttcattaaaaatttattttaaaattattcccaacacctgttatgtacgctgaaggcagtaaaaacattcttaataaaataattttaaaatttatttcatttctttttatattcaattatgcatacataatattttcacatgaatttgtttatttaaatttatgccataaatttatattacatcatatgcgcactttaatgctaataacatattatgatataagttcatcgtgtgtatgagtgttgaataatttttttttaaaggaaatagatttattaaattaaattttgatgttggaaagggaaagatgctaattaaaattaaaatattgatttcaaaagaatcaggtgctctatgtcgtttcatgatttccgacatttggcataaggatttttcattttacaagacctgatcccttcaaattagacaaatcctggaaataagacaaatacgaccacagtgttaatgcatgttcaatatttttttgtgcatttggtattttgatgcatatatttttttaaatatacaatatattaagctgttgatttgcagttttttgttttgattttttgcttgccctaataaataacatttaatataatcattaaattaacaaatttaaaaaaatataaaataaattcacacgttaagatgttgtggcgctatgacaaattcgtctgatccgaccaaatgcacaaaatgtggaaaatgttttgctccattcagacgtaaacaaatttgaagaggaaactgcggcagacatacgaagcgcaaatctgactgtgtttatttttaattcaaatgagcttaaatttttagacactttttattcccacttatccaaaaattggtggattgaaatttttgataagaaatttatacacccagatagcattaagagagatgcaacactgtcatcaatttgtttgtgacgagagaaatgcaatagaaagggacaccagggaagagccccatcccggcgaagggaaacactgattggggga

SEQ ID NO: 14101 - DNA, 1885 bp, Heterodera glycines
  unsure (1)..(1885): unsure at all n locations
cttatttgtgttgtgtccacaaggaacaacagaattaaatttattgtggaaagacaaatgaaatcaataaataaataaaagatgacgacggagtcagaggaatgacgaaaatggaaggagcaaaacagatttaatttagaaccgaaaaattaagaatgaaataattaatgaatgaggaggaacaacggagggaaaataatgactggaaatgtggcgcggagaaacaaacaggaacatcactgttactgtatggcgctaattcaaattaattaaaatccaacatcaacatccatctccaacatctcccttcttaaaatttgtttcctcacggcgaataacgtattggggggcggcgttgtctctgaggacgaggcgttggttgaattggcaaggttggcaccggagtggtcgcgacattgtgatggcaaggacttttctgttgaggaacctggtcaactaaatcggccgaaaaagttgtctctgtttggtaagggacaaaagaacgtatttggtttacatgtcgagtgacagtaatattcaaaagtggaattttgaccttccaaattagacctttaccatcgactattttgccttcaaaccaattaggcttgccagaccttccgtaattcaacacgagaacagtgtcaccgttttgaaatgacggggacgttcatcaattgtgttgacttttgttggggcgtttgacaaatccaatgtcgtcgcgatgggagattgcgtggccttctcaaacggcacaatccaatcaagtcccatgatgtttggagctccggtgtttgctactgaacatttgagcttaaattcaacacctttaaatttcaccaaacaatcgaattcgcccaacaaatttaatttatgcccggaaaaactaccaacttttttaccttgttttctcaattttggactccccaaacttatccaaagtggctcctgaataattgtcagatgcgagcacgagtcagccacaagtttgacaggatgtccattgatcagtggctgcgtccaaatccaatcgtggcagttttgagtaacacaaaaagttgaggccactgtgacagcgtttgactgcgtgcgttcaggacaaacgggtctgatgtgtccacgttttccacagcggtagcaattcacatcggctgcataaggacagtcgttgacatggaattgaccacatcgcttgcacttttgctgctgatcttcatcggtcctattcgaattgaaaggaaaattatactctttcgaatttggaaccgaaacattgcccttttggttgaccattttacctcggttagacttcttacttccatcgcttactcgttgcggtcggacctgcactgaatgaacttgtccgggaccagacaaagcggcagccgaatttttaagcgattgaatggaacggcactcttccagaagtgcttccaaagtcatggacctcggcggcgttgattttcgagctttttccatttggcggagacactcttgtcaaagttctttgtgcgcgtcgctcaaacctgtgatgaaaataaggcatttcacttcctcctttgacagagtcatgtcggcgcgttcacagcgagcattgaccattgcaacaaactccatgacattttgtgaggggccacacgacagctgaaagcattcgaagcgcctgacaaaaattgatttagtgtcgccaaaaagtgccttaagagtggaaatggtaagctgaaactcaatttcggcgggcttcttaggaagaacttgctgttcatacctcanataatccgttgccgaaagcttacacaaaatcaaacgcactttcatgtcgccggtcaaatccttaccgtccttctcgacaaattgtccaaaacgatcccaccaaagtaagaat

SEQ ID NO: 14102 - DNA, 3184 bp, Heterodera glycines
  unsure (1)..(3184): unsure at all n locations
ttttaaattagttacgctttccgtttctccgattttcccatgggagtgatttggggtaaaaaatttgcacttttccaaatataattaattacatggcaaaattcgttcatagtaggctaaattgaaaaagatcatttcntaattgattttaaaatgtactcaatgttagtcttgnatttgccgtgagttcggctaaaagtctccgctggggcggcgcattggcaataaaaagtgggcaatttgaagcaggcgctaattgccgctgttaattattctcatctttcattttttttacatttagcggagtccaaggaacagagcttaaaaaacagggatacgaactgctaaatttggaagtaattttacaatgtttcgttagcagaatgaactaaaaaatctaatttttattaaaatattaacattatgaataaaatgggacgaaaatgctaaagatgagatttttatgtaaataagtaacatgaaaatttggaaaagctgatattcttattcagtttttttaatcaacatttttgcaatataacttaaaaagcataaaaatttttatgtaaaatttacaaattttagaaatttgcggatttttgtaaattttaagtgtgtaaaatgttctggtttttgcagactttaagctttaattagaaaatatttgtctacaaaattcaagtcattctgacaattacgaactgaataaggaaatcagttttttcgaacttcgtgaaattttatttacataaaatctcaccttcaccaattaggaccgaatttaaatggacaaaaagaaaggatgaagtatggacaaaacgcttgaatatggataaaaatttcaaaatattgaaatagaaaatcttaaaaataagttaattaagaaaatcttttttcagtatttaatgtctcaattaattatttagaaataattttatttcattaataaaaataattgttctaaaaacgaacaaagggacggagctgctcatttgtcagtttgtttaagctaaaatagaaattaaatatgaaaaagcaacggaattattttattcaatatgcttttgtggtgccatttacgtaaatgccaatggttcctaatgagaatttttcgcgtgctttctgttttttattggaatttccagcaaatagcgaaatgtccgcgtgggcaaatttaaaaaaatggcaaaaaagcaaagcgtaacggtgccaaaagcgaaatgattggcacacagagggggaggcacccaactcacatcacattcggaaaattggttgtgccaatttgcgcattttttgtttaccaattaatggccaaacgaaaggcgccccaaaggcacaaaaaataattggtttttattttgagaaaatgtgtgaatttttaggcgattaagcgactgacagtgggagagaaaatgcacattggcaactgagcagctgattcactcataagctcataaggtacctttcgaataaacatgctaatgacggataacgggtgacttcttagcaattaattgccccctaattaacatttgtgcggattaattgcttcagtcgaaaatagtcgcagacaatctgaaaaggtacgaacaaacgtattactggaccataaatacttttcactgtaagtataagttaaaaaagaggtgctattagcagaatgtagggattggcatcccgacaaaacaaaacggcatttcaatcctgccgggacgccttcttttcacttttgctcctatttttaaaaattttcccctattttaaagtcggatttaaattatttattaaaaatacgcatttggacaagtgttgaatttaattaattattaatcacttttaaacattcgaaaattttaagtaaaatgttgaggaagaaattaatttgttatgagtgaatgattttgaaagccctttttttgtcgttcatttttgacgcttttttatccttccgacgattcgcccagttttgtcggcggcggaatttgtgccatcgaagtgagttgggcaaggacaatgttcagggggcttctgaaatgtgccaaatattaaagaatttgtcgaaaggtacggttttttaattgactttataccattattaatttttaaaatgtttcacaaatataaataagctcacttaatcgcctttttggtcggcctttccctttcacaggtcaaaatttgcttgaacgccttgcgaaagtcgcgcgaaaagcgtgaataaatcaacggattgagcatcgaattcaaatggccggcccaagtgaaaatggaaaagaccgtttcgtagtcggcgaaactctgaaatatgtttaattttatcattaggaccggcagagaatttatgaatttaatttcccccccccccccccccaattaggcttgcccacctgttcattgccgcagagagcgattagcggcgtgaacagaaaaaagggcgtccagcaaaggatgaacactcctacaacgatggacagtgtgcgtgccgccctctgttcgttcaactgtttaatcatttggcgcgacttctcgcgcattccgcccgccagccgtttgcgcgagccgggcccattccgcgcgacatcgttggccaattgctgaagcgattggttagatgaaacgggggaagaagaactctgatcattcactgatcagaggaggagaaaatgagatcgcatcaaaaagattgataatttctggtctcttttcctttcataattaggtaattagtgatcattccgttttctcttttggcacctttccattcgccagcagttcggcatttgcccctccgcctccgtctgccactgtcgtgttcccttggggtgacgtcgcattgtccgcgcctccgccggtggaacacgagataatggacgccttcggcgtgttggaagcagtcagtgaacaggcgaacggggacggagcggcggaccttttgtggacgagccaaacggcgcccggcggcgcggaaacggcggacggacactttttggcatcgcgcaaagagaaggaattggtgggcgaacttttcagctgatcacctctgaaaatggaaatttttcaattcaaacctagtgaatacaagaaaaggagatgacggtagaattaatgggacgagagcaaaagtgccgaaaattgaaatgaaaatgcccaaatgccattgaaaagaagtgaaataacaatt

SEQ ID NO: 14103 - DNA, 1981 bp, Heterodera glycines
gtcgtccgtttctgtccgaagtgaatgcgcagtgtttccgagcccgccgaatgatttcgggagcattgattgggcgcgggactgcccgacttggccgattttccgctgtttcggtcgcgatgtttcagcaaaatctgcaaattatgaggtgaattcaatgattttaaaaagtatttaaattcacaacgatcactctcttccatctttttcccccctttttttgcttttgatttgatcagtcggtccgctcaaagcataaacactcacccgcttctcgccgctcttcatcgatcgcgagtgcgttgtggcgatacagtacacgcgacctttgacatttttgttggcattttgtttttgcaatttcaaaatttaccgtaggcaaagagaatgagcaccaaagggatgtaaaaagaaatcattgcggagaacacaacgtaatacgcatcatcagtgaacagacagcgcctctgaacaaaattttccataaattttctttaattttgatgttagctaattaaattgtccaactttgtccttgtacaaatggggtgaagaagcgcgccaccaaaaaattgccgggaaggaaatgcctaaggcaattccaaattaattaatggttaattggctggcaataataattgcacgtacaggcggagaccaaccacacacagcaaatgcagtaaatgatgcggcgtttggacacgcggtcgcgataccctggagatggacaattaattaactaattaaataattagttaatgggtagcagggcaattaatggaaatggaaaaaaggaaaagcccaaaaatatatttttcagcaaataattctttttggtttttggctggctaatagcacctgggaagagcttatgaaagatatcagttacagttgggcagatttttttttgtaataataataataataataaaaactgttatggaccatctctttaatgacccctcttttttggcaaaatgccatcattaataatttaattttggttttattttgctttcgtaccaattgggtcgacgccggccatgtaccgatcctaatcaaaaacaaaattattataaaatataatcattttaaagataaactttaattttttttttaaattttcggctcactgaccaaactgatcacgcacaaattccaaattgaggacgtcgacgccaaaatgtccaatgcgtgccaaatgtcacaggtggtcaacccttgacaaaagacaaattcggaaattcatttttaattatttttaactttttttgcatgactttcacatgaaaagcgcagttgaaattcatgtttttgggagggattgacacgcaaaaaaaggggggagggcatagggcggataaactgccaaaaatggaatttaaacaaagaaaaaacgaatttgcaaaacgccattttaatttatggagaaaaccatttaatattaaattgccaaaaattaaatttcattttccttgtggtaatttaccctttaaattttatttaaatttcctttttgcttttgttgccctttcaaattggagagtcaaaaaccaatagtttggcttttttttttttgcttttgttttcccccctttgtcccccgtccgtccgttttgtttttgttgtccttccttagttcctttatcgttttttgtttgtcccaaattccctccccccccctttttttcttttttcccccccccccccccccaattgtttttatggcttttcctttttggtcttttaaatgtttggcgtttggctcaccaagcagccaaacatggcgactcatctcaaacagcgaatttaacggcatcaccaccaaacctgggcaagaaagaacgagcgaatgaatgaatgaaattgtggcgaagcaagtcatgtcatttgaaaaacatttcaatgacaaaatgccataattaatgttaaattgccaaagggcataccgacgatcagatcagcgaccgcaagcgaaacg

SEQ ID NO: 14104 - DNA, 4000 bp, Heterodera glycines
  unsure (1)..(4000): unsure at all n locations
acagtttatttttgcataaacatttatttgttcgcagaacgattggtaattggcataaaaacactattagcttaaaaatcacgaaataatataaagaaagcaaattaaaatattattttatcttttgagagcctaaataattctccatttatcaggaaaattaaataatccgttatctgtttaattaaattgtagctaggaaagtttttttttttctgtcgcggtttttttaattttattaatttttttggaatttctcattgtaaaatccacacctaaaaaggtgtttccccatggcctttaccgcctgatcagccatttttgatcgttcttttgaccgctaccggcttccttctattttctgccatacttctgattggtgccaatcgggtgtttcgaaagcggttgccatcgcccggtcaaaatgtattcagtcgctgctacagtaccatcaaaacggcactgcacaacaaaagacggtagaattttcgatcattgatttttatagttaaaattaaaataaataaattcataattaattttattcgcctaaattacgccaagaaaatttgttactaatttattcgtgccactatcaggtataaacaacggcgaatggtgttggcaaagacgcgaaaccaacaaagtgcggagccaaataacttgctggaccatttcttggatgaccacaactgtgaacgggacaaagagtgcgattttggacgaaaaaatgtgtgcggacaggtgagtgagagaaacaaaccaattaaatttgctaattagccttaattggctcattaccaaaattttgtatattattctgtttaaatagaaatgtttcaggcaaaattccttgaagagctccgtacagtgctcagtatgatactgctgtttgtgccaatgccattgttttgggcgtaccaatcacatatggtacgttcaaaaaatgttgaggctgatcacagataaacagggagcggcataatgaaaatgcccaaatacctgacaaaaatagtgatgaaataaaaaattttcttttaatgacaaattcgaaaaaaattttaattagcattcactattcgggatttgtactttttcatttagctctcaatttggtccatccaacgggtgaacgtcgacccgaatttgccgatgatcggtgcctttttcagtcgtgatcaaattgggctacatttgaatatttttgtgctcgttctgataccaattttatatgtgagtttgtctgatattgnggataaaaaattgggtttttttgccaaaatcaattttccttttcagtacatcgtttatcatcatcatcatcatcatcattggcacaaattctgcacatgancacgtaagccaattcattantaatggaaaattttcaggatttcaaatgtgatataccgtatacccaaggtatacaaatgttctctcacttgttccaacttctggttttataggtcacacacccactatttgttcgtcaaaagaattttctttttttaattttttgggaaattaagagttttgcctttttttgcagaaagcctatgatgacccaattctgccatcattaaggtatttgaagaggatggcttccggcatatttttgtgcgctttggctagtgccgtttcggcaactgttcagttccggctcaatgttagtgtcaattaaaaaaagactctgctgttcgtctttctattttatttaaagcaaaatccgttagagatttcatgaaaatttcaaaaagtttgtaaaattaccaaataattttcaaaaattattgacgaacccttttaaaatctttttaaatacaaaagtttcacttgtgcctaacggcacaaaaaataaaattaaaaatccgagatttttcctctccttttctcgtatgaggactagagaccggacgggatcgggatcccgcgggatttcttcgggatcccgcgggattaaatttgggatcccgacctcgggatccgtcccgagtgattttttaaattcatcgggattgatcgggatcgggatttcatcgggatcccgaatcgggatccatcccgaccattttaccaatgtcacgataattttcgaaaaatctccattttttaattaagatcttgaatttaatattgtcatttgctaatttttcataaaaatcccaaaaaaattttcacagttctccaaaattccattaaaattttcaaaatttgacgcaaaagttgaccattttgtgacttttttctttcaaaaaaagaattatcaaattttattttttataataggtagtttcatggcacaacgatttctaagaattttgtccaaaaaatcataataaaattgatgtctacgtatttttcttcgatgcctatccgtcaccgccagacataaaaccccattatttcttataaattagttcaaaatcacaaaatatggacagttttaggataaattctgttaacaaattacatttcaaattcaaaattttcccggcggcgcctatcggcaccgccggcctcccccctgttcccctaaagtttttgaaaaaaattcactgcgaaaaaaattcttgatttttgatcccgatgcagtttacgattttctaatttccttaaaattgtttaaaatgataataggaggcgaaaatacagaaattgacattaattgattaaattgtaaaaatatttaaagctatgttgttaaatgttctaatttttgaccctagatattctaattttggaaaaaaaatataaaaacctaataaattaccattcctatttttcacaatcgaattgatcaattataaatattagataagcacttgaacaaaacttagcacaaaactaaaaattaaaaagccaataaaaaattgggttttagcaaatcccgataatcccgcgggatcccgaataaaaatcttcgggattcatcgggatcgggattcggtcgggatcccgactcggaatccgtctcgatcgtttttccaaaatgttcgggattgatcgggatcgggattcggtcggtatcccggactcgggatccctccgaccccagttgtccggtctccactgcaaaagcccgcagcaatggtcataagctcaagccctatgtgttggtcaacacggtgccgcaaattatcaaccaatttgctggaaaattgttttgtttttcagaaataattagtgtcaaacaatgttctcaaattctatttatcccccatgggggataaatggagactgggtgattattttttaaactcctcagaaaggggggggggataattggagactgcggtattaatagagactgggctataattagagcatatacggtattagggctgccaattttatgtaaatacatatttttttcctagcttctccttgctctaaatagcaggaaaaacactttcttttttgtgtttgcgaacaaaaatcgggacttttatttacatatttttacatatttcgtggtttttatacatatttcgggattttcttacatatttgtacatattttggatttttttcatatatattttcattttctttacatattttgagtattttttacggaaatttttggaaatcctcaaaaaaaaattcaaaatttcggcaaatatttttgtacatattttgaaaatttataaagaaaaaataagtttgaaaatgttgcctaaaaataccaaaaaaagtaatttttatgtcattttgtggctatttcatactttacggggattttctttcccaaaaataccattaaaaaaattttatttacatatttggggttttttgtacatatttggaccactttttgtacatatttttggcggtaatagtatggtttacaggtcccaaaaaaaagaggcaaagggggttttatgcaattcttcaaagtcctttagggttctcgagggcgctgatcacgaatataatattcatttcgaccaatttcgaaccccgaacccgaattcgaacaatttttttgttgctttttttt

SEQ ID NO: 14105 - DNA, 2096 bp, Heterodera glycines
ttaattactgctaattaaatctagaaaaatactgaaaatttccgttgacaaattttcgtgtcgttacaatcgtggtaaatgttcactttgggcacaatttttgtcgcctcttttgcggacccatacaaagcgaaagtgccgttctgagcggtccatccgtcggccaacagatcgtccgattcgaaccctaggaaaatctctgaaatttcaattttttctatgaatttcaattttatttaaatttatgtaatcgcattttgctcccaatttctgacacttacagcggtcgacgtcaaataatttcactctgaccccaccagcggggcttccattgcacgttaatgcgccatacacctgtgattcattaataatactaattaaaattaaatggattaattgaatgcccttaattaccccggctgactgcgttttgttcgatcggttattgataataatgggacaacgaatttggccaaaccggcactgaaattggcagcgaatttcctaaactaaaaacacaaaaaaataataataaaattaaaaaattgacttggtattttcaaagaaattcaattaatttacccttttccaaatggaaatgttctctttttgggcggggacggcgaacacaaaacgattgtcgcgcaaaagatgtcaatgcacaaaaacaacagaagcagcaggtggaaattatatggcatttgaaaatgggaatcgatgggtttgatcaaaaaaggaaatgaaagaagtggccaaaacccgggggattattaagcgggaatctttaaccaaacctaatattaattaatacataataacattaaaatataaaattggtgttaaaatttcgacgcagtaaaaactgcgaatttgcagttgctgaagagaccggcgcgagggatgagcaaaaggaggggggacagacggcgaaatgagtaattaattaattgcataatttggtgtaattgattgctaacgacttgatcaatcacaactgctgttatcactgctttgttaagcaaatcattgctttcgccattgtatttaaggaatttaaaaacaaataatttaattcacaaaatttaattttccttcggagtgaacaaaaacagcttaatgactctgctgacgactgaatttagtttctgattgtgaatttgctttagtgtgctcatcggatctcttcttctttgtgatcaaatcggtgcgcattttaacggccggggaaaagggcgaccgacggaccattgaccattgattgattgattgattggccattgattgattgattgaccgatgatcgatgatcactttggtgatgttttgtggccttaaagtgacccaataccaagtgatcagatgcgttttatcttttgttgtccattgtgtcctcagttttggccaacttccgtcggacaatcaatcggaagatttgaattaaacgatcaatatattagaatgaattaatagacatattgtagtttaatacaataatatggggaaattaattctgaatacaaattactgacggattgtccaattgccctttggccgccttttcaaaatgaataggtcaaccaaacttttatgaacgttaatgtttcttagatttgcttattttgtggtaatttctgttgttgtttttctctctgctttgaaattttgtgattttaaataattaaatataaaatttcaaatttctcccattatttggccattttttgattatttggccgccgtttgttcacgcccattggactgcttgcccgcccgacacggctgtcatcgccacccttaaaatcttccaatattttccattgtttggatacaaagttgagaggggggggggaatttgggatggaagatggatgaataaaagagggggggggggggggtgtgaagaaatatttgactttttatatcgagtagccttgtaagcgtgtagagatttatgtacgaaaaatcattgaaatgaaacaagctaagttaaaatttaaaggaaccttttttttgaagatttcattgaaatttcaaaattttgccgaccgcgacttaggccaccatcggaggccaaggcctaaaattttccatttttt

SEQ ID NO: 14106 - DNA, 1902 bp, Heterodera glycines
tcttaatttcctaatttgtcttcccaaatcgcatttcttccctccccccccccccctccctttttatcccttttttcccctttttgcgcccctccggcgttcctccgaccgcctaaacatggcaattggcagttcagcgcgaaggccgcgccctccaatgaatgaatttggcggagattaaatctccgccgcgcggaagggcgggcgctaaaaaggcgaaagaaacactgatgaatcggcagcaaataattaccaattaattattggacagtgtcaaagccaacttatgttttatgattgattttttttaataaattaagaaattttatttgtaaattgaaaatgtcgtcggaaaacaatgcaataggcgcaaatgaagcgaaggtggggaaaaatggcataaaataacctaagaaaatgtaaaataattaactgttaattgggtaattcatttttgcttctgtcagcccgtcccaccgtcagcttcgcctttggttcaacatctgctcaatgccgaccctttccttgctgatttggtctccggtttgcccgtcagtttcgcgggcattccctacgcaaaagtgagcgactgcgaaattgagaaatgtcaatttaaaaatgccattcgccggcacaggagacggaacgccaacagaatttcattcattcggcacaaacggcgaaacgaattcacattgtaaagaacattttatgaataatgcagatcatttagtggctttgtttaatcaaatcgattgaaatttcagtcaaaaatgggaaattattttaattaaaatttacaattttaaaggcaattccgagcaacggactcaacctccacctgaacctcagcgccgaccactttttgccggaacgaaacgaagtgggaaaagggaaaaagaaatgttggcattttaaaaccttaaaataacggcgaaaattaatttgatcattaaaatattaattgtctatttatctctcttttttggctcttctcccattttgccgccttttcagctgcatttcgccagtgagcttctgttcaacggtgcacccgtacgccttcgtgggcacatcagcacgcgcactttgcacggcaaagtgcaggtgattttcgctggggttgtcgggattgggagggagttcgatcggaaatggaatccccgactaatccgcgcattgggcaggttgagttggcaccgcagtcactcattgggcaacggcaacagagtgaacgaattggggaacgaatcgctcagctgaggacagccgcgttgagactttgaacaaagtgaaaaccgacaaaattgtcaatttaatattatgcataaatattttcaattttttgcatcttttttaaatggattttgaaatttttccatttggaaaaaacggggccgtgaagcacggaaaattcgacttaataattcattaaaatattttttctcatttatttattaataagcaacagctaaatatggtaattaccgtcagaccaactccaattaaacttatttttaattgattgttttttcattatttaccgctatgtccaaatgccattctttctgtaattattttcattaggctctccaattaaaaatttatgtttatttaattttaaaggaaacgtggacaaattgacttttatcgcttggcatatgaatttgtcatgttaaccgatgcttttatgtagcatcttaaaattaattaaattatttaggtaatttcttaaggcataatatttattcttaatcggaattcccaaatcccggggcgcagccgggaaaatttataaatttgagaggaatttatggaaaattgtccaaaaataaacaattaactcattttgagtttattaacagaaataagaacactcttcgggataagaacttttcaaat

SEQ ID NO: 14107 - DNA, 3901 bp, Heterodera glycines
actgtttaccgcgtcggcccagccaccatatcgggttcaatcccgcgcggcgaaactcccgcgcatttaacgccacggcacaaaatctcgcgcaacccccatccaacacccccaaatcccgaccccacaccgtcccgcgcaccagccaccatcccgaacccacatttcccgacgcacccccccccccattctcgcccatcacaccacccaataggcacggaccccccagctgatcctctctcccttcagtggagaaaatcaatcgataattcaagtaatcgtatatagtagtgtaaaggaaaaagggccctgatcactaataagaaccgaaaacgggtatttgatcagttaagtttcatctaaaggtataaatagaacaaataacacaaataattaaaaaaatgtcaactcttaagaaaaatagacaaggcgagtgaggacaggtgaagctgaccaacacgtcggtgtcattcaaaattttgggcacagctttgtcaaaaccttaaaggtgtcaatttcaggtgttgagtcttatgattccggcatttactatgcgtttagggcatatatgatgaatgaattgggattttcagaagatgtcaaaaaggggctctgtgaagcatcttgctattacgtcgatgatgtcgaccaggatgattacacaaatagcggctttaaaaacagatcgtcacgtttggctgatggtgccaaatgtgaaaccatggtgaaacttaattttgatctcgcccgtcagcccaatctattgcttaataactcggatgtcatttttagcatacaccgtaacaccgatgattttctaattatggcaccgccatatgtttcaggaaatgcagtcatagcgaacccgcacacatatcgtattaacatacacgatattagaatttatcgtaaaaacagtagacgttacccaagcattaaataacgtaataagcaatcagctacaaaccaccccggccaaatatcctacgagaaaaatcgagatcagaagtcttttcatcccgcgtggcacttctgatctttcacacaacgtttttacaagcattgttccgagacgtttaatcgtcgggtttgtttcaaccggtgcgtataccggaaatcctaaagagtcacccttcgtctttgaacatgccaaaatacgctctatcggcgtcgaagcaaatggaaacatattccccgggtcaccctattctcttaattttgatagaaacaaatacattcgagcatttgttgacatgtatacgggactcgggatggacgacggtgaaagaacaatggtcgatcaatatacaaaaatttgtaaacgggtggtgtttcttcgtcatcccgatgacctctactctagaggacacccccggttttgaattgattcgaaacggaacgaccagcatcaaggtgcaatttaatgagcctataaaggacggcggatatgagatgatcgttctgggggaatttgattcgattttgtctattaatgctaatcgtgtgctcagtagtgacggaagcatatgatgaattctcatgagattgaaatatttctatccaaacatccaacaacacgaaaatattttatcggtgtttttgcttccgacaagatgcctaaattgaatgacaggcattttccctactgttttgtagcaaataccgacagggcgggcacgataggtgaacactgggttgcctgttttgtaaattcgccgacagaaatagaatattttgattcattgggcgattatcccaacgaagatttaagttcatatcttaacctattcaaacgaattctcattaacgaccgcatcgtccaacatcaattctcagatgcatgtggtcaattttgcatttatttcttgacacaacgatgctatggaatcacttattgtgaggtcattgacggtctatataaggttcgcccgagggccgatttattagttaagcaatttgtcagtaatgtttaatttaattgttctcctaacgatagtaggccatctcactgccgaaagggttcagattctttctgatacacaactttttgacgacaagtatctcactatgacaaagagttcggtcaatgaaagacagttcggattcgatcgctcgagattatgtacgataaataggaatctgatttcagggtggagtgtatcaatccaagaaattaattcaatagaaaagagcggaccaactaatgttagctttaccaggattttcgacaattaaagccccgagcgtgcttttattacacgatcatagttatttaattttccaaaacgaaaatacaaatgaaacttcgataacaagagggagtcaagaaaaggttgttaggaattttcccagtggggaccttagatttgatcacattaatggccgactttttctaatcagtgacgatcgaatagatgaaattgacattagatcaatcgagaatttatggacacatcataatggcaccaaaattattactaaaccgatcggatcaatgccgtcttcatttaccgatttcctaataattgagggacaaatttatctgattaaggaaaagaaaatatataaagatcgatttgactcaaacgagatacttcccaaatatgtggcagacacaaatagtgaattctttaattttgtcgtgttcaaagaatttgagaaaattaaagtttcaagttcaaatatttgggtatattttttgtcaattgtcgatttggtagtggtcatcatctgtatttcagttctcagaattttaaaaataaaaagaaaaggtaaaaattcaccctacagtggtgaagtaagtgtatataaggacttgcaacgaatatgaaaatgcctactggtgctcaaaattaattctctcattgaaattctatgcgattttaacgaatgcgaacctcacgaattatcagaaattctacgacagcggaagaaacaaaatttgaaatttttgagaagacacgccctaataacgagacaccttaggcacaatcagtttatctcaccggatgacatcgcatttagaggttctaataggctttttgcctaccgagggttcctcggggttactgtcgaacagcatctctactcgagacaccgtgtcaagctacaattccctcaactcccatgtataactatgtaccagaataacggtcatagatgctattttccccttgaactgctggattttttataaaaatattacggctaacaggagtgggccttcactttagaccgttccacccccgctagtcctaatatcacattaatttttattcaactttatttaacaaaaaaaaaaacaacaataaaatacaaaattaacaaaatccaaatggcatcacattaagctcctcatcgatgatacccttctgacagaccggcctgtacattttatgcttctccctcgtcaccactttcgaatcccttgtcggcctaaatattgatttattaatgaagcaaataatttttacaaaactcacccaaaatcattcttatagacgaagaatgccgggtccacctcccctttcccataattcaaaaccatctccctgaatgtatcgtagtgcaatgttttcctgttgtccacgtcgaacgtaatccctctaattttcataacatattcaatatcccccgtctgcttgtttctcatcttcagtgcgtactgcttcgcccctccacagcaatattcttcaatctcatagccgccgtattcctcgctcatctctcccaaatattttcccgttgtgatcggctccacgtcccgatcatgcaaaacaaaaatactgtcagtgtccgtatacaaaatttcccctccgttgctttcagcctccctcataaattccaataattttaacctcgccatactcgtcgtcctaaaattaggttatatacaaattta

SEQ ID NO: 14108 - DNA, 2209 bp, Heterodera glycines
ttttcatttctcaggagtgtgttttgaaaattttcgggtcgatttttaggggtgtatttttgaaaaaaattttaagtcgattcttaggggtttatttttcgtttttattgcatttttgttaacaaattttggcaaaacgccaaaatatgtgaacataagttttttcaaaaaattttaggttttttaggtgctaaaaataaaaacctagaaaataggtgctaataactcgaaaagtagcttaacaacagcacaaaaaaacatgtttttcgtgcgttttaggccacggggagctcaggaaaaaaataggtaaaaacctaaaaatggcatccctaataatagaatacaataaactaaaattttaaaggatattttttgaatttttccggggttgggcaataaaatattaatataaatctttaaaaaagacttttataggcttataaaaaaataaatcggcgcagttttcggatttcaatttgctcattgtcagtttgtcccaaacgataattttgtagaacccaggcggtgaaactgtgccagcataagtctgaaaatttgcaggaaaaacattttcactcatcgaagatatcatatcaaaaagagaaatgccacagaaaatggcaaaaagaatataagaatgtagaagcatttatcttaatgaatttttaatataaaaaataaaaattagagctacgataaataaataattaaatcgctaaattgtcacctaaatatgtgtaaaaagtgaaaaaaaaagatggaatgctaaaaatacagctagaacatcaacaaaatttcaaaaatatttctcataatagtaataattaataattattgcgggatatattcagtcatgattcacgacttcagttcacagccatggttcggagtaattcacccatgtttcacggggtaaattcacggccatgtttcactgggtaaattcacggccatgtttcactgggtaattcacggtcatgtttcacggggtaaattcacggccatgtttcactgggtaattcacggtcatgtttcacggggtaaattcacggacatgtttcaatgggtaaattcacggatatgtttcactgggtaaattcacgggccatgtttcacggggtaaattcacggccatgtttcacggggtaaattaacggatatgtttcactgggtaaattcacggacatgtttcacggggtaaattcacggccatgtttcactgggtaattcacggtcatgtttcacggggtaaattcacggacatgtttcaatgggtaaattcacggatatgtttcactgggtaaattcacgggccatgtttcacggggtaaattcacggccatgtttcacagggtaaataaattcacggtcatgtttcacggggtaaattcacggacatgtttcaatgggtaaattcacggatatgtttcactgggtaaattcacgggccatgtttcgcggggtaattcacggtcatggttcacggtttaaattcatggggtaaattcacgctgatgtttcattcacggccctgtacggggtaaattcacggccatgaaatttgtgccaaaccccttatgtgccaaaaggcagagtagagcgggaccgggaattttgggcaaaaccgggaccgggacttgccgggacctgagaagccgggaccgggacctcgatttttgtccgggaaccgggaccaaccgggaaattttaaaaattcaaaaaatttaaaaaaatttaaatttattttaagtaaaaataatacaaaattaattttttattttgctatttatttaataaaatccaaaagttaaagctaagttaaattaattaaaattttcaaatcgaatttacttcaattatttcaaacaattaatcatttttggaccaaatgatcgaatattaatagaaattcagatttgcttttaacagcacttttttttcggcgctttttccaaaaaacttttagggagcagagaagagcggtccggcggtgccgttaggcgccgccggggaaaaatttgaaagtttcagtgaggtttgttaacagattttcaacaaaatatggctggtttttgggattactaggctcaatttgtacggattttctttaaaaaattataaaatatgtataaatctaaaaaaactatgaggaatcatattttgtcgataggatagccatgagtatacaaaaagaaaattcaaaataatt

SEQ ID NO: 14109 - DNA, 958 bp, Heterodera glycines
cgccgccggggaaattttgaaaatttgtgtgtgatttgttaacagattttcaacaaaaaaaggctggtttttgggattactaggctcaatttgtacggattttctttaaaaaatgataaaatacaatttaaaaaattaagaatcatgattatttcttaattttttccctttaactccaattttcatcactaatttttcactcagacccattcttaccagtgcttgtttttcccggttcccagttgccctaccgggaccgggacctgagcttttcaaaatccgggaccgggaaccgggacctcggatgaccgggaattcccggccctgtcacggttccgctctactctagtttttatgagtctctctctaaatcaaaaattgttcggagaaaatgctaattttggacttctctcgtcttaattaagccgcagaaaaaatatatatataaacataaaaaccaagttcttactcaataggtttaaaataattcagagaaacggtttgcatgcttttcgcatcaccaaaacctaagaagcccaaaaaaattatgaaatggcggctgctgctgaaaagtgcatcccaataaagaaagaacgaaggcaattttatggagaggggactaatcacgtgcaatgaataagtcagctgtatgcctgaaatgccaatataatcgacttttttaatttacaatattcctattttattaaaattaaattaaatattctgggaaaacgaattaaagatatacaatactatagttaatgccaaaaaatggacaaatgacgtaaatctcgaaatatgggaatagaactaactcccttcctaaaaacttcaaaccaactgaagcttgtacaaaaacttgtacgaagaaatgggcgttagtcaaaaaaccatcaaatggaaaatttttgacagaaaattattcataactttgctcaaaagcaaccaaatttttttg

SEQ ID NO: 14110 - DNA, 963 bp, Heterodera glycines
tttttatgcgttcttagccgtgacatttttttgattgtgcggtcttagacgggcattttttatgcggttttagccgtgacattttttttgattgtgcggttttagacgggcattttttatgcggtcttagccgtgacatttttttgattgtgcggtcttagacgggcattttttatgcggtcttagccgtgacatttttttgattgtgcggtcttagacgggcattttttatgcggtcttagccgtgacatttttttgattgtgcggtcttagacgggcattttttatgcggtcttagccgtgacatttttttgattgtgcggtcttagacgggcattttttatgcggtcttagccgtgacattttttttgattgtgcggtcttagacgggcattttttatgcggtcttagccgtgacattttttttgattgtgcggtcttagacgggcattttttatgcggtcttagccgtgacatttttttgattgtgcggtcttagacgggcattttttatgcggtcttagccgtgacatttttttgattgtgcggtcttagacgggcattttttatgcggtcttagccgtgacattttttttgattgtgcggtcttagacgggcattttttatgcggtcttagccgtgacatttttttgattgtgcggtcttagacgggcattttttatgcggtcttagccgtgacatttttttgattgtgcggtcttagacgggcattttttatgcggtcttagccgtgacatttttttgattgtgcggtcttagacgggcattttttatgcggtcttagccgtgacatttttttgattgtgcggtcttagacgggcattttttatgcggtcttagccgtgacatttttttgattgtgcggtcttagacgggcattttttatgcggtcttagccgggacattttttttgattgggcgggcttaaacggggtttttttt

SEQ ID NO: 14111 - DNA, 1537 bp, Heterodera glycines
aaaaaaaaaattgaataaggtgataccatatgaacacttatcgatttttgtacaaatttaggttgagattagatataaaggtgcatgaaaaacttacgcaattgtaagatctttaaagtgtattttgtttggcaacggacaatccggcaatggaaatccctcagatttgcttccgacaaaaagttttgccatcatatcaatgtcctttcgaattccgattggtctccaaagcgtcaattcctttttgccatcaaaatgtttgttcaccaacgtatcaaaacggggcgaaagcagtgccaatttgaggccgagttgagcatggtcaaagcatgggagaatgtccatccacacgtcgttgcacacccaactaaaacgagaaaaaaaaagtagcgtgaatacataaatgaaaatttttaatttaatttttaaaatttcttaccgtctgttcatttttgctgcaattagcacacgttggtctttttcaattgattgatgtcacaaaaatgcacagaataattgttttggaaaaaccctttctaagcaaaaagattatttgaaaattaaaaagaataggtggccgggccaaaggcggaaaaatgtgttgatgtgaaaatgattttaagggtaatagtttagatggtagcacacctttttgacagaattttttataaattttaaaatttgtaaaaccatgtctcatggggttttcggggtcgctccagggcagcgcaccgataccctccaagccaaaatcctggatcgttttggcgcccacattcggagccaactcgattttgaagggaaaatacggtaataaaactgtagtcaaataaaataatgttcttttctttttgtgcttacatacctatgtatcagggatggcattccgaggcccaaaaaattttcggaaatcggaattccgaccccaaaaatgtcggaaatcggaattccgtgccatccctgctatgtatcacacacacatattaaagtggctctactgaatgaactatgaatccatcaaaattacgagtccaataaacctaaccaatcttttgaacaataactttttctttttcaaacattcattcatttttgaaagcataattgtctaagtaaaacaatatgccaaattcgcagcatttatgcactttgcaaacaaagtaaacaattgttgattatttccgttttcaatttacaaattcaatgtgttaacaaacttagtttattgataattaaatcggtagggctcatataaagtgcatagaacgtaaagttttctttcgttttctcctaaataaccaaatttgtgttaggtgaactttaccgttgatgaaattcattctcttatagacaagaaaagaacatccgaaagatgttggttattgcccacgttgaccatggcaaatcgacacttaccgactcacaggtgtccaaagttggcattatcgctggtgcaaagtctggtgagacgcgcttcactgacacacgcaaggacgagcaggaacgttgcatcgccatcaaatctacgtttgttttt

SEQ ID NO: 14112 - DNA, 951 bp, Heterodera glycines
agtttcgcgcgatttattgttatcactcgctcaattggttctgaggcacaggaaacgtttcgccaattccaagaagacgaaattagtttggaagacgttctgggaattttcagaactaagatgagtcagttgttttcataaatttattgttaatgaatagtttagcggaagcgcagtcccaaatttctgcgctgaaaactgagcttgctgcttctcgtgagagtgtgtttgaaggtaccaggccggataggcttgacattctggagagcacggttcgtcgctgtcattctttcccgatgaaattaattacttataggacttcctcatcgtgaaggcttcaggcctcagtgcggacgttaggtcgcttttttcgctgtgtgaccggtttgatcgtgcgaggcacgcaaatctccggccatcattttataatatattagcatgcaggtcgatgattgactatgactacaagcatgtggtcgtcaccgaattgcagttgtgtgtgatcaagttgagttcgcagtgcaaatgtatttctggaatgttgtcgtggcatgtgggctctcttaattccggccatagcaaaactatccgtcgcgcgtatagcgttacctgatttttttgtccatttttattgtctccgatcatccctatcatctgtctatgtattgctttaatttgttgtttttttattttttatgaataaaatcagttgaccgacttcgaaacttttcaagataacagtgccgatgtagcaaacctttttcaaaacaattttttttacgatttacaatatgtttgtaatgaaaaagccttaacgataaaagaattataagtacaagattttttttactatcgcatgatccatacggtcaaacggagctaaatttttcaagtgcctcaaatcaaaaatattgaattgttaaattttatctttttgaactatttgttcaa

SEQ ID NO: 14113 - DNA, 1755 bp, Heterodera glycines
atttatataaaaaattttaaggtgtcctttggtgaacgactggaatgaacgcgtcgtggttggagtggcagcaaaaatcaggtgggcattgtttttgaatttcctggattaacccgccttccccttcgtctgcctgttttttttttgatcggcctgctcatttttagcagcaattttcaaaaaaattcccgttgactattttttttaaaattctttaacaaaaatgaacaaacgttctgaggtcggtcggcccggcggtcttcctttccatcagcaggtcacagagctgaattaggagcatcattaattagcattaattttttttttgtatttttttggcacttacccgcaaaacatccggccattcggcgaccaactccttccgggccgttctcatggcccatccctctaaccgccggacctcccgcttgacaaacgccctcttctcctcctccccttcaatctctgcccatcttgtcgacgtcatggcaagcttaaattataagtttatttatttttgtttcacttttttaagtcttgaggctgcaattaaacggcaacaatgtgttttactggtcccagaaattttttttttttttttgtaatttctaaaaacacgtttcgagaattcggcatccctctcgaccaattctaatccgaattcgaacaaaagctctaacaaatttccatttttaatccaaaaatagttgaaattatattttattgaaacagtgatgactttcgctttgtttccatgtatttttaaacaaagttttgagtcagaagatttaacaaaaaatttttttttagaccgaaacgcatggttttgccaatttgaactggtcattttcaattcatttttcagttacctttctggcgacgcggcaccaatccttctcgtcctcttcccagccggacgaatgcccgaccgccttcacctcggcaaccttccccgctaccgccagcaccataaggcgcttcatttccctccgcgtgtaagtctcggggtctggcccgctatgcatcgtccagccttctctcgagctcaaaattttcatcttaatcaaaaagggattttttcaagaaccccaaatattttatatgagaaaataacggaaaatgcatttatgcataaaaagttgaaaatagatcaaaacgggtagaggggggggggaggggattgggatcacttccatttattttgccatgcagtggtttcccttcatctgcagtgaatgtgaaccggggttggtatgctaccatcccggtaactaccgtaaacccatcctctgtttacattccagtattaaatttcgtaaaaaaacaaagattcaatttcttatccagattaactcaaaaaattaagcaaacccaatttttttcttacaggtttcatttttaaaaaattttcagtagttttcccattttttgtgtacataaaagaaaatacaacgctacaaaaaccaaattttatatgaatttcgcgccatttaagccagcagaatcatttatacttttttaattgattgtgaaaattttgggctcggtgattgcgagaggcctcccttattgattgttattttaatttaattttccattttcattgaaaacagaaacgcgcgcaatccgtctgaaaattttttttttggaaatgggaaaatattagataattttttttgtggattttttcccaccacctaccacctacctgcaaaaaaagctcaacaagaaaaccttaaatttttaagtcaaact

SEQ ID NO: 14114 - DNA, 1785 bp, Heterodera glycines
ctgttcacgcccagtccggatggtatgccgaagtcctctagatgctctgttaattcaccggatcaatggttttgctgcaattggaactcaagattgtcacaaaaggcaaattatcgttagcttaaaatagagacaattaggaaaaatgagatcgaaaagaacacaaacaagagcaaaaaacgataagcgatgaaatcaataaaaaacaattttttttacgacattctgtctttttttacacaaaaaatgtctttcggatgaattattgaatcaatgaaacttaaaaaatttgacttatttttagcttaggaatgcttttcaagatggttagcaagcacagtttttaacttaagtgattaattttcaactgaaaaaaacaccccctaagaatcgacactaaaattaaaaagagttttttatttgaggtgtgccgggcaagtccctcctggcgccaccttgtaaaaaaaaaacaaaattaatgctttcttatctacatatctattttcggttaagtgctatttggtgatgacgacgcggcggggggcagtgcggaaggggaagcagaagcggcacacgaagaggaggaagaggaagaaaatggtcagcaaattgactttgttttcaaatttaaaacgcgttattttttttttttgcttgaataaattgtagtttttatcactagggttcgaagttgtatgcttttgcatattttttctgcgcatatgctatgaagaaagcggctcaaaaatagcatttctacgttaaaattttttgatttgatgaaggtttttagtgcatataaaagcatattttgggggttttcgagaataaatgcatattttgccatttttgggcttttagagcatatttcggtcatttttggcaaattttcacaagaaaaatgcgaaaaaagcgaaaaaccctaaggatctactttttgggaattttttaaaaaatacacccttaaaaatcggaaaatttttaattttctgtaagtacttaaggaaaaaaattatttatatgaaaatgtaattttgttttccgtatataagagaaaaatgggcgttttcgaaagcttttgtgaataactctcttcaaagttgtcggagcggcgcgcggttagcgcattctgttgtcacttttcggttgcgcatcgagtagcggaaagcgttttttgaaattttggcctagaaaaaagtttcttcagaaaatttttgaaaattttttatcactatcgaatagtattaattggttttgtaattttggtcaaaaaaaaattaccattgcaattttgatgaaaaaaaaaattgtttttaacgcaacgacagactggaaaatggacaattttttgccatcagcagtacagaccagggattttgatccaaatcgccaattattatttttgtttttttcagatataatcagcttattaaactgaacattgacattcgaattgctccatttttcatcagcatgttttggtattaaaattgctaatttttgacattttttaactaaaaagcatatttgtaaaatgttttaagctgacaattgcattttaaattaactgcttcatctttattgttatgttatgtcctgaaatgctttctgttttctatctatgtatgattcaaattattttaaatattttgagttcataaaaatggtaaaaatgtgattcggaaaaggaaaaaggcaatctctgtcaaatttggaatcagcgaaaaaatggtacaaaaatttgacatataatttttttttttttttgcattattaaaggtaaat

SEQ ID NO: 14115 - DNA, 3378 bp, Heterodera glycines
aggtctagtccagtgaaatctatgggcttttcgtgtttagcttggccctggacctggattttttttttcgtagttgacctggcctggacttgtttcctggacaaaatccatgcaaatccaggtccaggaaaaaccaggttgccgtaaaatggcctgaaccttgatcgtatttaagcaaattttcaagaataataataaaagcaggcagaaacaaaacatcctggcttgtatcaatccgcatcagagggtaagacgcgcatagataattccgcgccgtggggtcgcgcacggcgaactcaaatttccgtcggtcacaaaaagtgcaaagaattaaagggaatcgcggatcgcggtcgcgctccatcactggtgcacataagtctttccgatttaaaatgggtccccgatcgttccgtcactgatttttgacgacaataccaaaacattaattattaaatggtgtaaatacgtaaaacttgcaatgagaataaaatgttttaactttgtaatgaatgcacttttggttactgtgctcgattattaggagcaacagcacaaatattcgcttcgccgaatttggagacggacaaaagcttaaagaaagggtggggggaggcgggggaatatctgtcaaataggctggaacagagtgtgactgactttctgactttgcccatccgtgaagcgaagcccattcacagcccatttagagtcagtcgaagccgtggtcagtcatccctccccccccccccccccgaaggggcgttgaggtcggacggggattagtttctcccgaagggcgtggtgggagtagctccgccctttgggctgtgtttattcgcgacaaaaaatggcaccaaaatgtcgggaaagcgcccccggggggaggcggaagttgtaaatgcggtggcgcaccgcctccgctcaaaatggcggtgcttaacggcgccaataaggttggtagacaaaaggctgaggtttcgcctgttggcgattgacatttcattgtgggcatttaaatttgaaaaaataaaaaaaatgaatacggtagcaaaaagacgacaaattccgaagttggcatcatttcgtttcgactaaatcgttgtgacaaaatctctttgcagcaaaaggtgggagacaaaatgtcactatggataatgtgaaacgaatccatcgaattgaaaatgcgacttcccttttttggaagggtgtgccgccatttgactcattaattagaattaatgacctacaatttgcaattatcccacaaagcccaagagaaagaacaaattcaagcaaattctaataacaaatgatcaaaagaatgcaaatgctttcttctctcttttttgaaatttcctaacaaaattcaaactcatctcttgggacaattttccggtgatgccactccatttgcccttactcccacatttaatggaaatgaacaaaatggcacggcacttcctcgtcccctccggggcttccgcctccccctcccctctcccttcttttgccatcacacgacggtgcgcatttcgatgccaggctaatctccgttaatgccacgaccactctcagatgattagccaagtgatatatggggaagggattggcccgtgaataaacagtggcacacttccatttcctgatttggcggaattacaaaatgatgccaaccatcaaaaaattttaaaaaaactcagaaaaaattatgtctaaaagggaagggctaattttcaattcttttttcctttcggcgtgtaaaaattcaattggcactgtttaaaatgcgcaacttctcattcgcttctgccgcgtgtatcggactgaatgcgcttatttctcagccaccacccacgcgctaattccccgggggggggggggggggggggctctgtccggagcacggattaatgttgatattttccgcatccaaaatgctaaggacgaaagcgatgaatgaatgcctcgggtggaaaagaattttgcgcatttcccaccagcccagcgtgaaaactgaccaaataggaaggaattgacttaaacgtgggcatttaaaagaagcgatgatggaagggagaaggcgaatttaataagcgaaagatgcatttgaatcatccaaaacatttggcattaaagcgaaaaataaacaacaaacatttttatggaatcacagcaaataaaagtaattaattaaaagtttttgtggaagctagtcgttatgttagaccaggattagtggaaaattgtattcgcgcagctaagctcatcatcactcactcccattatccccatactgttcccgctaactgtctttcccccattatccccatactgtaccaactaacttcttcacccattatcgccatactgtacccggtgacggtctttttcccattaccccaatactgtacccactaacgtcctcttccatttcccccttactgtacccgctaactgtcttttatcattgtgaatctttcaaaagtcctttttttctctgccttccctcttgcattgttcttttagtacttcaaaaatgccctctcgttcattcattgtcagcctccgagtgggcttcgaaaaggtaattatgcgcacagagtatgtcgttttcagcagaagggagggaccgattatttatacatttggggggggggggaatgacgagttgcagcagattaacctttgtgaagggcgcttcttcagcggagattagccaaaagatggccggaagaatggcaccacaaaaacaaaaagccaaaagaggagaagcagcgaatgagtgaatgagtcgaccgaaccgaatttggaaaaaacctaaggcaactcgaagcgtcattcatttaccagagatttgtcaaatgtttatttccaatttgctaaagtctcaatgatcccgccggattaaccttccaagtgcctgttaattcggtgtcccccgagtgccgtcgggacttcctcccgctcccctccccccgtcctttcctttctttcttcttcgtgttgctgctgctgatgggctcactggttggggtggctggtggtaattgatagtttgctgtttctttcttctcttatttcttcttcctcccgtcgagtgaccctccaaaatgcataattctcgcgcagaacggagacgaaattaacagacgcacaaagaaaaagacacatggcaaaacagaaggaagagaaagagccaacggacgaaaaacactgatttatttgccaatgatggcaacaatttaaatatgaattaggtattttaacaatgactaattaattgcctgtggctatgctctcttccattaagcatcgttcatttttctctctttctgacgtccctttccattgcgctctctctcgtcttccctctct

SEQ ID NO: 14116 - DNA, 3871 bp, Heterodera glycines
caaagaattaattaggcaaaaaaaaagtgggggggggggagggagagacttaggggggcaaatgtaaaaacgaggtgcgcttcatcccatccatcgacgagtgagagaaaatgccattccaatgcgttttacccattctgccgtagaaaatgaaatgactgccaatggcataaaaaaacgggaattcgactccgtgttttgccaaattgaccctccaggggaggaaagtcggtgatgcctttgtgagtgtcagtcaattagcccacgtaagtaaattgatattttaaaatttccattaaaatgtgatgggaaattcctcttttccttccctggtttttttattggctttcccttgtatcgatgcctttaaacccctcggggaaaagcaatgctgtctttgcgcctcaattagccaccgtttaacccttcccccatatttggcttaatgccatcgatctgccccttctctctcatttagctcccctaattgcccccatgcctttgccaattcaattagcatcgtttatcgcccccatttgctggttatttgggttatttgctctcccttccttgcttactcaaatgccattatcgctttgtgtttgttttaggtattcacctgtgccgtctgtcccagacaattcatttgcacactcatctttgtctcgtgcgatctctgcagattttttgttttgtctgtgtcaccgtaattttggataaatttaatggaaaaatactgtataaaatttaaaataattgatcgatcgattcatagggcacagattcgtttttgtttaatatgcaatggaatggcacggcaaaagtgcaaacaaaaaaaggggggggggcaaagggaaccgcccacttcggcgccggccttttcggcgccgttgctaacaacttttttcctgatcaaccaaattaaaaatttttgttatcattcgatagctcttcagattctctattagtctgtaaaatttcaaaaaatttcgtcagtttacaaaaaagttatggccaaaaaacctcaaaaattaactttttcttggctttttcggcgccgcgtggcataacttttttatttttgaatcattcatttctatttttacatgtaaatatagagcacacatagagctttcaaatgatgccagattggctaaagctaactgacaaataaaaaagttatagcatttcaaaatttgcggcgccgaaatggtacgcgccgaagtgaccccgacccggggcaaaggatagcaaaggcagcggcaaagttttggccgcattggcccattttttgccccttcctttcgccgtggttggaatccgtcaacaaagtcatctgtttggtaatggttgtaaatggccgccctctcaatgcatcgattttcgccggaagagaattgttttttaaaaaaaaaaaagggtggagggataattaaaatggccgaacgaaaaaatgccgtgccgaaaaatccaaatgataaacaaacaaaaaaattaatgaaaaataaatttgagcccggttcgctgaccaaacaaagaacaaattcaattgaactaattgaagagaaagcgctttttggggttttgtgtaaataaaaatgattttgtaacaaattttatttatttttttaatccattaggtttggaagcgtggtgagtcgaagcgacaaaaattgcctatttcatattgttagacaaatttaaggcgaatcaattgacgaagctattagtgatcaattaagatctgctgatgtttacgaaagaacatcaaatccggagatatttgtttaaatttaaatcaaattattttgcgaaaattttttaaaatctctcttaagcttttagcccatttaaaatgcgatatgaattttctgagttctgagattaaaaccgattccccctgcaatgttaatccaagaaaattttcgacttcaattttatgagccgatcagaagagaagtgaggcaatggaaatggccatttaacagcgcaaaatataaaaattcataattcggatttactaaaaaaataccaaattcatttttcaccaattttagcattcgctgattgtcaccaacactgacgtggactcactttgtgcaacaaatattctcactgtaataaacacattttccattccattttttaaacacccggccaactttgtctttttgtgctatttgcgaaaataatttcaattaacattttttgacccaaaacgcgaccatttatgaggatattatgataaattaaaagacaatcccgaggaaaaacttcaaaattaaccctccgcgaatgattttagcacattttctcttgtgacgatgcctcatacactctcagtccggtggactccttcccgacgttggagaaggcaatcaacgaccatgtcagacaggccaagaacattgtgctggttaattgcatcggctcgcggtctgtcagcgaattgagcattgcccgactgacggacgaagtcacaaaaaatatgaaatttttaataaaatgatccatctttaggtgacattttgggtgttggagtcgcggagaccgctcaatttggaggacatttacaacgcgaactctgtgcgcgtgttggccccagcagcggaagttgcggaatggacactgcccgaagcgagtgccatttttgaaacaatggtggagcaggaggacgaagacgacgacgacgaagcgagcgacggggacgaggaaaaccgaccgccgtcggtgggcgacggggaaaaaagtccatttaagaaacaaatagctgagctaaaaaaaaaatagcaaaattcggtgatttttcaaaatcttaccgaggaaaaattggggccttatttgaatagtggtggtgtttatgacttatgaaggcgtaaatttaggacgaccgcgaagaagcggaggacggagaagcggcgatggcgggcgattccgagtgagtttttacaggaattttaaatttataattccacaatggtctccgagtggttttttggttagccatttggttttgcattgaaatatttacaaaagttagcatacataaaaagggggtttggtcggaaaaattttttgcgaaggggggtcgggccgcccgatgacctttttttcaaaaaccgtttttttcggcgcggtttttccaaaaaattttcgggaacagggagcgggccggcggtgccgataggcgccgccggggaaaattttttgaagttttgggtgtgctttgttaacagattttcaccaaaaatggccaatttttgcgattttaagccaattttttaagaaaaatttggatttttggggtccggcggtgccgctaggcgccgccggaaaaattttttttgatttttaatgaatttgttaagaaaatttccaaaatttgcgaccccccattcgctgcgaacccccccccccccaaaaaaaatgtgaacaatggaatagaaaaagttttctcaaatataaaaaaatactaattattattttgcattcgtgggaggaaggcaaaataaaatttgaggaaatgaaatttctaaaacaaaaccttgaaccttcggttaaaaaaaacgaaaaatttagtgcttttataaaatttctaaaattaagtttcggaaaaaatccgcgttttttggacctgccaaacgcagtccaaaaagcagaggaacaccggcgcttcgtacgggcccgtctgagcgccggtggcgaacgccgagtgagcgcagcgcaatgagaacggatggccggccatcagccactcgtgctcaatcagcgattggaagccacggaccttcagaaaaaacaacaaacaattaaacaaatcgacatgacaattattaatattttatcgaaaaaaattaaaaaagaaattaaa

SEQ ID NO: 14117 - DNA, 4505 bp, Heterodera glycines
gcgttcttcatttgcttgatgtgaacctcattcaacttaaaaagaaattaccaaaaaacagaggaatcaaaacctttgtacgcctaacgcttgtacaacgtggagtgttcgcacccgcagcaaaaagcgtcggcgctgacttccgacgccgagtatctgtgactttttgttgaaaaattatgggaaaattgactcaaaatacctgcaacgctttcaacgtcgcttgcatcctctcgttgctgtaccgtgtgctgagttgcattgttttgcgtacccacgtttgaactgtgacgggttcttttatttgaagagcctggcaattgtttaatatatattgttttagttttaattttgcttaaatcaagacctccaataatgcttaaggcctgtaatccagtggtggtcggagtcgaaacaacacaggtgcccagatccattggggacgtacccacagcaggttcaacagcaccccgtggctgactgcattgtgctcggatattggttgaggttgatggcactacaaataggtattaaattctcatgaaataaaaacaaataatggagaccattgccgaggtcctgaataggactggtggctgctgtgctggccaatgaatcctgtgaaggaatcgaagccgcacccgcaacactgtcagcttttcccagacgtgaagatgtttcacgtcggagcattctctctcgtcgtccagttaacgttctctttcgaggcatttagtatttttgaaataattgctaaataatctaaagcaaaaaaagtatatgttacgaaacagaaggggagggtgtattgtttctcagcaaatggagcgaatgaaggggagggaacggtgctagcttcttttatataaaaactaaaaaaaataaaaaggtcgtaaactgtaacaatgaaaaaattggagcgaacatatatttgtttggtcaaagtgaactgacaaacgcactaaatcagagtccttttatactctttacgtgtttctctgcgtaggaaagaacacgctgaaaagtgaagccagtgaaaaatgcaagcacgcagggacctctaggtctcaatatgctgggacctgtgtgcaggcacgcagggatattgttcatagtaatttttcaaattataattaggtatgcaattaatgcttaaatattttgtgtccaattcctttaaagaattttattttttcaatatttatcatttaaatgttaagttttttgaggttagaaaataaaataaattttcattgtactaaataaaaaatttgtttttcagaaatggggaattaagcattgagaactcaaaaatcttaaagtaattattttcagtgaaaatattaaagaaatacaaaaatagttaaattacttaaaaaaattaatgaattttacatatgaattttatatataattttcactgttgaatttttgtatatttatgcaaaataattatgaataaatctccatcatatagaaattttaaaatatgcataaatttatcctaatatatttttatgacttttaaccataatacgaaattgccgaaatgttgaaactgtcaaaagatatgatgctacgacattagaaagaagatgcaataatgtacactacaaaaaaaaatgcaataatggtcaattcaaaaaagggacaatattggtcaatacaaaaaaagaaaagaaaataattaaaaatacagtagtctttcgcatatcagagattatgttatataaacgaaaatttcatttcgcataattcagattaaacacgaataactttttttaaagacaatataaaaatctggaaaaattcatgccagtataacttttgatgctgatcaaaaaataataataattgtaaccacggtaattagatcactcttacagggtgatcgggagtgatctaaattttaacaccccagcaggtaacttgagttttctctagcaattttctaaaattttaaaactgcaccaaatcaacatgataattatgtaaaaatatcccacagtcattttttaaaattttgtttatataattagatagcccaaagatttctctacaaatagttaaattcccaaaaattttcttcaatttaaaaaagttagggttaaaattattgagtctaagtttttcgagctattaagttacaacttcttgtaaatttttgctaaacttttaaaaattacttaagttgtagaggatatgtagagctacattataatatcaagacatttatcacttcgtcttagcacctaattacacaaaagcaaccaaaatttagattatttttctcaaaaactattcattatttttttattaaattaaatgatttattaattaataaaattctttatttttttcggcctgtattatgatatccttttattggtttttttgtttaaatttattttgtctttttcaagcgtgtttttaatgttttcttttatttaattttgatatttttaaaatcttagaattttcgacattttttttgctcatttacttttaggtaatataagaaatgttttttagtcgaattcacattttatgaatgattcgaaaagctaattagttgcgcaagcacaaaatgataaaacaaattattgtactcattttatttatttagttttttaacattcttcatttgtgacattatttagacaaaaaataaaggatttgaaataattcagtttggcatgaatttaatttattttaatatatcacaaataaaccttgagatctgaaatcgctttttgttcgtctcttcttgactaatcaactatttatcaattatttaattaattaattgtcactatttttatatgattaaaatgtttctatttggtaaatatcggtcatatggccggagactaaaatggtcaaaatatatagctctcggtctgtaatgaaagaatccaaaagaattttttgcggcaacaatccctgaagagttacagacccggggctgaaatggccaaatacctttgggactgaaccgtccaactagtaaaaacacatgaaattgcgacaaaatatatgccaatcgcttcctttcggcatgtaacccccgaatccgaaagaatttttggatgaaaaataaatttaccaaagttttaggtcctcaaaaacctccgaaatttactttgatataaaaaccaatttaagtgagccaaaaaaacgctcaagaacacttgcatctttcgaacttcgcaaaagggagcatgcgaagcagggctgcatgcaatcacggattacggattacggaaattacggggttttgggagttatggattacgggttacggatttttgggatttttccgtaattttgatccgtaatttgacttttggattattttttcgagacgatttcttgtacgattatttttataaaaaacaaatttttctattttttgtttaaagggctacccgtatttcgatttatttaagaattaaatagatttataattttttatttgttgttgttaaggctatttgggtagttcgcctagaaaatagaggcatcacttttttgtcacacctatttttcacgcattttatgaaaattcataaaaccttagccaggtgaggggaggaattcccccccttcccccgcccgaaatgaaaaattaaaaatttttacaggaaaaattgggacttttaaattttttttgtcgatttttcttaataaaatcattaaaatttaaaaaaaaatttgcccggcggcacctatcggcaccgccggaccacgatttactcgattttaccttatttttttaaattttgactacaaaatggcaaaaattagtctttttaaaaatggttacaattcctgtttttgctgtccagcgctgaacttttttaaataacactaaataaattttaccaaaaaaaattcttcggattcccccccccccctccgtaatttttttctggctattaaaatgttgaaataattatatacatatacataaatccgattataatgatcagactttcaaaaaattttcaaaaatcaacccataaattcaaaaagaatgatttaatcagacacaaaattataaattatttgtaaaatttaaataaaaaatgaagaaactccatcaagaaaatcagttttttgatttttattaatcactatttaaaaatttttttctaaaattctgacaaaaattgatttttaaaaattacggattacggattgcggattacgggaaattacggggtttttggacccccgtaattacggattacggatttccgtaactgagaaaatcgccgtaattacggattacggatttccgtaattgcaaatccagttgcgtgcagccctggagggggggggagagcgagagagagacaaaacaaagggaaatgggataaaaaacaaggagataaaacgggagaaggtacataaaagagagaggcaaaaaaaagagcggaaacggaaagaactgaattttctaaagacatgaattttaaaaaaataaaaaaagagagagagag

SEQ ID NO: 14118 - DNA, 4025 bp, Heterodera glycines
aaaacaaggaaacttcaattgacatccatccatttgctggaagggacaccccaatcactctgtcaaattccaacgctcacaaactcccaattccgatcactaattgcgtaattatgggcggacatcgccccttccgcgactaattaacgccctccctttattaactcctcggagcgctttgctcacatgtcggactgtggcagcagacaaatgggagagagtaacaaaaacaacactaacaactgacgcctgtcgcatcgcaggccttttttgtcgtttgcaccgcatttagccctcgtgttaaaaagtcaattttataaaccgaacattcatacacaaaaacaggagtaaatatagagtcatcagcaaaaaccattgaaaaagattttcaaaatatcatttgcgtccatttggatgtttgtggccctaaagagggccgtttgggataattttggtttcatttcatcgcagtcacatcatcactttgacgaggtgtacttcgtcaccgccttggtcccctccgacacggcgtgcttggccaactcgccgaggcagaatcagacggacggccgtttggatttcgcgcgaagagatggtcgatcgcttgttgtagtgggccagacgagaggcttccgcggcaatgcgctcgaaaacgtcgttgacgaacctgacaagcaaaattcgtgagtgatcgttaacttttgaaaatgtcttacgagttcatgatggacatcgccttggaggagatgccggtgtccgggtgaacctgcttcagcacgcggtagatgtacaccttggaaggggacaagaataccgtaagtactttttttgggtcggggtcacttcggatatgattatatattattctttcatattgacatgtttttaatttaatttagttttattttatttatcgagcaagccacatgtgcattagcgatcttatatggagcctaaaataaacaaacaaataaaaatgatcaaataaaaaatacgaaaaattgactgaggcctcatacagtggaaggtttccagtttccaacaacatttgaccaaatttttcattttgtgtgaattttgcccataaaattgggcgtatgacattttctcgaaccctattccatacatactgatcaaaaattttgggattttcttcaaaggacttatattggtccatctctttgtcagtaatctttttaaattcacttggttcagtaattccatctttgaatttaatttttttttgccaaattaaaatagccaaaaaacgaggccttctcaaagcagtatttttgttccacattgtcccatttaaagccatccatcataaaagaagacggatgaaaatttgaaaaaacaaaatttttcccgaaaaagaaagctccttttttgcctgaaggtgaacttaaaacaattggtttccaatgtggctgataaatttccttattttcatttttgaaaaatgttttgacccccaacggttccgtgtttgtagtttcacatttcgaatttacccaaaatttggttcgttttgtgcacaaagggccttcaaaaatgtctccttcttcataatttgattctggagattgagactttcgttttactcccaataccacaaagggatcaaatttttctgattggatttttccaaaattttcaccttttttggcatttccggagttgggaagaacattttagttgttgttgttggcaaatatgatgaaaaatgtggcgccacaaacgaattgtatgaatggcttcccgcggcctgcactctgtgaccgtctcccaattggttccaattcactctaggtgcgtttgttgaagctgtctcgtgccatctttgttcgccccttttctcaattggcattccaatttgttccaattttgtcaataaattgtcaatattttcttcttctggcactcgaacaatggccggaaaccttttcttcataacgtgaattggcactcctttggggacaacccaaatacaaagcagttcataacatatttcttcaacttttgttagaactgccaacagttcagcgtccatcgtttctctccaaatcactatgcattgtgtaatcgtgccaatttcgatttctgtgccaattgtatttttgtcccactttctcggtcgaaaaaccatcgccttcatttccttcttcctcattatttgcctcagttcgatttccacttgattatccacaataaaaaccaaaattgaccgtgccaccacttttggaatgttttctggcacataattccgagtttttggtttttgagaatcccccaacaaatcctcaggaattttgaattttttacttttttcctccaacggattttttccaaaatgttgttcatcctccaacggatttttcagcaaattttgctgatcctccaacgaatcttttccaaaattttgttgatcctccaacggatctttttggcaatttggactgttatctaataaattttcgaaatttggtggatcctccaacggatctttttggcaatttgaatgttttttggcttccgaaattttgtcattatttttgctgctttgaaccgagactttcatctcgaaattctcatccgccgaatacatcagttcatcatcactgctttggctgtcgctcattctgtcagaataatgatatgaataatgagtaaaaatattattatttaaaattaaagtatcaatatattttttttaatattttaaataaataaataaatttgattttattaatagattatataatatttaattaaattatctaaaattatagctattcttcgccttcatcctctatttctaagggatataataattttgtgggtctttccgccattcggtttcctatttttaatttaacagttctatcagaaagaatttcgaaaatttttcctaatttccacattgatcttggataattatcctggtctctcacgattactacttgtccgatttttgggtatttatttccatctttatttttgttaatgtgcttttctcttaacgataataagtatttttcactccattccttccaaaatatttcacttttaaaaattgcctttttgtaaatttcaaataattcttctcttttagttttcttttcaaaatattcatttatgtcttcccgatcaaatgtcggatctaatttcaatgagaaaggttctccatccgtcggatttaatatatcgattggccttaatggttcaatcacttcatcttgggttatatagcttaaagggcgttcgtttacaatcctctcgacttcgattaaatatgtcattaattcttcaaaactcaataaccgttttcctaaactccgaattaaatgtgtcttaacaagtcctatcattctctcgtaagctcccccgcgccaactcgcatatggcgaattaaattgccaatcaattcccaaatttgatgaaaaattttgtatcgtaggatcacgataaatttctgaccatattctattttgtttattttcttcaagtgctatttgttttaatgctttacttgctaatacaaaatttgtaccattatcggaaataattaattttggcactcttcttcttttaatgaatcgccgaaatgctaaaagaaatttttcggcacttacatcggaaactaactccaaatgaattgctcttacaattaaacatgtaaatattgctccccaacattttttattgccatccaaagtttttacggagaggggtccaaaataatcaattccaacatgttcaaatgcacttttcccttttactctaaacactggtagaggagggtttttaggatatgtatatttattatttgtaaattttgcacaaatcccgcatttttctttgttttttctttttaatatttcataaattttccttctgcttttaggaatccaaaaattttctctcaatttgctattcaccaattcgcgaccgccatgcattgtcttcaaatgtgcatctctaatgaataaagtcgcaatatatgaattatttggaatgaaaat

SEQ ID NO: 14119 - DNA, 2885 bp, Heterodera glycines
ccgtatttataatttaataatgcaatagattctccccgatgtgaagaagatgatcagttccgcctgaatgaagggcacacgacacaatgatctttgtttagatttttagacaaatttgcttgttttgaaatatatttttatcacatcttgctggcattttcatttttctgaaataaaaattggacactgaaactgaaaactatgtttttaaagtcattttatcaaaatatcttcgtgggaattcactgttttcgtaaaccttaactttagtaaaatgtgtgaaccaattggggtgagtgttttttgtttatgatttagttttgtcatggtttagaataataatgatgtttccgcatcacaacatttccctggtgccagtggttccggcggtttgacgtcagttagccccctcgaacctttggatccgacaaagtttcgtaacataatggtcgagaagcatgaggtcccttcagcattcggcaatttttgtgacaatagcgaaatgagtaatgcgtgaaatggaagatgtcctcattttgtcttttaaacagcttccgatttggtttctctgggccagcagcagcagtcgtccactgggccttttctgcatccgtgtttccctccagcagctgtgtccgctttacatcagtcaaatccacaacccttcaaagtccaacagtcgccatcgattggccaacagcagcagcaacaactgtactttgttcagcaaagtatcatcaaaaacatgttgtgtgagactaactgactctatgcctttgtttcgcagatgcccaaggcaacttcggtccaatgcattcgtcttcatccacctccccgctgtttggtgtgagacagatgagttactttggccccggtggtgcttccgttcaaccaaactggaaccagcagcgtcaagtgatcataaaaatggctcctaatatgactctggcaaacaaaaaatctttaaggcccaatatattaataaccctcaacttggtcagcaaaacaacataatgtcacctcctaagcaacaacaacaatttgtcgttgcaaattgtaagccttcgcagccgtgccaaatcagctcttttcccgctgacgttgtccaacaacaacaacaaacgatcggttttcctccgccaccttctcaatcgcttcagaactctccccctgttgccactaaacaagaactaaaccaacaccaataccaccagcaaatgcttgttcagcaacaacaacaacaaaggtacgctacttcatatacccaacaacagtttctgtcacaaccgaaccctactgcatttccgatggggtcaaattacggcgttgtggaccatcgacaatttatgagccagccatgttcaattccttcaggtaccagctgacaatgagtaattttttgccatttatcgagttttgttaccattcaagaaaatgtgcaaaatgacccgtcggcgcaacaacaggtggccgtccaccagttaaagaagactcaatccatgctttttaccgctccttctgatatgactcatcaacaacagttcggctgtggcaacccatcaagtaattgcttttgggtcgtctcaatattttcgaatcataaaaagttttgaagaaaaatttaaacttttcattaaattagtccaattttttgattaattatttattttttgataactaaaaagggcttagaaagacggagaccgcttaatttgatgattgattagtgagaaaatattgtcatagaataagtgctgtgccaaggtaatttgcacatacctttatgtctaaaatctcctcaaaattctaaacttagataagccgaatcaaacaaatttgattttcactgaaagaaactgttcgaattttagaataacaaaacttattgttagcaataaaaaatttctaatgataataattattgggtgacctaacatttttgcccacgctttaggcgtcacttttccttctccttctgcgtctttcgtccatccgtcgccctcccaagatttttctgtggttcgaactcaccataaacaccaacaaccgatggttcgtcttccgccttctcaacaaactccgcatgctcatctcatgcatcaaatatcctcccaatctcttcaatttttcgggcacgatccgcttttagctgccactctcaatcctgatatctgtttggccggctgtgtctttcttttaatcgacgactgtgacccgcatttggttgacttgtacgtcattggttgctcctccgtaaaatcttccatttcagcactttactgccgagtattattcgcttttacgggggttggtggttctttttagactgtttcaattatcatggttaatatatttttaggcgacgtcgaatcgaacaatccccgtggcattcctgaggtagattgcctgctttataaatgatcagttttgcttgttttagcgtgttacgcacatcatttgttcaaattgggtagaaaatgaggcgctgattttacaggcgctgacgactgtttgttattttttgtcgaatagttttgaaaattatgtaagttcagaatttcgccgaacggatgccacgcaaaatgaaaaggatcgtttccctcaattggcttaacgacgcaattgcaaagagacaagtgactgcgccaagtaaagcttgccatttgccgaggtaatcaattttttgtttatacaatttgccgttttttttttgttaatagcatttggagttcaacacgatacaatccaaaaacatttgcaaaagtaagtggatttcactagcatataactataagcaaaacaattggtgtggagaagtttccgaaacgtcgtcggctgaaacgtcatcgtgacaaaacgtcgttgtgccgaaaaattcccaaaaa

SEQ ID NO: 14120 - DNA, 3576 bp, Heterodera glycines
  unsure (1)..(3576): unsure at all n locations
aatttaaatcttcaaacaagcaaattacatttcttctgctttgtaagatgcacactttaattttgtttatgagaaaaaccgaatattattagttgttcttaaaaccaaattgctatcaaaaagaataataaactgaaaatataagcaataaaacaattttcttttgacttgtccatttcaggtgccggcagcaacatcagcaactctgtaagaccttttttctgttgaaaatgtgttcgattatactttttaccttctgctgctgttcagctgagtatctgcacaaatgttgtgtggatcctgagaaacagtacaaaatggtgaagcggaatacggtaattgtaaaggggcggagtcgttatttaaaaaaccatgattatgaaattcttgtcgaaaaattatttataattttgctccaaagcaatcaaatttttaattcttgatatgattgatagctctaagtgtttctcatgaatgataacaatgattaaaaatttagtgcttttgagcaaattaataagcaaaaaaattcattttgatggtttttaaaataacgcacataatgatggtttttaaatatgacataacaccattgtaaagattcaatctaaatttatttaaatcataatttctaggaagatttggtaaatgaactcaggaagaaggatgagtgtgccggcaaaaacagaaaatgtttttgctgggcacatacgaagatttactcggaatctgctggcggctggtgttaaatttttgtgctgtgacaagtcattatgttcttgttgtgaaacggttggcatggataatggctttaatttgattaattaatgagaatttatttttcatttacttaaattggtcataaatttttctttaaactggaatgaaaaaaatttaaccgaagatttgggacaacattttttaagtaaatgtttagtgtccaccaatgcagaacaacactgataggaaaaaataaaagaccagaagctaaaaacttatattttttgaaattttcttcaaaaaatctaaaaatattgaaaattcaaatttggattttttttggaatttttgctttaacagcaagcacgtgaaaaccttttaaaaagctttattaaacattagaatttatatagagaaatttctttaatattatatagattttcagtcactaattgcgccaaaatttgatgtcatttaggacataaaactagccaaattggaccaataacgaaaaaattctgtagaaatttaggttgagaattggccttatgaatttctgcatcagttgttgagaacgagtttttaagaaaataaaaaatttattaataaaattttgaagccaaactcagagaatgcccacgacattttctatttgtatggatgccgaatcggcggctgttcttcggcccttcctgaacttgaattcgttggccaattgtcaatgcggatgggccaaatgcgtgaatgggtggcgagtggctgctgtccggtcggtacagcttcaacaatgttgtgtcacgggtaaataaaattctattgaataaaagaaatatttaatttttaaaaatttttaaatgcaaaaaattatttaatgtttctttttttgaaaaggctattccaaattcatttatcgttttaatgaaaaaatatataaaaataatttgacgggcaaactgctatagagtgattgattaatttattcagcgaaagccgatttctgttttcaattgaatgccgtcgagccctttaacaaatcggaagtgccaaataaaatatattgattttaattattatttttttaatatccatattgattttaatttctttatcaacattctcacatacaaatgccaaattttcttatttttggatttgctaattaggagtatttaattattgttattcatttatttctcttcatctctacttcatttttatttttattttattgaattaattttagaagaataaatgctggtgcagaaataattattggttttgagagagtggtgttgctggctgatcaaaggcgtagccagaccttggattcagggggggcggggctaagtaaaaaattcgatttttagggatgtatttttgttttttgaaaccaaaattgggtgcaatttatgaaaattgcttaaaattacaaaaaatttactgcaaattttattcctttaattttgtacccgtctaagaataatttatgcattaaaaagaatttttctaaaccgagactttgcccgagattataaagaaaattaaagcagcgtttatagggttttgcgaaaataatagagaaatttcaaaatatcatttctgattctttggcgcacttcctgtgaaacaaatgaatatcttcctcaagtcaaccatattcaacacattattgctatcatttggtaacaataatttatgatttatgtataatttccaacagcaaaatttatcaaaaaaatttctctaagtatgcataataccgaaaatgcttgaataattaaaaaaatattaaataaaaatgtagtttttttcaaaatatttaattttttttaaagattattgctatatttaatattttggtaatcaaattatactaagcatttgaaatttggttgcttatgtgatgttataactaattatgaaagtctttacaaaaatacaaaataactgtttttatttttttctccatttttattttggtcattagctcaattagtagttattgttaaaaatcaagaattttttaaaaatgaaaatgagaataacaaacacttttgactccaaagacctaaaatttatgaaatgaaaagcaatttcctttaggtcattaaaaatatttttttccattcattttgtcagaaaatatggacgtgaaaaaatggatttattttatttttttttttggtattttatagacaatgaatatccttttttaagtaaataagggtaaattttgaacgacttatgtactatgaaaaaaaggcaaatccgtaccctttttttgcggctatcttacctttgcttattcgttctttgtctcatttgccgccttttttattagagcaaaggctagaaaaattcaattaaataaagacttggtaattttaacataaattcgttgacttatatttgaatgtttcatttttgatggtgtacagcagggatggcaattggaggttccaaaaatttttggaaatagaaattctcaccccaaaaatatcaaaaaccgtaattccgtgtaatttttatattttaaacatttggatgaatgactaaaataactatttttaattataaaaacatgtaatctaaaggattcattgaagaaaaattcactttgtttcatttaaataatgcacttttctttgtattttcatttcattattaaaacctttttacgcattggcaaataaatttatttaataaattattttaaaagccaatttattcgatatttttatttaaaattctttataaaatggaaaattttttgttcatctgtttattattctgtgcaaacttcggttattttttattttataattccanacggtcattttgaagtgattcttgagc

SEQ ID NO: 14121 - DNA, 3310 bp, Heterodera glycines
attgttgtgccgttcacattgatcggtgcttcccaccgatttgatgaatggacggaattgatgtaagccgcgcttagcatcaccgtatttgtgttgaaatttctgcccttattttggtgaaatgctcgaattttgtcgcattgccgatcgatgtggcctctgcgattgcatttgctgcatatattttccttctttgggcaatcctgtgcccaatgcaattctccgcaacgatagcagttgctcggcggtattttggcctttgatttgcccgtgaatttttgatttgggcgaccgtttccgcgattttggtgcttatttggcgatgatttgccatgctgaattgcgtttattttgggctttggctgctccaaaatttttgcttccgcctccgtttttagctgtgtatttaagtcctcgacgactttgtcgaataatttggacgtttttgtcgtctttgtgccctctgctgtgagacgcgcgaggatatgttggcgtaattttgcgtcgcttggtgacttaagcgacgtaagaagaaccaggcatttgaattcctcttcgtttaattccgaaaaacggaatttgcggagggctgccttaagtcggttcacaaaaatttcgaatttttcgccgttctcgcggcacactcgcaggcattcatagcgattaatcgctaaagatggcggatgtgagaacaatttaataagacgagatttggtgtccgtgaagttgaatttggtgatttcctccggcagacagtagcgcttgtattcgccgaaggcggccggattgagctttgtcatcaacaatttgactttcgcttcatccgccatattggccgctgcgcaatccaatgcgaattggaatcgctccaaccactcctcgaattcctccacattttctgttgaaaacggatgaatatccggcaatgtgatgttttgtgccggtggagttgtggtggatgtcggcgcgctctgctgtttgatcgcttgcgttaatttttccaaaatttccgcgagcgttttgtccattgttgatttggaggatggactttagacgaagaaactgcacatagcagaaccgcacacaagattagtgattggttttttgaagatttctgcgaaatccaaaaatcaacacgagatttttgaatttccacaattcgaacaatttcaacacgagaaaatgttcgaagtgaagtcctgaagaacgggcgtcgccaatgttgagccggttaattgctcaaacaattatttgtgaatgtcgaacaccaaaatatttatttaacacaaatggaaaaataatacaaaaaatatttgtcggagggacgaagcaaattggggagcaccaaataagaaggaaatataacagaatgaatgtgtgctggacgaagggaagggcaggaataaatggggaaaatcaatatggggtcaaagagcccaagagagggaattgcaaatatttgaattatttgcctctctaacacctccccttttaagtccaactgatcagtgccatgatcagtcacacataggacgatcggctggggtcgatttgaaggcggttaacaggccggcgatttcgaatcggataacggcggactggcggtgattgattggatggcgggacttctgccaaattttggtcccttaatggaattgggaggccaaaagtgccattgatcacatcgagcgggtcttcgatgtcctcatccggaatttgacgtgcgcggatttggttggcatgaaatcggccgcgagaattgtttggcaattcgacggtgtaaattacaccctttttgtcgatgattttgccgtgtcgccattccgctgaattgtgccgacgtgtgaaaaccaattgtccgatttaaaatgatcggaattttgcgccgtgtttgcgattgaattggtcctccattttatcgtccttgacaattggaattgacagcggaggccggaggaggtcgaggcctattcgaggctttcggccaagaaataattcggccgggcattttccatccagtgtgtctgatggcgttgtgcgatatgtgagaagaaaagtgtcgagcacattgccgtcgactccctccccttttattttcgcaaatgccctcttaaatgtgtcgaccatccgctcggcttgtccgtttgattgtggcatgtacggcaccgtaaaaatgtgatcaattccattcgatttgacgaaaccttcgaattggtgactttggaattgagtgccgttgtcggaaacaattgtttccgggatgccgtagtgcgcgatcaatgagcgcattttggatgcatttgtagaattcatttcaaatatctccggatattttgaaaatgagtcgacgacaatcaaatacatttttccatgaaatggtccggcgtaatcgatgtgaatgcgtttccatgggccatcagattttggccatgactgcagtgtcgtcttgattggatttttggcgactgctgcgcatgaagtgcatttttggacgaacgtttcgatttctgcgtccatcattggccagtagacatgcattcgggccaaagatttcattcgcttgactcccggatgtccttgatgagcagcttgagaatttgcttctgcagtgatttggggatgactgtccggtcgccgaacatcaggcagtccttgacgattgaaatttcgtcgcggcgccgaaaaaattgaatgaatttggcttcgtccagcccttcaattggctgaaaatttttaggtgctggccaaatatttttgacaaattgacgaatttgttgaagtgcctgatcatttgccgtttcttgggccaaatttttgaaggtgatcggcaattggttgacattgttgatcaaatttctgtccaatgccgattccacttcgaatgaggcaataatgacttcgtcgtcgtcggattttgacttttggacggaaattaggcgagataatgcatctgcctgtccaaacttgtccgttttgacgtattgaatttcgaaatcgtaggccgtcaaaataagtgaccagcggacgagacgattgtgcgaatgcttcgggacaccgtctttattgccgaaaattttcttcagcggctggtgatccgtcagcaatgtgaattttctgccgaaaatcatcttatggaagcgtttgactgcttccacgagtgctagggcttctttttcgatttgcccgtaattttgctcagccggtgtaagtgaacgcgaaaagtgcgacatggcttttattgagccattggcaaatttgtgtgatatgacgccgccgatgccatgttgtgaagcgtcggctgcgacgatga

SEQ ID NO: 14122 - DNA, 3615 bp, Heterodera glycines
ttttgttttcttaaaagactgtccaatgcgtgccaaacaaacatttccttgatcattcacgaaagtttgcggttatgaaaacgcattggtagaaaatgggacaaaaatgccacattttctttgtttggaatttcaatttatgccatgttttacaacgaaattctttgttaaattttggccaaagaccatcgaattccgcaaaggttaatggcaaaaagcagttttaaaaaatggcattttttggagactgttccaagttttattggcttaccatggccaaatgtgggcggcatgttgcgccccaacggtccgtccaccatttgcggctcccacatcattccggcacccatcagctgttgctgctgcatttgctgacggcgaatttgtcgctgggcctccagacggtccaactcctcctggcgatgcagcaattctggaaaaaaacaataaacaaattgatcggacgggacactaccattaaataattgcagcaggcattaaattccaattttctcgcaattttccaaattttaggggcaaattaaatcttttgagcatggaaaaataatttaaaaaacttttcattattttcctccatcattttttggtatgaattgttcattttggtactcattgtcagatgggtgagtgagtgagtacacatgcggcaacctaactcattaagtgcattcgagtgattcaaatttgtccagatttgaccgttttatggccaattttctttattttcgagtttaaagcaggtttaatcgcttcggatcaaccaacttctttcgcccctatgtggatttggctcatcaagagctttcgattgataacacatttatcctggtcccacccaccctataaactcacattagcccctagttttttcacgaattattttatcccacccgcccccttcaccttcgcgcaacatttgcgccttgtaatcctcgtattccgcctccatgtccgcgtccaagcggcggcgttgctcgcgcagttccgcctccacttccgcgcgccgcttgcgctcaaactcgtacaagtccttccatcggcgcccgtagatgtactcgaagctgttcatttgcgcaaaacgggggcccaactcacgttcccttaatcacacaaatgtgaaacataattaataaattatattgggataggacaaaaacttaatttaatttaaatataaaaattgggcattttaaatggggcaaaataatagaatttggtataaaatttagtttttttttttttagtttttttcgaatttatccccacaaatttgctcacttgtacaggtatggcgttcgctgaattgtcttctcacataatccatcttcgtcgtccttttggtccaaaaaatcggcttgcaatggacgcgaattactgcaaaacaaagcagagacatcaaaatatgtaattctaattaaggtctcaaaaatattaatttttttggaggggggggggggggggtcgatcgggcgaaagcagagaatttcctaatgaagaatatttacggtgttgcaaaaaaaaaaaagttttttttttaaaattttaattcatctttgtcaatataatttccaattacataaatggtagaattgcatggacagcgccaacacagcccccgtttacccgccaaaatttttttttaagttgtaatattttaatttctatttaaatttctgagtttttttctagtaaaaaaaatatgtgaattgtaaaggttcttcaagtttttcatcattttatataattttcaatgaaaaattttagcgttttcgaaaaatttttttttgttgatatttttactcaagattcggaggagacaagaatataatgcatccaaaatgcacaattttccccccgtaaataaaaacgaacgtcgtcatgaggaagacgcgctcgcggatctgcgcgatggcctcctgggcggacactttgcgctcaaactcgacaatgccttcgccggtggaccgccccttctcgtccacaatgtgaatggcacgctcgacatcgccgaaggcggagaaggagagcataagcatttcgttggacactgccggggacagttccttgagctgcaaaaaaaaaagaaatttttttttgcgttttttgagagagggggggggggggtaaattttaacaaaccccggcccgacccgtttctcaaggtgtacatcgggagtaacccaaacgcagccgaactcaacccaaaaaaaaacaacgaattttgaaaaattttgattttgaaagcaattctaaatcgcaatttacgagatggtatgcatcttttctatacaaaaacaaacaaagggttgaaaattttatgaggatttttaaaatttgaattactgtttcaccaataattttataaaaatctctaaattaaaaagaaattcctgggactctcttataaaaaaaaattttctgaggacgtaatgatacagattgagatgtccgtatactcattccccttccccatccgttataatttgttgaaaaataattaaaaaaaattacgtttaataaaactattccccctttccacaccttaattgtcgcgccatggaccgagtaacggacacgcagctgacgcccatggattgtcttcccgtccagcgcctccttggcactctccgcatgcgcacgcgtgtcctgcgcagaaaagggcacattttaaatgcccatttaacccaaattgaaacgaggaagaaatttccccaaaaggtgtaaattaattaatgatattggcaatataataataataataataataaattaaaaattaaaaagagagcagcaaaaaattaaaaacaaaatatgattacaggtggtaataaaacaaacagacattggtcccatgaaaaattattcaataagtaattggttgctcgagagtgtcgggacaaacaacaataggaaaattgttccaaagattggaaaagggaaataaaaaaatttatatatatttcatttaaataaaaaatgtataaattatttaatgctcaaaaatgtccatttttgctgctcattaaattcatcgacataatttgtatacaaataaaatggaattgtaaaatgatacaaatttgcggtacaaaaaaaaataaattaaataaagcgattcgattaggcgtggcacgcgcgcgcgcgaaaaggcacatttgcgaattgcgcattgaataggcagtaaatttgaaattcatttaattcatagtttggaaaaaatggtgcatttttgattcattggcgggggttgcatcagcagctgactgacgtccgtggaaaaatggtagagccaaaataaaaaatagcacaaaaggttggcatttcaaaaaaatagtggcaaaaaaaaacccgcatgtcaaccaaacgagagtaaatgtgggcccatattttcccagaccacgccaatttgggaagacatcattaatatttttaaataataaattaattaaaaataaagtattttttgcaataattttttaaaggtaaaagaggataagctataaacttctgctccggtgttgtggatgtgcaattccaattttattcaaaaatgtcgcataaataaggcgttagcgctattcggttcgccccatt

SEQ ID NO: 14123 - DNA, 4776 bp, Heterodera glycines
agagagtgagcaaaagctttgagcatgagtttattttgaaagtgatcagtcggttagggataacgaagctactcccgtcttttcgggattttcaaaaaaagtcctcttcattcgattcccttttataattttagctttggccaaagtattatcccctcgaaataggggactctgttctaggcaaatcggcaaaatgcctatttccgatcggtcgaatgactaaataacagaatgccaattattattctacttttaaattcaaaatgttctgtcgtcttttcctccgcaacatctgactgtctctcccatcttccgttcattattcgctcatttgattatacttccctattaaatcatttatttttaagctattgtttatggttccgccaactccgatctctttgcttgaaaaatgtaattccatcgctgagagaagggcgcgtcgtcgacttaagaaaaggacgacagaaacagtcgaaattggtcttttttaattttcaattttttgtttttatttttttgcttagatgcaacgattctctcttgcccttctaaggaaatgactgagaaatttgctcattttctgatcactctcatcgattccaaaagttcatctgaatgttttcacatcgttttgaattcgctgatcgctgtccatgccaagaaatacccgtgccattccccgtccgatcaccgggttttttccctatataataaaacaaattaaaatatcactttcttttaggtgtcggtaaataattttcttaaaaaagtgctcaaatgtttcactgaaacttctgcgattaattcggagcaattgactctaagcgaattgttcgtcctattggaagttcatttgttgcgctccttccccgtccatttaagccaaactcaggtattattttctctaaaaaggggtttttccggtgcaatttttcttttaatttgcattttaatttccttttcgccacttgaattaattggtgtcattaattctaaagcatactagtataatgcgtcagttttattttaaattctgtaccgaatgataccaaatacataattgttttgttttaaatcaaattctaaatgttgttttgataggacaatattgatgacacgacccaataagttttatttttgtgatttcatttcactttttccacagattgtcgagcggctgaggaccatttattttgcaagtgaaccggtgaaatttaggcattttttggacgacattctctgtgatgagtaatttcttttggcgtttgtcctttgacaatgaatgttttttttaggtttttggacgatttgcctttttatttggccggaatctatgaacaattgctgttggaaatgccattggatttgcagcgatttcaatcgcaggaatatcgtcaagacatttcaattggccaaatgcaattcaaaaacaaattagcggaaaaattggaaaattttctgagagaattggacgaggagaacaaagaagagacgagcgaccaattggaggaggagaaaaacgaaaatgcgaatgaaaaggaaggggaggaagacgaaacgaggacgagggcaccgaaaaagaacagaaaaagtgagaatttccggacaaaacgccgaatttgcgagacgatgacttggaccatttagtaattcggccgtcattaaagacaacattcgttggcgcggcgacgtattcaagtgattcccgaaactcccgaaaaggaccctaagggcgaaacatcgatgggcaaacattttgacgagaacgaagtgataaaacaaactccgatcggcaaaatcaatgggagtcagtaaaataaattttcattttttacaaggcatcattttctttgaggtggtggtcccaaggcttctcactttgccaatttgttgcgagatgaggaggagaagttttctcgactgcatttaaatccgtcgggaatgggaaaggcgaagagagtgctcaatctcagtcatcagaacattgaaaacaacaaaaattcgatactgacgagggacgacaaagacgaaacaacgaattcggtgtctaagcggggaaaacgaccagcgactccgtcgaactcatcctcgacaatagcaatgctaaataaaagaccaaaaaggcgcatgacttactccactaaatcatcaacttcatctgtgttgtcttttccttttccccgcaaatcataaatgacttttgtttatgacttttgtcattgtatagattgaacttgaacaaaaagttttgttcaaaattaaaacaaaaaataaaataaataaaattctgcttaactatatttttattagtgggtattttatcattcattttatttatgatttttcatcaagtacttgatttttttgaagatttttattttctaaaattttgttttcggtaatttcggtattctgaatggtgtggaatgcataaatagctttagaatgagccattaaacgtataggaaagccaaaattttagaaaacaaaaaatttcaaaaaaaaatcaattacatgatgaaaaatcattgacaaaatcaatgattttgcaaaatccgagctaggattcgtgatcagtgaattttttaccctagcaaaagtatttttgtaagaaaaaaaaatttttttttcggtcgggacaccaattccgaaggattacccggacagggggtaaaattctgaaaattttgtgaaaacggtaaagaatttcggtctctaattgatctaaaataatgcttcaattgttatttggctaaaaatgcgtaatttgcgccaaatgttattgaacgcatcaactgtttttccaatagagctgcctccgtgaattcgtcaaaatagggtaccgtcccgctcattgccttactgccatattgtcaatactccgatttgtgatcagccctcgataacccccgccgaaggaactcagaactgttcaaaaccaccttttttacccttttatgggcgcagtaaaggcaatgattaccccccccccccccattcttaccagtgtttttcccgggttttaaaaaaaatagcggaacgggattatggaatattaggtccagagccaaaaataatcaaaaccacttttatagttttcttaggtaggcgctgaaaacgatagaaaatcaaaaaaagtctgcgacaaaaattttaaattttgtgcatattttggaatttgttccaaatttaaatgggaactatgaacctcaaaatgattcataaatttaattttcaatttaattgatttaacattttttttcaaaaattatcggtaccaataataaacttttaccaaatgatggaaacagatgtgtccaaattacaattaacggtaatgatttcaccaaatatttgcacttgtaattccataaatattttagttcaaaaaaatcatagaatgcagcgacgaaattaaaaattgttgcactgaatcccctggctgttcttccacaaaccagcaaaattctggagccgaaaagagcacagaacatcgttcacggatagctgagttgctcaatcgccaacttcagctttctttggaggcattgtcctgtgtcactgtgcggaaaccgttttccgaaacggttcgaatgaaattccatgaggaaaaaagcggagagacaatgggatcgaggggactgagcgaaattctgatgctgatcgacgattatgtgaattcggatttgtttcgaccccctgggaaggatttttaggccgaaacacttccattgcacgtcgaaccttacaactataaaaaggcagaactggcgcaaaaacgtccgatttcggctttgtgcacgccgctggtcggctccattcctctcccggacacggaggaagttccaattggcagtttagtggcggtgtggaagaaggaggaggaccagcgggaatcgaaatggattttggccgaagtcattgttcgtcgttcagctcctttgacaatggctgttaaccacgcttcgctgtttaaggaccaaagcgcgggagtgcgcggacgaggccgttacacactgttggaccatgtcgcggaatacgaatattaccgcaactatttcatactcagtcggacgcctcccgtcacgccaaatgtcaaatattcgctagtgcgccaaaagctcccctttctgctgaagaaagttccccgccaaggcggggtcaaccaaaatttttgcagaggtctgctgctgtgagggagtgggtcgacccccccccctaagctggagcagcaggtcgctcacccccccccctctaaaaaaatttttttttaaattttcaaacatagaaattttcagaaaaactccgcaagaaaaaatttgaacaacttttcagaaattttttcaaaattttatgatggactacaaagttttttcaaaaaaaaatgtttcttgaaattttcttacgctaaaattcctaagaatttttttttttgaaaaattatgtttgagaattttttcggcgagggaacaaaatgatggtaacgtgccggttgacatcgaattacgagccatccccgtggttttggttagatccatcacacggtcgactcgctcgctcacaaactgttccaacgcctcattagccttaattgttttttgttttattggaaattcgtttatgggagtttaaaaagtcagcattaattgggtttttttttgaaaatctagcaataaaaatgaaatttatagggtttaaaatatcagccttaaaagaaatttatgggatttaaaaatgtcagacttaattgtttttggaaattcaagcaattag

SEQ ID NO: 14124 - DNA, 2090 bp, Heterodera glycines
tcatttttaactgaaggattatgttaaggtcggcttgagctaatcccttctttcatgaattggtgtgtggaaatgggaattcggcattcgggcttggatattttgtgttcaccccacggactttgccttagtgctacagaacctcttgaagagggagcaattgttgccgaagtccctttatcggccattttttcgacggacgtagctgagaatattgtttccctcaagtgatttgcaatttaaatcaacaatatattaaattctaaggcacattttacaagataaattgcttcaaagcatggagaatgttgctttggcaatttgtgtggctcatgaagttctgcgtgggtcggaaagtcaatgggcagcttatttcactacgttaccatcgaccttcccaactccacttttctacagcgaagagcaattaactgttattttccgtttaaataaaaagtactttcaaaaaaattaaggcattgaaaccgtcgccggtatttgaggagtctctgcggatgcatcgtgccattgcccggcaatttgtctatttttacttacaaattcttggagataatgggaacaaagtttctatcttttgtagtttattggcataatggtcactccacagacaaagacagaaggtccactgtcgaatttatgaaatcaaatgccaagagttaaagcgttatactttgtcctctagcattttttcatagcttgatttgagtaaattttttagttaatatgctttttattttagtttttttaaatttaaattattttttgtgggtactttgtctgttggtcctttacccgtggatcctatgtccctgagacctccggtaatactgcagaattacggtcccgatgaaaaataaatttataaaattttattcttatctttcctggggtaaaaaagagtgctcttacgaatctgagcttagatttggcagaaccattgattttgtctatgacttttcatcaagtacttgattttttccaaaaattttattatttaaaaagttttctttagaattagttctgggttaaaaaatgcgctgatcacgaatctgagctaaaatttacaaaatcagtgtttttgtccatgttttttcataaagtatcttaaaaaaataatccgcagccaagcggatttgaaccccagacccccgtctcatataacccctagggccagcaattaaatttcaaaaaatcctaaaaaaacgaaaaacttaacttcacctaacattcaatagctcattcgaaatctctttgtgagctctgcacatattcatatgtatgagtattttacgcgcgattaattttgttaaaatttttggaaaaacccactttagagcaataaatgtcctccctcaaaaatgtttgcaaagtctccatttaccactcaaaattttaccttcgacttttatcgttggtgcgtttccattgtctccacaagaataaacatggtgccgagtcagcacaaaaagggcgaagatggccagccgagaatggtgtgacggcactttacgttttgtgcctcttttccacctgcagttcagattcccgccttattgccatttattgacatggccaaccacgcaaattccgcggctaaccctggttcagtgtactttgagtgcgaaacgaattcagtaaaaattcaggtcaaatttattgcaaatcagaaggggtcaccccttttttaaaaattatttttccgacccctaatctacagaagatataaaaaattaagcttaataaaccaattgtgaatggagaagagttgttcattcattacggtccgagaacaaatgcgaaatttcttttacacaatgggttcgttcctcaacagcctaacccggacgaccttttcgaacttaaaatcggcaagcttttcaagttgttcttgtaatgacgctaactgattttcaaggactacatcggacttctccgaatttcgatgcaaaaatgcagcatttagcagcggcatcgatagtcccaagaaataaccagcccagtaacaatgtcgtcttctctttccaactccaaatgtgacccagtgctgaaagcgtaaagcaatcttcact

SEQ ID NO: 14125 - DNA, 932 bp, Heterodera glycines
gactccgatgtttcaaatggaagtgactctcaaagactgaaggatgcagaagaagcaatcctcaaatcgcatttaaaaatgtctgaaagaagtcatttgatttctctgaccaaaaatatgatatactcaaataggattctgctctatctgaacaatgcctttcattaaattttatacagaaataaaaatgtgattacaaataattctgataaatcagaaccaagtgcctcccgcgtttcccacttgtgaagtactgaaagctgcgtaatcgttccggggaaaatagggagccggacgattggtcgtccactccattgcagattgtgatttctttaaagcactgttccttgatttatgattgtatgattttggtttcaaagtagctttgtacttgagtgcttccggttggaaatttgatgcggaattagctggaatgttacgaggataacgatataagccaaacggttgagaagtgccatagcaaaacggagatcgcatctataggcgaaatgccaatttaatacaaaacaatggcttaccctcgcttgagtcattggccggtgaaactggttagcatatggatggtaacccactgacctcccatacatcaagtgcggtcttggccgtgaaggatcatgatgaaatggccaatgcgggaatcgaataggacgagagggagggtaaaagggttgacgaggtggcggaaaaggctgatgcattgcatttccaacctaaaaataagtaaagttagttgggaagaaaacaattaacgggactacactttttgttcttcttgccattcttttagttttttcagcagtttagtcgaattttctctctctgcttcgattggagccaatctgatgacatcgactggcggtcctctgggaggaagggacaaaacggtgaccaactctttggactttttctcg

SEQ ID NO: 14126 - DNA, 1602 bp, Heterodera glycines
  unsure (1)..(1602): unsure at all n locations
tcgcatatcattcacncaatggttgtaatttcctgggaaattccatcggatatcttncaataaggcaattgacatattctatcatcacgaaaatgacgaaatttcaggacgattgtcaacggcctttggagcaacatgtaaggtttggttgcccaagaaacaccgattatttggtccatgaagatgaacgactcacctccctttttatcccaaagacaaaaaaaagcatcattaacatttatattccaatacgattattaaaccttctgaacattgggatttggaggagcacgtatctgtgtgtaaaatccagtcacagtgcgatcaaataattctcttccgtagtctatgagtttgatcatctcttatatggttatcaccaactttgtcaaactcgctcttgatatattacatggcttctccgggacagtcgttttatctgttgagtccatgagtgactgactctccccctcctcaagtgaagaaactgcttttctgatcgacttcaagattagtaattggaggtccatatagggcaatggttcgttcttaaaatgcgatatcaaagaaaatttaattattcggttctagcgcatttagagcagagaccggattttgcagcatttgttaataaacatgaaaaacgaattctaacttgtttgagacttatattttcgagtttttcatgctgattttttgtttagattagtattttcgtgcttattgctgagtttcagagctatttttaggcaattgcagccaaaagaaattcaaggttaattggactcatataaaatgcactataactaaaaatttacccattttttcatgtcatttatccacagattgaatccacgctgatcaattgcattttctggttcctttattttgtgaatgcttctgtagctgttgtcacgacaatgcttgaagcgaataccatctctattgacgtggataattttgtcaataaagaaattgcattcagagtcctggaacacaaattattagaccactttagttacctttgaaatttgtgtcccgaaggaaaataaataaatttttctttgactattttttagagctttaatatttaaattatagagcagtaaaacccatatacctattctgaagggaaacgttttttgaattttaccatatatttattaataaaagctcaaagctaattctacattatgcagaataagtcaacgccaacaaatttctttactaaaaaatggataaccttcagaatttctcggattgcatggtaacgcatgtagcaaccaaccatcaatggccttagttccggcaatggcaattttgaagcgagcaacctttttgcagtttcaacatccaacaagcacttagagagctgttcggcatttttcggtgcagaaaaagaatttgactgatcgtgagcggaagaatcctcctttttcactaaacttaaacccagagaggaagcattaaagacactgttggatgttaaatcaatttcagaaacactcgccgcactttgtgaacgaagcatcactgaataacgaacgacacgaattaactattcaaataagtacagtgaaagaataataaaccgttcagaaa

SEQ ID NO: 14127 - DNA, 3144 bp, Heterodera glycines
aattaaaaattcaataaaagttttcttaaatattctatctatgttttcaattaaaaaacaagcacaaaaatattccatggtttttttctttcgtcaaaaagtagtaaaatttgaatgaatcacaaaaatgtttgcgacgatttattagttaaataaagttttaaaatgattttatttattttttctaaatggcaaaaaaaaggaatttttttgttattttttgttatgaataaggcaaaaggcatcccatcagcccaaaggtgccaatcaattcttgcacaaagcgccattagtcatcgccacgaacagcgacgacccccgaggggcagggtaaatgatcaatttaatcgtcattaaaaatgaaataaaaaagacacaaaatcaaagaattaaaattaaaatttgtgataatctcttgagttaagatgtttcttaaaattccgcaagattgagaaaagttctaaatgttgcatagcctattcaatagcataagtattctctcgccaccagaatattaattcaacaaaccttaattaaatttttaaaatttttttatgaaagaataaaaaatatgcattaaatcttaaaaagcctcaaatgtccatattaatgcaaaattgaataaaacatttataaaaaaaaaattaaaatttgaataaaaaaaaattaaaaatgaaacaaatcactattcttctgcgtttcttcgaactcttactcttctaatattataaatttttcattttttctattttttgttcctccgttattttactgcgaatgccaaattgtttcttccatttcttaatcattccataattaactctaattttcttacaaatttcgacataatttttcttccattcttttggcgaatattttcttttttgcttatattcctttttcatttcaatgaatttttgtacaaattctaatttttcttcatcagtttttgatttatagcttttttgtatttgtttttgaagaccaaattctttaatccatttataaatatataaacgatttgtccccaatttttttgcaattttcaaattaattttattccattcttttgttgagtattttcgtcctttttgcttgattttctcttttattttataaaattttgcaattatttctcgttttttgagttcatttcgtttttcttcttctttttcttcccatttttctccaaatattccatcacatgacttttgttccaactttttcttttctgtttcggtttggtcaattaaattgattaaaaataaaattaataatacacatatttgcatttttaattggcaataaatattgcctaattatcaatgtaaaattgggaatttttagctttataaaattatttattaaatgaagaaaatgcgaatttattgcttttaaatcgattataaaaaaacagtacaaacacaaaaaaatcaggacaattatccaatgaatgtttcatcaaaaattagaaatattttacataatttacaataacaaaaaataataatattaaattcatatccctagggcaagcggaaaaataaggacatacatatttaaaaaattcaaatcgttgctgtttgcacattacaccaaaataggtttgcacgtttttcccactccataaattttgtaaaaacaaaaaatgcgcgggtttttgtccaatactatgcttttttatccattcaaatcatatcgtccaattttaattcaattcttctcccttttgctttgccactcggggcggaatagtcgacgattgagaaagccgacaagatgacaagcgaacggactgtagaccaattaattaaaattgacgaataaataaatgcacacaaaatatttagagagaacagtgtccttagtaaaatgtaccatgaaaaaagaaatcctcctggagacatgcggggaaatctagcaaaggaaatatctattgaaaataacaacataattagcgaaaacaacaaaaagaaaggaaaacataattataggtaggtcagaggtcggagagaaaaataacacaatttatagaaataaattaagcagagagaggtcaaaatattcaatttaacacatcacaacccctaaaaaaaggcgtccctgccgttaattcggcatccgttaggtggtgacccgagtttttccactcggattggtcgaatccagacgattggaggagtttctttgccacggcacatttctcgcaccacaaaatccagactctttccacgtcttcatggtttggaaagatgccggcacggacattgtctttacggactccttcgtagacgaccaattccattccgggttcggtgccgagaatcagttgcaccaaatttttagccgccgaagatgaaactgttgcacccgaacaaaggatgaatagactcaaaagggcttggagaggagtgctaatttccacattgcccgtctcagttttcgcgtccagcactgggcccaactcgccgcacaacatttttccgcaaaattcgtgggttttctcttcacacttcatagtctacgaaagtccgtcgttttctttctgctgtcgctgcttcatcttccgttctcctaaattgtcagttgtccctaactgattaacgacgatttttttcgatgactttaaagaattttccccaaattgcgtctgtaagagcggttcgaactgtccaaaaattccttttgtgtctaattttgaaagttttaagctggccaatagaattgtagccaaaatattccggtaggggttttttccatgaggaagggtagaaatgtcgggtacaccgattggaacgcgcacaaggcgttctattggaacagtaattggttctgccgattttttatcaaccgggacaacactagcagacgaatcgagtgttttgacaatttcgtatggtccgaagtgattccaatgtaattttttgtgctgtgtttttgatttagagccagggtaaatgaccatgcagcgatccccgactgcaaatttgttcatggacacatttggacgtaaatcatatctgtttttggtttccgcccgtgaaatttcggcatttttacgggctgagtcaagaattaataacaaattttctttgaagaattgcaaatatgtctcttcatcgattgtgtaaagagggtttccaa

SEQ ID NO: 14128 - DNA, 1026 bp, Heterodera glycines
ttatcgttcttcgggtgaaataatttgataaggccctttttgcatggccaacagccaacggaacaatatgtaaattaaaaatattttgaaaagaaacttaaatttacttttatgaacatcaaaatttgggtcaaatactaaaatttaacactgattgtgcctgaatttaaaaaaggcttgctaactctaattattatttacacttaaattaatgaaaattttcgcgactcctttgcaaaaaggtctattcataccaagtgcccacttcttttaaaaacaatgtttaagttccattatcttcgtttttacgaacactttaatttaattaatttctgttatttccttttactaaaatttaaattagtaattactcaaattttacgattattaaaaaagtgacgtcataatttttcttgcgctgaaaaatgtcggacgaaccaaaagaagcggaaaagaaaatggaaaagcaaatgtaattgaaaaaagtcactcaaaatatttgtgccaatctcagttggatgtgcggtgacaattggctcaaagtgttcgaattggtcccaattggccaacttggccttggaattgcattggtcagccgcgcatttgacttttttgtggacgagcacttcaaaacgcgcaaatggacgttggactcaattttgatcagatgcaaatttgcagaagatggccaaaaagaaatgcaaactttcaattcgcgcgatgaattagtgccaattcagaaagtgccgttgccaaacaaagtcgtcggcttcaaatgcattcgttgcaggcaattgaacatggcgcatcatctttcggatgttgatgctactaattactacattcagatacatcgaccaaaatgtcgtggattttctcagccaatttcgccatcttttcgccgcttttggggcaaatttgttaattataaacaccgacgaaccaattttggaatgggttatgcgcatttggcctatgctcagggttacatttgtcaattccgcgcccacatcatggcgattacac

SEQ ID NO: 14129 - DNA, 2377 bp, Heterodera glycines
  unsure (1)..(2377): unsure at all n locations
tgtccatcactccatcttgtcagttctggtaatgtttttccaatatttccggcggatgacagtgcaaatgcatcggtgggccaagtgttggccaaatggcttttttcaccgcgttcggacggtgtgccgaaggagctttggtgttccttaaagcagtttgagagattatcggcgattaatgacttgaaaacggtgattcatattcataattgttcaatttctttgctgattcacccctttcaggcttttctcaatgcttcttcccgtgcctatttcatcattttcattagaaattgtggttattacagtggtggtggtgcccccgttgtgtcgccatttgaattgatcaacaatttgacaggggaacgactgacctttaaaatgttaaacaggaaacatgctatgctgaaacgttatcccattgcgcaagatgagcaaaaatgggcgaattgggaaaatgatatgatggtaatgggagcgaaaaatgtcatttggattgaagacgaattcgacaaaagtcgaaagaaagcgaattgaaaagagataattggatgactaaatcgcattgcttttcgagcttttttatttgttatttgcaatattttgactaaatgttgataattaattttggaaaatgcgccccctttcaaagccctaagggtacattcatataacgactttaattaaatgatttccaaaatggaagttccacttctatgaagagtaggtacaaaaaagggttgaaaaacagggcttccggaggctcgaattcagtaaatacggcaaattagcaaaaatgcattttttaaattttatttgtaaaaaaagggaatgattttttactagaatatagcgggaccgtgacctggtactgaaagaatgggacaactgagtaccttttgactgaaaaaagaaaaaataacagccgtaaaacaaaattaattaaaaatattccataaaaaataatattctggaataattgaattcttttgttagaatttttaatgcatttttggatattaatttgtttaattacaaaattactttctttttgaacgccttccggaatttgcggacaattttagggaaaaaaatttaaaaaatctttaaaaatttctgaaaacatggaatgaaagacttggccccgttagtccgtttcttctattaaaagaaacaattttaaattttttgagatatacttagttgctaacaaaatttatttacaatttcaaaattaaaaggatattatataaatgctggacactagctgcactaaattccgatttccgatattttgngcatcagatttcccgtacctttaatcataatttatttaaatcatgtgaaaattatttattcgctaaaaactgattatcaattgtgtatgttatacaaatatgaagatctatgaaaaatatttctaatttacaatcttttcgcagatttttgatatagctcaaaaaatttgctgacgaatgtccactgacggatatacactgacggattgtccgtaccccattttaatcacataagagaccaacatttcattctgtccgcaaatgtcccactgcgttttaaactcaaaattgaatgaaaataaacgaaaaaatattttgtttaaatttataaatgtgactttttgtaattattttgccacttttttggcattttttatcattatttagttaattattttggcattttttgccactgaaaatcctcaacaaaaaatttaaaaaaagacaatgtcaattaattgtttcagagattggccaaatcgaacatgaaatttggcccgaaattggtgctgattttgtccccataatctgccaacgaaacgaatggaaacagagaatcggcgggcacagaagaggaaaggagcgagtgaattggtgccatctgaaaaggatttaagtgatgccgatgccaatgcgcaaaaaaacataaaatgcttttactaatggagaaaaaaaaaacaaaattttttgttttaccaacccaattgatgtccattctttgtgaaaatcagcttctgattggccagattaacaccacgatccgaccgtgtcaccatcggcaaacttttcaccgccatttttgtttattttgtccacccaaaaagtgccgattcctatcgaatgcgtaagtaccggtgcggttttgaattgttccgtccgagcgatgtctgatttttgacggcgaatccgacgatggcacgagataaaagtggaaaagaagtaaattgaattcttgtaaaaattggcggatgttgagccgaattaacggtcgacgatcgaatgccgaccgttttatccggcatttttatttcggcgttgatgcgagctatcgaatttggaatgttacaagaattttaaat

SEQ ID NO: 14130 - DNA, 2991 bp, Heterodera glycines
  unsure (1)..(2991): unsure at all n locations
gaaaagtatttaaggagttagagttgataaagtaaaaattgtcattttcggagtaagtatttttgatggttgattaaaagaaaattaaaatagatatagagaaaaataaaagtgagtaaatagagtaaagttagaactataaaaaattataagacaaaactttacaactaataagtgagctattggaaggccgagtctgaaagtggtttccaaaaacggcattttccaagaccaaaaataacaaaattttttaatttagttatattaatatttctttatagtatttaattggtagtatttaattataaaaataaatggtatggtataatttcatgaaaaattaaattgaaataagttactatgaaaattaattacttaattaatttttgttatcaatcctaattaatggcagctcaggaacacacaagtcagctgtatcaagaagagtaaaataaatacttaataacaacaattatatttaaataataaataattcaaaaaagtgaattgaaaagtatatttctgcaaaggaaatttctaaatcaatattttaataaataaattcaaagcaaaaaaaatattataatgagtaaagaataaaatacgatataaaatttttcatactttttcattaatcatgagacaagagatttatttttgaaaaaaaacaattaatgagcttatgctgaattacgctaaaataaatcgttagtaaaattatgaatacatttgataccaaaacaaaagattaaaattttaaaatttataacttgcaaaattttatttatagaaaaagcatctaacactttaataattaatattatttattcattaaaaggtaagttaaatcagggctcccatccgtcattgaatggcaaggacgtccttgaaattgggcccttccgcttgaaaatttgaaagtatccttgaattcaagaagtccttgaaaaaatagcattttgaatagttttaaaaaaattcaaagaatttgataaatttttgaatttaatttggattaaatggcgttatgtcataaatgtaaatttttctcatgcttgcgaatgaattttttacgcaattaaaaaaatgcccatcgccattatctcgaaattacaaaatccgtatttttggttaaaatctgttaacaaattacactcttattttcaaaaattttccccggcggcgcctgtcggcaccgccggaccccccccccccccctgttccccggaaattttttgaaaaaagagcgccgcaatttttgatagagaatctgttaaatatatagcctaagtctcaaaaataaatttgaccggcggcgcctatcggagctgccgaaccccactgtcccccaaaaagttattttaaaaacaacgccgcaaaaaaacgttatttagaaacaaaaaaagtcgtcgacttgctaaaaaatcggcaattttttctcatggttgagaatttttgaaattttatggtataaagccactactttcttaaaaatttagcctaaaatcgcaaattttagccatttttggacaaaaatcgggtaacaaatcgcattaaaaatacaaaattttcccggctgcgcctatcggcgctaccggacccctcccccctgtaccacaaaaattttgtaagaagcgcgccccaaaaaaagcttttaaagcaaaaaaaagtcgtcgcaaatgaggaaaatgatcagcggaaacaatttcctattcatggaaacttggggaaaaagatttctaatacagaatatttacccaattctaatttatttaactttacatatatttttatacaattttaccattcgtcattagattaatttattgcaaatagtccattattattactagttggatgaggtgatattgtatgagttggtgttttctcctattttcaagaaattacaaatatattcattttatggttattttttatagaattaaaagaaatattattttgatttttaatatttaaattgatctgatagatttcaattttttataaacccaaaaattttttatttatttctttaatcattttacaaaacaaattttttcctgtaatttttgtggtttgtcttataataaaaaatgaataaaataatagttaatttaaaaaaaaaatttctttaaaaaatttttttggacgatttaaattatataaatgtcgttgttttattatttttgcatttctttttctagtttttactgctaaaaaaattaataaaaattaatttaaaatttaacaaaagcaataattatgaagaataataacgtaaaattattttatatatacaaaaaataaattacaaataaatatttaaatgcacagctcaccaacctggaacggaacggaacgtaaactgagtacgaatgcatgagataaatataagatgtaatgcagaaaaaattaactcaaaaataatttttaaaaactaataaatcattgagaaaagcatcatcaacttacttcagtgaaggaaacaattaaaaaataataattaattaatacctattattattataaattaatagagattttgaacaattttttaatcacatcacaaattgtatattgaaaagaaaaaagcgctgaataaaaaattgaaaacaaatattttttacatttgattaatttgaacactcaaaagtttattggtgatttcttgccaaaaattaccttgaagaaatttattaatttattaaatacatttgattaacagaaaatattaattaataagtaaaaatccagatttgatatggttaatgaaaaaatattctaattcattaatcatttcctaatcaataattaaaaatactaaatatctccaatttgaattttattaattcaaaatgaatttttttctgatattaacataaaaaataaaaatcagacttattcaataaaaaaaatgacgattaaggaaaatttattttttgatcccatatgaaaanaagttatttgaaaaattcaccatattaaaaaata

SEQ ID NO: 14131 - DNA, 958 bp, Heterodera glycines
ctggaattttgacaaaaaccagggaccgggacttaacgtgaccagaaaagcccgtgaccaagtttttttgccgggaccggacccaaccgggagtttttcgaagagaaaaatgttttgaaaaattgaaaaattccaaaaattaatctaaattcatagattatatgaaaaatttcaaaacttatcgaaggctttcgaatattaccaagaaagttggtattagattgaccaacgctggcgcgtaaacgacaccgaccccaaattctcacccagaccccattcttaccagtctaatttagtcccgccgtgaccgggactgtcaaaaccgggaccgggatttcttttttttaaaatgggttcgggacttgaaaaaccaggaattcccgacccattctcggtcccggtcccgctcagctctaccacaaacccatcatttgcttgctttttggaaattatgtgactatttagcggtttttatggccaaaatcgtagctttaattattacaaaaaataaactaattaaaaagttacagtaaatttgtaaatcaagaaaaaaatatatttaatttccgttttaatatttaccgattattaaatttaagtaattttgtaaaaacattttttagctttgttcaattgcaatttatatttttattaatatttacatttctccaattaataaatgaatttattttttataaagttttaaaatactgtgcaaatttttcgcaattcccaatgtgagtttttaataatattttttttacaatcttaaatcattattttaatgtttttacttgattgctttaattacttcgttaatttaataaaaccttcaatcttactaaaaactaacctgttcgttaaaaagatattttgtttatttttattgtcttgaatttttcactaaataataatataaaatgtttctcctatatttaaatttcatcgaaatcaataa

SEQ ID NO: 14132 - DNA, 2120 bp, Heterodera glycines
tttaaggcgtgcggcggagaatggcgccgcccaccgaattttcgtaacttctcacttcgtccttgcccaatcccatgtcctcaaccgcactcataaagtaactctcttccggctttcccacagaaatatgttcgcactttcggccgtctccatcgattgcaaattttagtgctgccgcataagcgcccgtgtcaaggcatgggccttggtctgctctttggtaaaaccttctaattgattaatcattttgcaatgcactgatgtgtttgatgaaattccacaacaaacccattgccgagtgaaattagcaatggtttttcactattgagcaatattttgaacacgctgttcatattgttgaagcttagctcgtgttctgcgtcgcctaacaccacacaatttgggttttcgacgttgagaaattcttcaaaatcgggaagtacatctgaagttcgaggagtcttaaattaagtgtccttcatggttttagtcggttcagttggttcgccaaataattatatcaactcaaagtccaacttttaaacctttgtgcactatcaattttggtcgtagtccatgctgtcgaaggtatttgacagcaaccggtgccggtgtgaaaatgtgctcaggctgaggcccaacgaatccgagacggtgtaatttttgacaaattgctcctcgtgtcccactactttcattgcttacaaaacgaacacaacttagctcgtaaagtctaagagcaaaatatgaagcatttggaacaaaatgtataggtatgatgccttttaactgcttcaatcgacccaggaatggccttgcctccgtccaaagaagtgtcaaagagtacgccatttatgtcaacaagaaagccgcgaatgcgctgcgaacgaattttatcagataaaacgaacttcatcaaattgggatataaaaataaacaattatttctaaaaatgaagccctgacaaagcctgtgaataaaaataaggaaatggggtcgcttacaaaaagaaatgcttttacttttacacactatccactgaaagacacaaatgattacatttatctttttttttttttgctttttctcaaattttctctccaccaaatgaaactgagttatgaactaatggtcgtccagagcagcacatttattctttcgctcgctctctccgctgctgtgtctttccctttttattctgccgtgccatacaataaattaaaatgcttcagttgttatgtattagcatatgtcatcgttaatggttgcctagctcgcgccgtttacgttttcatccgagattcaaagcacgagcattaagctgttaatccgtccactgtcagtttatccctccatttgtcaatccattttcatccttcctcctcaatttttgcacttaccctaacaaacatttcccatatgctaacattagttgaatcattaaaaacaattggtctatgccctaaaaaccaaaataaaatcataaaatgtccgttttcctgagaaatttgtccaaatcgcccaagtataaaaggcggacttgcactgcttttattgggagaacacccgctgaaatgacaacatccattggcggtgccgcgtttcccactgtgtctccgacagcgtcctcaagtcgcaaatctttttttgacacatccgccgcctttggaacgacaatctccggacatgcgctggttgccgtgttcccagtgaccaaaaaaagtggccgcgtaaggcaatgcttcgtcacagttcaacaaacgctgttcgaggtacacaaaaatcagaaggacgcgaaaaacaaaaaaccggccaaatatctcgtcgatttcggcgacgttttcaatgtttctatgcatgttcgttttgattttatttatttatttgaaactattgttctccaaattcagaatgaaccaattcaaatcaaagatgactgcatttgtataatggacccaaatacttccttttttgttcgtcccatcgattctgactatgacctcactgcttggtttgattggatcttggaaaggtcgcgcgagtgtcgaagcaccaaacttctccgtccggtgttccgtgaggaattttttgaggtttaaaatgcctaaacccaagattt

SEQ ID NO: 14133 - DNA, 2407 bp, Heterodera glycines
  unsure (1)..(2407): unsure at all n locations
gtaatttttattaaaaaacgatttgtttctttataaggctgcttgggatgtacaaatgtgaaaaaaacncaaactccgatgtgactactccaaacaacagcccgatgctcaaaatgacgatttaacagaaaaacgcactaatctgttgggcttccgtcgcctttgcttttgtgccaattcctttctgctcttttctattgggtgccgaccaattgcaaatgtcgatgcgcccgaacctttcgagcgcagtgctttcgtggaattgccggtaaattttttagatgaatttatttttctaaattaattttgccaaagatatttccaattcaaggaaggggggatttaaaattttcaaaaaattggtccggtttccctaaaaattccattggaagcagctcccttccctttttttccattttcgtctacaattagaccaacttacgatcccttttcatccgattttttattataaattatttaatgttttttgttgcataattttccaagaatttcctttgtttttggaatgtgttcattatttcagctgaacgttgtttccaactatggaacacaagagcgtttctttttcgtccgcattggtcgctgttctgagatcggtggtggggagctgtggatggcgacggagcatggcgcatcggcccggtcaatgcacgaacggatcagtcagctcaatttgcgggaatccgaacgacggagggcacagggcatcaaaatgaatttgtaagaaaaatgggaaactagcaacaatttaattatttgttaggccaaccatcagttcaagtgtgcttaaaagccgggctcatcgggagcgttctcaaacgcaaaaccaattgcagaaagccaattcgcaattcaggtttaaatgacaaaatgaaaatgatttaaaaattggattttgatagtaaagggaagtatattttaaggttgcgtggagctgtgcccgactcggcgaggtcggcctgttcttatcagtccgaatcagctgagaattgttcttcgcgaaaggcatcgtcaaactccacaaatcgtgtcaaaaaaaaccaccatctgcacgcatcgaacggaagtttaagcggcgtaaatagcaacccaacgcaacaattggagccaattcgtgctgcgtcgcacgcatgtcggaccgactcggtcagcagcggattgcattcaatcccggaacagcgcgtgttgaacgacgacgaaaggaataatgtggacgaccaccaggagcaacaagggaaaagcgggccgagcgaggtgaattttggcacacaaagcgcgaattcagaagattcattcttccccttcgccccactcaattagcaaagacaacattctgaagctgttcagacgaagaagacttccattgccggacttttcgtctctcgatttggtgccaaaatgtctgaccaaataactgctccttcttcgccagcaacacgaactgttgggatgacatttgaattcactggaaaaggtatgccaaagtctccaattaaaaaaccgtgctgctttcggtcgttgtgccacgacttcgttggccaacctcgctttgtcttcaaatcaatcggctcggaactcgttagtcggctcagtcctcggtttccgtcttaccagaaacaacagcaacgcaaatacaaccttggcaaatcggcaaacggtggcacaaagaacgacgtctgcctcagcgaatgcagccattttcagtgccaatccgacttacgattgtgccgaagattacatgacattgtacgacacggacaatactacgacacagctgcaacagcagcagtacggttactcattgaatgctccgtcaggaagtgtgggcagtcgaatgtccgccgtttcaaaagacgagtccagaaagagcagttcgtctgctgctccatacagacgtaccatttcacgtccttctacaatttcataattcctttcagaattttcaaccggcagtaccggctattcatcggacacacaacaacaaggaaaagggatggggacaatttcggcggattatgtcgaaatgggtgcataccaaagtcatgcggatggtaaaactttgggaggaaaagcttatctgcttcttgttttattattatcagagtcgaatttttcgttgtcagaagttcattcgtatgtgccgaacaattccgagccgtattggacctcgccgggcacgagcaacaacaatggattttgttgttcagatttgggttctcagccaacaggggccgaggcgcccagagcctattctttgggctctaagcctcaccaaactcaatcactttcctgttgctcgatgcggccgtccagctcggagatgagtcggtctccgcaactgcttcatccttgctcaaacaactcccctcncaactacctcaaaaaa

SEQ ID NO: 14134 - DNA, 3585 bp, Heterodera glycines
ccaagtaaagagaaattgtcgcctcgagactcaccggtccgaggtggggacatttgtcaaggctcaaaattgagcgaatttttgatgatgaccaaaaatttgggttagaggcaattgggagaaagaggagctaattgattgctttctaaaattgatttgtaattaaaatattatttctaatgtgaaaaaaagtattttgaaacgattaaatttttgcaaattggttgttcttaaactatttataaataaaaaaattatttttttaatgttaaaaaagataattgataagttatgaatgatataaattttagaaattcattatttaattaattaactaattatgataatatttattattgtttttatttatatttactaatttcgttttttttaatttatatattcaaagaaatttaccgaataaaattgagaaattttccgcagcagatgccaatccgttggttaacgaacgatcaatgtgtggtaaaaatgtggccaaaactgcaataaaaagggaaattaaaatttcgtaataattttttgataatttataaaaaaaatggtaattaattaatttgcgttgaaaaaaaattattgagaataattttaatttttttttacctaaaaaacttagataagcaatgcaaaaaccaattgggcagaaaagcgcactaaatgttataaaattttatttttaaatttcataaatttaaattattttaaattttaccagcagctaaattaattggagattcacaatgaaaatgacacggcacacaaaatgaaaaaactgtgagaaatttctgctaaaagaaaagcgtagattaaaaaataattccaagatctcagcaaatccacacaaaaattcaaaaaactgtatggagaacacacagcaaaaaattgatggtacaataagcaaaaaaaaaaaaatgtacagcaaaaaatggagtaaaataatggaaatttatttaattatttcatattaattttaatttgtttttcactaataataataattaaaaaattgtataaaattggcactccttctctcattatggtccttttcgaagaattttttgctctactaaaactgaaattctgtttataattttttgttttcctaaacattttaaaattaggccgttttttgattataatatataaaaatttggacataattttttagaaaatttttgtcggaatgccatacaaattcaaaaaataataatttttctttttaaatattttagcggatctaaagcttttgctctccgtttggccttctgttagtgatggaaaaaacgggggatcgattagggaggagaggacgaagattggctatctgttcctccgcatccgccacaaatccgtcgcggacggatctcatttcttcgggaggataaatggcttttacgagttccgaggccaacagccgcagcaaaaagtttaacaaaatcaatcaatttttcttggccaaatttcttttgaaaaaaggtaaatgaaaacaatatttatggcacaaaaaaaatttgaaaaaaaaagaaataaatcgttgatttaaatttgggtaatttaaaataaataaagctgaacctcaaaaaaaaagtaattggaatgattgaatcgaaaataataaattgctttttaaataactaatagaaaactttttaatagttttttgtttttgaatttttaaattttctaaaattttaagagagtagaaatttcaaacatgattttagcaagaactcaaaatgttaaatgtgtaaaacaataattatgtaaattaaaatattatttaaaaatatctaatttttataaaggtcaacaatttttatcctaagaaaaaatgtataaaaaataattatgcaaaaaaatttatttgaaattaccaatttagaaaaatttcaacaatttttatcacaagaaaaaacactgaaagtgaatagggttaatgaatttatggcaacagaaacaaagaaaaaaaagtgccagcattgagtgccaaattgtttctgtggctgaggggcaaagacgcatttttggacccccaaaaatttcactgccctccgccggggggggggaggaaaatgagtcggacaaaccgaagagatttctcacacaaaggaaatccgtcccatttgaagacgcaaaatgtaactccaacaaaattggcaaatttaaaataaaggaagaaaggacggaggaggaaaatttggaaaatttatttgagagttaaacacggaatttttttactgtggaaattttaaaaaattaaaaattgttacagctcgacattttgaaaaaagccagggaaccaaggctggaacaggattttttagaaatttgggttgttgaaaatcctgaatcttggatggtttcaatgttggacctggacctgaatttcctggctaaaaatcctggaaaattataggtccaggaaaaatcaaggcttgccatggcctggacccaggcaatgggccaagattttataaaatagagtttctgaaaaaagcgtgggccttgacttgcattccatattggacatgacctgaatttcctggacataaatcaaggtccacagattttttttggaatttaggcctagattcgatgtccaagtcgagctctaaaaattttccattttttaattattaagaaaatttcatgtaaagcaacactaattaaattagtgcacaaatgcatttccgaaatttgctaatcgaattaggcgccgcgaatttttggcgatttaatgggaaagtaaatttttttatgacagaaaaaaatattagagaaaattttcttattttcaaaactaaaataattttagaattaaaaagcctttttaagaaagcctctgatattattaaaatttacacgaaaagcgaaaagttaggtaatactttttaaagaaattatgacaattgcgggccggcaaattagtcatcaattattttaaacttttcgaaatttccaattgagttattaattttcggtaattaaaaatttaatttgttttctctaataaaaaataaaaagcttagaacttaaataaaatctcggaaaatgacattaaacaattaattttagataattaaaatctaatttctctaataaataaattaaattttcaattaagcaattaattttagataattaaaaaagttcaattacggctcatctaataaataaatacaaagcatttaattgaataaaatttaaaaatttacccctttttcatttcaaatttcgcatattttattctgtccacaattgtcattttctccgtttataaataaaataaaaataattaaatgttagtaaaaaataataaaaatttaattaaaaaaatattcaaataccaaattcaaaattaacaaattcaaaattttctacagcaaaaattcagtagcagaaacatttagatgaatttgcaaaaattcactgcaattggactggacagtgtatgtcttttttttctcttatactatatacctccggattacgggtatttgcatccgtttacatgtattttccctctaacgagatgaggcatattttttttataaaagaccaccaaaa

SEQ ID NO: 14135 - DNA, 1778 bp, Heterodera glycines
tccgtcggttgccataatcccggcggtgtttccctgcagcaaatgccacccggagagaaagcacacggtggcactcataaggacgagcggcgttagcaggaggaagcacaataaatcggtgagaagagtgccgcgaattgtcaacggaagaccgaacacaggacgaggatggccggaacggacataggcaaagaaagagggcgcagtgctgagggggaggggggggggaatgcatttatgccggggcaaacggaccgacgcaccgttttaattggaatttgaattggcaaatttcgcaatgagtccttaaggggagaaaaaattaagagacaaaaaggattgattggtgaattgatattcgaatttgaaaacccaaaacttttaaggtcggaatttcttacctctgagagacaaccagccatttgttcagacaagtccgatggtaaagccccatagtccccctgaaaatgcaaagatagagtataagaaattgcaaaatacaactccttttttgtcccttttccaccctttctttttctcacttgcaatggcatggcgaaatcagcggctcgccatcgttgggacccgattcctcgccactgtagcaaatgcgacacaccgccggtgaattgttcattgtcaggtcgattttagcgatgacgacacaatttggatgccctgccaaaattggagacattgcattggccacagtgttattgatgttttggaaatgaacggaggcatccgacgaagacaaagaagaagagaagacgaaagccgtacgatgactttgtggggaacgaagagagtgatccattgagaagacaaaaaggaaatatatgtccttttatccttaaacaaaaagttaatggttctagtcggttttacgcgtcccatgacattttacgcgtcccatcacactttacgcgtcccatgacattttacgcgtcccatcacactttacgcgtcccaacaacactttacgcgtcccatgacattttacgcgtcccatcacactttacgcgtcccaacaacactttacgcgtcccatgacattttacgcgtcccatcacactttacgcgtcccaacaacactttacgcgtcccatgacattttacgcgtcccatgacactttacgcgtcccaacaacactttacgcgtcccatcataatttacgcgtcccatcacactttacgcgtcccaacaacactttacgcgtcccatcataatttacgcgtcccatcacactttacgcgtcccaacaacactttacgcgtcccatcataatttacgcgtcaaaaaatgtttttcgaaccgtcaatcggaaactttataccttccgaatagtctaattgttcttgtttgtatactttgatcatcgaaatgtgcaaaagcaattctaagcacacttaatgatgtcaacagaaattcaactaatataagaaaaaaatttacaaaagcctaagcttaggcctagtctaacaataagccattgttcgagttgcctgtgtataagttgtcatgataaccttaggtttaacaacgaaatttatagttaaaaactttactaaatacctgacaaaaaaaatagttttctcttagttattaggacaactataataccatgagaccagggatggcacggaattccgaaaatttttggggcctcggaatgccatccctgccatggacacaaaatgtcatgggacgcgtaaagtgttgttggactcgtaaaatgtgatgggacgcgtaaagtgttgttgggacgcgtaaaatg

SEQ ID NO: 14136 - DNA, 1299 bp, Heterodera glycines
ttttttattatttactttaagagagaatctttccaaatgaactaaatataatggaacttgcaggaaaggaaaagagcagaacataaacaaacaaaaacaacaaaagtgatgcgactattcattatcagcgaatttggcacaatcgacgaagaacgtccggcacttcctggttagcctcctccaaaaccttgacgagttcgcgcgctttcggtccgtcttgaggagtgaagaaagtgtaagcagttccctgagaaattaaatttaataggaaatatggaacttcgtatcaccgttttgtcctgtcgtccagtcctaccaattcggtgcacatagccctccgcattgttcggatagtcaaagttaatcacatattttatgtcgcgcacatctgagaacaaatacagattctcatcaaattctccctgaaaaagctaacccaatcctcgcgcagcaacttcagttgcgataagaataggcattttgcccccacgaaattctaaaatttatgattgaatgagattttgcatccgtaattcatttgttcaccgctaagcacccattcgcgttctttttgacttttgtctccgtggatgcaaagggcgggaattcccttgtagcgcatctctctggtgagttcgtccacttttcgcttagtttccgcaaatatcagcgttttgtattctgtctaaatgaatattttttgttgaaattctgattcccattttattgcttgatttacctgtttcaaaatgtcattgagtaaaacaaataatcggtctttctttgcaaagtcttcgatgacttcaacattttgtttgatgttgtggttagccgacagatcgagggagccgacattcagtccgactggtgaagaaaggaaatcggctgcaagagaacgcacttcaactggccaagtggcagagaacatcaaagtctggcgatccggctataaaaaaggtaaataataaagacgacaaaagaaatgaatgacccggatttgtccaacgattgatcgaatctgcggttcgaatcccatgtccagcattcggtcggcctcgtcaagaacaagataagtacagttgtgcaagttcgtaacacggtcattgataaagtccattatacgaccaggggtggccacacaaatgtcaacgcctaccaaaagacaagcagaatttgagggttgtattgtttaagaattacccgctcttagggcgttttcttgaggcattttaccggctccaccatagcagcaagtcactttgagtcccatcatgcggcaataatcacgcgacacctcct

SEQ ID NO: 14137 - DNA, 1190 bp, Heterodera glycines
  unsure (1)..(1190): unsure at all n locations
acgtcaaatgattgtccccgcgcctccgctgctcaccccctcattctttctctttctcccgcgatgaccaaattcttccgttggcttttgcgctttgaccgccaaatttcgtccttttcaatttgaccaaattttgcgctctccccaaaatggaaaaagtcccaaaataaaccaatttttgttgctatttttgtgggtttttcaatttttaagtcaattaaagggataattccatgccaattagcaccgtatttgtgcaccataaccaaaaaaacaaaacattttctgccgtttttttgctctacgtcggccattaccgtaacgcattttgtccattccgcggatggattcgcttcgaaacgctctttcacactccgcggcgactgttctgaaccaaacgcacgactcacacaacggagggccaacggcgagctttgtgaccagaatactccaggtcagtttacataattaaatacattcattggaattattgtccggtaagactggatcaactcagcaaattcataactgatcagagtgatcttctgatcattctgatcagccttttcctccaaccattcatgtttagttgggcttttgtttaggttgcacttggtctgttcgtgacaacctccgaactgccgcaactttccgacctccgttccgataattccgccgtcggcttcgactgcgacttttccctcccgtgccgttggcacagtgtcggcggcacggccgaccgatggaaaatggcccggggcgagcccgactcgattctgtggttggccgccaccggcacaatgcttcaaccaagtgatcatttgtccatcaaatgccaataagcaaatgccattccgtcacagccgaaccgttcgctcttttggaggtgcgcgagggtcggctggcggacattctctgctccgaactaatcggctgtcaggaagttccttcgctgctcagcttcacttattggagtgtcagtgcttccgacttggagatttgtctgctcggctcggactttcggcggctanactgcacgggaatgctccaagcgacggcccaaccgggcaaagtggcactgaaagtgccgccgatcagacggagttttcacgtgagaaaccggggaaatcattaaaattaattttaatttaatttaatggcaaactttcaaaaacagatcgcaatcattc

SEQ ID NO: 14138 - DNA, 2228 bp, Heterodera glycines
  unsure (1)..(2228): unsure at all n locations
gccacttactccgcctccgttcacttcgtttcccaccgcttcgcccactcgcattgcgccctttgtggtgccaacaacggactttggcacgggcactgtgcgacctccgccacacgtcactccgccgccggatttggcatcgctgttcacttccacagtcatttcgccacgaactcggcccaacccgtacacgcgtcacagcgcaactgttccatgggagaccggcattccgaagtgaggcttgccatcaaattatttaattgattaattattggataattaattagtccttccaatttagcattttggtccattcttcctccaccacaacagtgcagccgttgccctcttttgagcttctgatcgtcggcagcaaaacgcgtcccttcttcgatcgccgccttggccgaatcactgaacaaacggacgatttgctgtgcgatttcacccacactttcccgtgcctttggggggccgagtcgggccgatgggcaattgtgcacaaaggtggccaaactttcttgttctcgactcactatctctcattttcctttctcactctctctatctcgccctatctctcatttcaattatctttccttccttttttttctctcactgtggctctctttctttactcttttccttttccccactctctcacctctcgggatgttttttttatcccgaaaaaattgcttttgcttcaggtgcaattccgtcgcttgaccaggagttggactcgtccgaggaggagtcgccccagtacccgtccattgttgtcatccaaggcacggcgatgctcagcagcgacccgttgcgctgtcagtcgggctcgggaaaagtaattaatgcctttaatgagctaattaatgatatttgtacaaacttttcgtccgtttttgtgggtgatttaacattttgtcactctttcagcttctttttcgctattggaccaatgggcgcgtgttggtccaagtctgtgccatcggatgggcggtggacagtccgaagatccaatgcgtggaggaggtggcccagcacaatcggatggaccccaactctttggcggtgttcgaactgtccgatgcgatccgcgaaccgttcaccgttcgtccgaaatgcaattaattaaattaattggtaaaatttctttgattccactgatcagctgaatgtggtgccaatttgggagaagaattcacacaacaattatctgatgatcgacgaaattgcgtacatcggcgagtgcaatttgacggcactgaacgaaattgaggaggaagagaaggaagagcacaacggcagaaagggcgagccgaaagaggtgggatggaatgtcagaacaaatatcaattaattaattaattggttaattagtgaattaattagcgggagtctcagaaagtgggctcccatatcaatttggtaatagtaaagctcaactctttttaatctttcttctgtgatttccctcaggtcgacttccccgggggtgttttgtcctctgtctccgctggcttttccaccacggttttctcgacacaaccaccgaaaaatgaaaccaaaaaaagcactgccacacatcggccgacccttccgacgacaaagccccaggcaataaaaattttttttcattttttttccttttttatttgcattttagagttcgtcttatgccacacctatcgcgactacggtagaccaaaccgtacctcccaccagcgtcagcagcagcggtgggcgaacctttcctacccctccgccttctcctcctacgccgccaccgtttattttgtcgtccattaccgtaccatttacactaccgtattcatccaccggttggacagcttttgcctctacagtagtcgcaatccctacgatttgtttcccttatgcagattcacttttttcgtcctcggccacgcctacccgcgagacgccctttccgccgaagagcagcaagaagccgggaacacgtgcatttttctgaccaatcaaatcccgttggcctctctctgttcactctctgcttctccccttaggctatcctttttttccgaacaatccaaagccaactcagccccgtcatccgaggcccagcacagttgggccaacggcacagagcacaattgacccggtggatttgataatgaccagcacaaagccagaggagcaaaagaanaaaggtgggaaggaaaagtcatgccgaaagagatgaagaaatg

SEQ ID NO: 14139 - DNA, 3316 bp, Heterodera glycines
ctcactttacagcccaatcggagcattgcttttgcatttcgctccgtgcgggcagttcaaaggacgggcaaatgccattcactcgctcaatggctgtcttaagcaattttctggcactcatcggctggttgtccacaaagctttcgacaatgtcttaaacatttgaaatcaggattacatgcccaaaaagtctaaaatcggcatgccggcactcgtacgactcccccccccccgaaattgttttggcactggcattccaattctatttttgggccttaccggggctccaccctttggtggtaacgcattgaatggcggagatcagtgcgccttgggcaaaaatttgttccgcactttgcacagtgtctttcatctgtttgatcaggcccagcaaagttgagtcgggttgtcgaagattttccatcaaaaaatccttaaaaatgcaattatttggacagttttagtcattgcattgcaaatacgcactgaccatcctcgacttgaggaaaagctgtaacagttcatccgcggtggtccgtggcctcaacaaaaggtaagcgaccaaagcactgacagccaaatgccactgggcaccggcagaacccattttggaggtggaaatgtcaagcaattccattcgaaaatggatgaattggtcggaaaacatcggcaccaccggaggatgggagaagggaagtgcaaaggaatcggaggaggaaagcgtccgatggaaaaagtcggcgacacacagacaaaaggcacggaccaaagggtcgtcggagacaaaagactaaaagcgagtgaaaaattcaaattaattggaaaattcaagcggaagaacgaatcgggtgcaccaaaaatgtcgcaaggattttccataaaattttctaataaaaaattctacgatttttttcttgaaaaatttcagtttaatttttttttttccaatttcggcggcgaaattatgtcgtcctgttcccgaacgaaccatggaaagcaaattttgaaggagcaaaaaacaacgactggcattgggtcgtaataactttggtgccactaatttggtgccatcttcgccggcaaaggagggcgtttcgctgggtttgtctttctgctgtccatgcacaacattttgcccaatgttcgccagcagcgaggccaattcatttgcaatttcggacagtcttttcactgtgttcgacgcctccaacacgtctctgtaccttctgccgaccatgcggcgcaactcctcacgctttttgtccatctcgcctctgcaacgattgtatttttttaaattattatttttaatttcccaatcaaaaaatataccaatacataggtttttgggttcgttggtcacgaatccggcacccattcgacctatttttgaaccctaacccgaacaaaaagtcgagaattaactttttaatgatttaataaacgaaattggtcggaatagtgccggattcgtgatcagcgaccacggaaatatatattggtggtttttgcatgtaaagtgaaaaatttgtgggggctaaacttcataagagcctgggaagtgccatatcggcaaacaaacaaaaccccactttagtgacgattggatttggacgagctgttcaacattaagctccctcatcattcggtccacgttatttaagtcaccactactcattattatgacctttcccaatatttgattagcaaaaaaaaaacaaaacaaaaaaagtaaaacgacgaatattgcaaaatatcaaacggaaaaagcaccaataaatacatatattttatacgctttaccaaaaaatgaattacagaaccatattgcgtaacaaaaaaagaccatttcactgctctgattcacccgccttgccagccacctgtcaaattcaaatgtcaattttaagatttagttattctaaaatttttttccaattttccagctagaaacaaattttttttgttgtcataagttcttgatcagtgaccctgaaaacctatgcaaacaattttcacgaattataatgccaaaaaaacaatccaaaaggatctccccactagtttttttaaaaagaaaattcaattattttcgaaggaaagcaactgaaagcatcggtgcttttacagctagaaaagtgcgctgctgtaaaaatacccgtgtgaaatcctgcatgttcgtagtcttcgcaattggcatgccgtaaattcgaaactcatcgacaacggttttgtcgccccctccaacattgtccttcacgaaaaactgcagattgaacacattctaaaccgcgtagagagaaagggagggggagaaagaaagagagacaaaaagaaaaaagagagagagaaccaaaagaggggaaggggtgagagagacaataagaggggagagagcgaaagacaacagagagagggagaggagagagggggatagagggaggaggcgttagatgtgaaattgaaagaataaacgagaatgcgagagaaaacgaagaaaagacaaaaaggagaattagtgagagagaaagagacgacatagtagagagaagggggaaaggaaaagaaagaagagagagatagagaagagaggagagaaagagacaacaaggagagagagagagatgggagggaggagacgctagatgcgcaattgaaagaatgaaattggactgatttttagaaaaaggccgggggcgcttaaataggaaaaatttttacgagggggcgggcacaaataagcacctgatcaaatgggacagacatttgaaaaaaaacaattcgaagggagcgaagtgaaagaattgggcaaaggaagaagcgcattctcacaatcaggcgaaagatcccacgaagtgaagtcggtcaatctgccgataatttaaaaaataaaaagaaatttgacgcgggacgacagataggggggggggggggcgttgggaattatatatggatacaaaatcacgaaataggtcatacatttttacaattgagggtataatttcgcaaatacttattcgctcatttgtaaatgtaaaataaaacttccaaaatggccaaatatggcgttaaaaatcattttagaaggaaaaacatgttaaagcttggctgatgaaggcctttctaataaggtttttggaaaaaaccaaaaaaggacactcccacaatccacaaaaaatggatttccatataattccgaacatttgtcattcattgcccacctgtccacaaatgcgagcacatggtcggcaagagcttcgtgtagctgttcagcctcgtgttcctggctgatcagaatgtatttgtctaatgtttt

SEQ ID NO: 14140 - DNA, 764 bp, Heterodera glycines
tatattaataaaagaaaatttttgtaagaaaatttttctgcaagtttttttgcacaaaattggccggagttgagccggccgaagaaaggaatttaaatttttgtgaagagatgggacaaatggcagaaatgggatttttaacaaaaggggactgcaggacgggggctgtttacaatttgaattgctcctctgggaaaaagagaattacggggggaggggggggggggctcaaagaacggatcagaaatcacgcagatgtgcaaaaattagggaattgccaccactgtcccctccacccgccccctcgttcacgcgcgctgagcccccccccccactctcccgctgccccctttttttgtttttccggtcttccctgctgagcttcctgcgccgtccgttcccttgttgatctcctcggcgaagactcggcttctagaagtcaatccgtagtccgcaacagtgcgtccatcatgcataggcatccctaaatagagatagaaatagaccttaccatcaagaaggagacgcacgttgttcgttgcagtacccatcaatccggctgccattcccctaactttcacaatgttatccgatgcctggaccggtatgtaatgccggtcgtcaaccaaacgaatagttagtacgaattccattttaatttagaaaactgcaaaaagggtgaagattttcgagggtggaggaaaaggagcgagagggaaaggagagagggaaaaaggggaaatggaagggaaaagggggaaaaa

SEQ ID NO: 14141 - DNA, 1946 bp, Heterodera glycines
cgcttccattctttccttttatgtacatatatgcgcgttctttactttagccacgctttggcgacccgcgtcattttttagcgtgcttctggaatcttctagagaaaagcaggttacttctttatgtgttttcccgttttattatttctttttatactttctcatttctccttcccactctctcttttcacccttatctctcccctccgaatctctctttctctcactgatcgcgctttcctttttcatgatatctcgctcttcttcctcttcctcgctctgtttctcacccccccgcgctccttctctttctctctctccctccttatcacaatgatcactcagtcacctccatttctttcccttttacctccgccctccctctctcgctacgctccttttatactctcttcgtctcacttcctcctattttttgtttctttttactctttctttttccctttcttttctacctttcctgcactctctcccttcctttttttctttcccccacactcttttcacacctccacccaaatgggttccattcttcttttcctttccttctacatcaaatattattgctgctttgtccatcattgccccagggaaaatgtcgccgatcgccccgggggaggggagggcggcggcagcgaaaatgggaaagagaagcagcgggtaattaatgggtaattagtgatgacgacagcgcccgcgtactttggagtttagtgatcaccatgtgatacgcattaattacaacaagaattacattttcaaggacgattagatggttttcaaggattttgcaggaaaatgtatgaattcaaggaaagtattgctcccattgagccgttttcgcaatatatgtcaggttttattttaggtcatcatcataatgaaattatgtaaaaacataaaaaatacaggccttaaccaattaaataaattaaatgcgaaaatataggcaaaaatgattaatttaagagctatttttacatcgatgggcaaattgctctaattttaaaggacattcttgaaaaacttcgaatttccacgaatcgaggaccacatatttcaaacatatacaacacataaattgaaataatcttttgaatatgattacgcttttcggcatcattaacactactaaacccaatttaattattagcatatgggcaaattgctaattttaaaggacattctaggaaaatgggctttcacttttttaaaacaattgagtttatccaaaacacaaatcacaaatcacaataatccttttgtatatgattgcgcttttcggcatcattaattaccacttaattatgatgccctaattggggtcatcaaagggcatcattagacacatttctcacccttttaactcaaattgccgcctcgggcccatgtaaaacccaaacaaatatttttgttattgttttaggtatgatgatggattaatgtacatattgctgcttattattatttgccaaagaacaagcccagtggttgtttggtcatgccaattaacaaaatgagagtgtgccgtcctccgccggcgccgccgttgtttgtgggcagtgctgtgacgaatgagtaatcctcttaaaaacaggacgaatattgcaatttttctgctgatctttagggctgcaaaaaatatggaaatccatatttttttcctggactgtgggaggcctgaaacgcacgaaaaacatgtttgaagcttggtttgaagcttctaggatggatttctatatccatattttccgtatttttccatagttcgcgaactatgtccatattaccatatttgaccatattctgagattgttccaaaaaaacatcaataaaacgacccccaacagataaataggcttctagaccacgaaaaatcggaaattctttcgaaaaatcacgctttagcccaaattgttttgaaatat

SEQ ID NO: 14142 - DNA, 1577 bp, Heterodera glycines
tttaccaagttaatatactatgaaaaaaaatattatatttaaaaaatgtattcggtctttgggaatttggggtgtgcaagagttttcttggtctttagtcttgagttaattccggtgtgtttttttgtatcagtttagagttcaatctgacttttatgtgccaacaaatgaattaaatcagaagtcagcccaaatgccaaaatttaacgctgtagcaatttcgcttactgtcacagtacgcttgctgataggcgcctttctttgggtaaatcatttttacgataccaattttttttaacttaatcagtggtaattaactcattaaacattatttcattcttaagtttaagcattcatcgccatccgacactgaatataattgacgggaaaaagagacaattttttgtgatgattagtagggagtgtaattatatggatataaaatcgcgaaatatggacataaaatggcaaaaatatggacataaatttttcaaattgagggtatgatttcccaaaatttctttaaatttgttaaatataaagtaaaaccttcaaaaatggctaaatatggtattaaaaatcattttagaagaaaatacacgataaagctaaaatttactcatttttagcgaaaaatcaaccagaaaagtgaaattttatcttttttgcttatttttgacataaacttattaatttttaagaaaatttaaatttattcaatattcccgagaaaatttggcgaaaaaattattttttggaaaattttccggtttttgggctcaaaaaggccaatttagctgctgggggccgttctaatagaggttttttggaaaaatcccaaaatatggacaaaatgccaaaatatggacataaatcgcgaaaatatggaaaaaatggatatggaaacccatcctaaaagcttcaaaccaagctaaaaacatgtttttcgtgcgtttcaggcctcccacagtccaggaaaaaaatatggatttccatgtaattctattctattccctaatgattagggatgattcgtagtagcaaaaaatctcaacgaagtaatggaaaaaatatggcgaaaaaaatgaatttatcttagaaacatggataaatggcatttctattttaaagcgatttttccttttgtttttgtcatttttcaaaagattataattgaaatctattctggattcattcttctctgtcataaaaaaacacattaattaaaagaattccattttggcatcgaaataaaaaaacgcaaaaaatttggaacgcttcacgaatttgcgtgtcatccttgcgcaggggccatgctaatcttctctgtattgttccaattttagtatatgtccatttggaatgaacgaaagcggtgggagggacatttcttatatatgatggaagagaatgttgagtaaaatttttgatgggttctaaatgaggaaaggcacaacggccctctgctgcgctcttttcgtttactatttttcttttccatacactctctctttgaatctcctctcctatttctttgccttcttcactctccttgtctcttccctcttttcacagaa

SEQ ID NO: 14143 - DNA, 1610 bp, Heterodera glycines
caaatttacttaagagaaatttttttatattaaggacgttgcggttatgagaagataaagtaccggcgaattcgggggatagcccacgacgaaccagaacttcattcgtttgcttataccctggtatgttaaaaaattggtctatatttatgagtcatcctttcaaattagtgtgctatcagaacatacaaatacttaggtggtaaaccaacgacggcgccaaccaacaatcagtttaattccatacaatgagacccatgttagaagtattttttgagttatatttaaatttagtttctcttgacctttcctccacctcatccctgattcccggaaaatttttgagaatctattggataaatgaccattgagccaatttgtttatttatactaaaaaatgttcaaattttcaaggaatgtaatgttaaattcttcaaaatttcttatgaggatattgcaaaaattgctttaaaaattttctaaatttatgtacatattaaagaaaaaagtattattatttaaaaaaaaatttgagctttgattacttatgataaaatggcatttttctacaaaaatctttaaaaatatacaaaagagattgctatgagaataaattgtatcccaataaagaaggaatagaatcaaagagaataaataaccactaggccataggagtgattttacccaaatattaaattagtgttttaaatctttcttttcctcaatttggtcagaaattggacccagaccctcagtcttgctaaagtattttggtacccggttggtccctaatctactgggtcgtgtaccggatattggattttcaaaaaaccaggctccgagtccgggtctggatattgaaaaagacgggtatctgggttgccgcaaaaaatttgctttggtaacccggtttttgcccaaatacccggccccgtgcatcctagtctaaagtatatgcttcgcatttctttttctttgaaatccgttctcatccataaatttattattttttgtctttcccatcaaataatttttttaagctataaaataaaatttttttattcaaaataatgtttgacatatgttatggtttttctaatggggtgtgatacaaaagctttataatttgattcttaaaagtcccagcctttcacttaacttttcttcttgtgaaatattttctcttcaagataactattgccgacaaaaaagaagtcagacgtttaattgaaaaaacctttaaaaaggttaagtgcggcctgcgctctgtgtggaataaaacagaaagtgtaagcgacaaaatgattattcttaattaaaatttttagctggtgcgcaaattggtccgagtgggatcaatgaacgaagaacaagtgtatcggcggtgatttttgttaaaaaactattgccgacaaaaaaaaagtcagaagtttaattgaaaaaacctttaaaaaggttaagtgcggcctgcgctctgtgtggaataaaacagaaagtgtaaacgacaaaatgattattcttaattaaaatttttagctggtgcgcaaattggtccgagtgggatcaatgaacgcagaacaagtgtatcggtcggtgatttttgttaaaaa

SEQ ID NO: 14144 - DNA, 1645 bp, Heterodera glycines
aaagctttataatttgattcttaaaagtcccagcctttcacttaacttttcttcttgtgaaatattttctcttcaagataactattgccgacaaaaaagaagtcagacgtttaattgaaaaaacctttaaaaaggttaagtgcggcctgcgctctgtgtggaataaaacagaaagtgtaagcgacaaaatgattattcttaattaaaatttttagctggtgcgcaaattggtccgagtgggatcaatgaacgcagaacaagtgtatcggtcggtgatttttgttaaaaatttttcaaatttttttttcaaattttgtaatattttaaaaaataatttttttttattattattattaaattttctcaattaaataagctaaacattttaataatagcaatttcaaccttttcgaaaatagaatttaaaacatccagaaatttaagcgagattgggaatttgcgtcttccccggccgtaaacgaacaagaataatctgcccaggtgaaaattaaaatatgaataacaagaactgtataggcaagtttatgggtgcatgaaatacagataatttggttgctaaaattctgtcattatttgaaatattttaccagttttagaatgtaagctcgcgacaaattccacaataactttttttaatttttcggacatgggtcaaacgagtccgggtctggatattgaaaaagacgggtatctgggttgccgcaaaaaaatttgctttggtaacccggtttttgcccaaatacccggccccgtgcatcctagtctaaagtatatgcttcgcatttctttttctttgaaatccgttctcatccataaatttattattttttgtctttcccatcaaataatttttttaagctataaaataaaatttttttattcaaaataatgtttgacatatgttatggtttttctaatggggtgtgatacaaaagctttataatttgattcttaaaagtcccagcctttcacttaacttttcttcttgtgaaatattttctcttcaagataactattgccgacaaaaaagaagtcagaagtttaattgaaaaaacctttaaaaaggttaagtgcggcctgcgctctgtgtggaataaaacagaaagtgtaagcgacaaaatgattattcttaattaaaatttttagctggtgcgcaaattggtccgagtgggatcaatgaacgcagaacaagtgtatcggtcggtgatttttgttaaaaaactattgccgacaaaaaagaagtcagaagtttaattgaaaaaacctttaaaaaggttaagtgcggcctgcgctctgtgtggaataaaacagaaagtgtaagcgacaaaatgattattcttaattaaaatttttagctggtgcgcaaattggtccgagtgggatcaatgaacgcagaacaagtgtatcggtcgatgatttttgttaaaaatttttcaaatttttttttcaaatttgtaatattttaaaaaataattttttttattattattattaaattttctcaatgaaatataatttggttgcttaaattctgtcattatttgaaatattttaccagttttataatgtaagctcgcaacaaattccacaataactttttttaatttttcggacatgggtcaaa

SEQ ID NO: 14145 - DNA, 828 bp, Heterodera glycines
gtcgcttcacttattaccaatccactactgctgtaaggatcttcatcatactacgtgcacacatagtttagcgtataggcaacggaacgtgacacgcacggtaccgttagattcgccacatcatgctgagtctacggacaccgatcgcgtcccgttccgttgcatattcgcggcacagcgactgctttcgtcggttcactttttaccaatcgactactgttgtaaggattttcaccaaacttcgtgcacacattgtttagcgtataggcaacggaacgtgacacgcacggtaccgttagattcgccacatcatgctgagtctacggacaccgatcgcgtcccgttccgttgcctattcgcggcacagcgactgctttcgtcggttcactttttaccaatccactactgttgtaaggattttcaccaaacttcgtgcacacattgtttagcgtatgggcaacggaacgtgacacgcacggtaccgttagattcgccacatcatgctgagtctacggacaccgatcgcgtcccgttccgttgcctattcgcggcacagcgactgctttcgtcggttcactttttaccaatccactactgttgtaaggattttcaccaaacttcgtgcacacattgtttagcgtatgggcaacggaacgtgacgcgcacggtaccgttagattcgccacatcatgctgagtctacggacaccgatcgcgtcccgttccgttgcctattcgcggcacagcgactgctttcgtcggttcactttttaccaatcgactactgttgtaaggatttcaccaaagttcgtgcacacattgtttagcg

SEQ ID NO: 14146 - DNA, 1297 bp, Heterodera glycines
tcggttcactttttacccaatccactactgtgtaaggatttcaccaaacttcgtgcacacattgtttagcgtatagcaacgggaacgtgacacgcacggtaccgttagattcgccacatcatgctgagtctacggacaccgatcgcgtcccgttccgttgcctattcgcggcacagcgactgctttcgtcggttcactttttaccaatcgactagtgctgtaagggttttcaccaaacttcgtgcacacattgtttagcgtataggcaacggaacgtgacacgcacggtaccgttagattcgccacatcatgctgagtctacggacaccgatcgcgtcccgttccgttgcctattcgcggcacagcgactgctttcgtcggttcactttttaccaatcgactagtgctgtaagggttttcaccaaacttcgtgcacacattgtttagcgtataggcaacggaacgtgacacgcacggtaccgttagattcgccacatcatgctgagtctacggacaccgatcgcgtcccgttccgttgcctattcgcggcacagcgactgctttcgtcggttcactttttaccaatcgactagtgctgtaagggttttcaccaaactccgtgcacttattccaatcgactagtgctttaaggttttgtctttgactttgctttttttccatttattccaatcgactagtgctttaagcttttgtctttgattttgctttattttcattttttccaatcgcctagtgctttaagcttttttctttgactttgctttatttttcattttttccaatcgactagtgctttaaggttttgactttgactttgctttatttttcatttattccaatcgactttgctttattttccaatttgggatttttttgtaatttcgctcttttggtcatgaccgtcagggtaagtgctggctagcgctttgttccttgcggtatgctacggctgctgctggggtgccacgttagtcgtggtctcagtttctccagcgttcggcagtcggtccccgcctcgggactctaaagatgcaggtggccagccgtgccggtccccgcctcgggactcaaaagatgcaggtggccagccgtgccggtccccgcctcgggactcaaaagatgcaggtggctagcaagagccggtccccgcctcaggactcaaaactctgagcacattgaacggtgatggctgctgctggggtgccgcttttggtggccttagtttctccagcgttcggcagccgtcgaaaaacgaaacaagcagctttgctgttgt

SEQ ID NO: 14147 - DNA, 2030 bp, Heterodera glycines
accaatcggatgggtatttagctgccggtgccatttatgtaccgaatggcttgaacagagaagacagcgacattgacgaatacgaagatgagcaatttaccttggaacagttgttgatgtttcattcaatgccagacttgccaaatcaaagtccacccgatgcctatgatgccatccctcgcggttttgatgggtcttcttcgactgacggttcggcacctggcactccaaagcagattgcttggggcgaaaatccattcgacactgagcattttccatcatcatccagcagaacttgaattttgtctaatgataagataagaagattgttcgctgacatgaagaggactatgaatttttgttctaaatatacatttttaaactttatgaaacattatacatatattttgtaaaggtttccttttcactaaaatgttgattatcgtttttctataaatgcattttgatgtaatcggcaactctaggttatctcgtttggtaaacagttttgaatgatttatctttattaaatagttagatataaaattaagttttgtgtgtgctgttttgatacataaaaataataagaaaaatttatttccatatttttgtgcctgttttaagttattaaagttatttctgcctatttatgcccattttgcaatccttattagctattggaaatcccgatgttcaaatttaccaacgttcttagctccttaaatgaataaatgaggcactaacacaattttcaaaaggcttaaatatatgaatttaaaaagaagtagatttttatttccggcttttccattgtaggcttttaaaatatgtatatgttttttacatatttccggtattgataaacatttttattgagtgaaagacttattaatttcctgcgcacatattttcatgtgattttataagaaaacaaatatttccaaaacaacaaaaacaacaaggaaatacatatattagtctgtatttaagtgttttcttttcaagaaattattgtgtctgaatatttttaaacagttacttcacatatttcatcatatttaaaaaaattaaaagtttttccctcaaaatatttaaatgcctaaaaataatttttgtattttaatattattttttgtattacccgtttatctgaactagagcccggaaatttcaaatttgcggatcctgttgcaggattagaattcaaaaatttttgcaggaccggacccggccggattaatcctgcaaatcctgcatttaaaatctgcaggatcctgcgcaggattgcggatttttggaaattttgaaaaattttaattaaatttcaaaaaatttccaaataagaaaaaatacctgatattttgaaaaagaaatttttaggggctggcgggatgcattaaaaggggcgtctaagatttttcgaatgggtcagagggtaaaaagagatcgggaatcaaatctgttaatggtccataaatttgactattttttgcttttcaaaaatgctttttttcggcgaaattttttcataaactaggaacaaaggggtccgtttgtgccgataggcgccgccgcaaattatttttggaaaattttgacaatttcttatacaggattaataagtaaaagccgatccggtggtgccgataggcgccgccgggaaatttttttttgcaaactctaggtgaaatttgagatgaaattggatttaatttgattgaatttattataaatttattcaaaattttggcattctgttcttatcaaaaaatcaatgaaatcctgccggatcccgcacaaaaaccaaatttgcggatcctgttgcaggattggaattcaaaaatttttgcaggaccggatccggccggattaatcctgcaaatcctgcaatcctgcaaatcctgcattttcctaaaaatgcaggattgcgaactgggatcctgcaaaatcctgcgcaggatccggtcctgcgccgggctctaatctgactcatggggttttaaaattgggaaactccggaattattgcca

SEQ ID NO: 14148 - DNA, 1244 bp, Heterodera glycines
  unsure (1)..(1244): unsure at all n locations
tgaccacgattcttgatcagaggacaattagtgctgtgaagcatcgccancacacgcggaaaaaaataaatgaaaaagatgataaacaattagctgagttacagtacgaccccgaaaggntttctgtaggggttgagactgacccccgagctccccactccccgtcccggttcttagacttttttaaaatctgctccccaaccccgatccccgaactgtcctcccccgatcccggacatgcgttcctccctgacgggcagcgggggaggggattatgcacagatatgggtgttgaggaaaaaattttcatgaattggaaattttatgaaaaaataaaaaaataatttttatctttttaaaaatagtttgattggctattgttaagctttgtagcatttataacgaaaaattttttttaattctcactctcaaaaaatatacaattatttatttttaaattagcctaaagtttaaaatatttcacaccttttcggctttgcctgagcatccgtaaattatacgagaatcacctaattatagtttaaaacaaaaagaaatttcagccttatcaaagacaaacacggagaagcatctggcagcaataaaagtggcaacaatagacggcacaattatcaccaccataagagcaaaagtagtgaccttcacagaagaagcacggaattacacagcatttcacgacggcatagtgccgactcaataaatgagtcacgtggccaaaggagacgctcaaaaggtagagagaggaccacccaaaatataaagggtgttcacatcggggaaattatttaattagggagcaggtttttaggaagcagatttattgttttttaactaagcccaaacttatcagaatgaactggatttggcaacaaaatactttggctaagtggataacttcaagtaaaaatccaaaacttttattcacgtacaaatttaaaaaagccatcaaattttaaaaactgaactcatttctatgtttttaataacaggaagattattttagaaaatgtttgaatttatattgaattttgtatgtaattagaaccaatacaaaaattttcctgaaaagtttcaagtcactcgaagacaatgaatatgttacaaaaaggcattttcatgaccgttatttttaaaagattccagctcattatcatttgaatactcttggagtcaagccttttaaacttaatgcttaaatggctcataattacttatcataaaaa

SEQ ID NO: 14149 - DNA, 1189 bp, Heterodera glycines
tattttatttaaaatacaaaaattacctccacaaaaaacgcctaagaatgcgaggaggacgatgaaaattgcaagacggcggaagagggacattttgagggggttttgtttttaaatttaaattatctgtagaaaattattattattattattattaactttattttttaataaagcataataataaatgaattccgaccagaattagcttaacatcgaatgctttttgatgatgatcaatgaaaataagaggagaatgaaagtgaatgaatgaagtgaatgaattggttgtcgagcgacggacgaccgaaccgattctgatgatttgatgattcattgtgaaagtgctgttttatgcataataatcaaataatgtaaatgaataaactaataaattaatcaaaaaataaagttattttatttttatttagttattattggaataaataattatagaaaatttaaaaaaacctgaaaaagtgaattaataaagtgaaaagttgaagaaaattaaaaagctaaaaagcttgaaaattataattcaaaaataaataaatctaagcgataaatacaaactttaattaatttttattaaaataaacattttaatataattatttcatgaaataattcacttgtccagaagttgggcattcaaaacagatgaaagaaacattaagagaaattcgcgacttaaagaaattctgcttttccaaaggcattgttggtttaaatgaaaaatttccttgccaagagaaaattttttctaatttgaattttaaaactgttttcaagctaagcatttagaattttcatagcacgatgaaagattttctaatgttgtgtaatttccaaccaattgcattcaatttcccaaaaatgttaccggctgtgaaatcccgaccgaccttgccgacccagacatataatgaaaaaatgaaaacccaccggtcgatttggacaaccccgacaaaccataccccgcttttcacaatctcgacaaatctcgaccccgacatttttcaaccccgagaactgacatttcccgaccccgacatttttcaaccccgagaactgacatttcccgaccccgacatttttcaacccagaggaatgacatttcccgaccccgacattttgcaagcctcgaaagggggcatttcccgaccccggcaaaccccgatcccga

SEQ ID NO: 14150 - DNA, 2146 bp, Heterodera glycines
aaaaattatcggtgtttctcttcgtatttgagcaccatttatagagagaagtcaaatcatcttcagaaatgtttatttgtaaaaacataattcttatcatttgtacgatgtattaatagtgctcatatttttaagcactaaaaataccaaaataggcaggatggaaacctagaaaattggcacttaaaaacttgaaagtacttaaacataaaatttttcatatatttcagaccaagggaatctcagaaaaaaaattgaaaaaagcaaaaaaatatgagcccaaccaacctatcaatagcaaaattgcacaacgaagtgaaaatatattcaaaaaaatttttgcattgaaatgaaatgcccaaaaatttaaaaaaatatttttttccttttctccgctggtttccaaaaaaaacaatcttttgtttaccaacttagtttattgttatgtatgtattgctggtgccagatagtttttccttatttccgccactttggataatttatcgacaaaaattcttataactttgctaataataaccatataattgcattcttacttttattcaatagcttaaagtttatttatattttcaaaaaatttcatttcataatattttaaaaaattttataaagaaaaaaaaatttttttgaacattttttgtcaaatcattttgaaaaatgactgttaaactacaccaagttattttaaattatttatttctgtaaaaaaggaacacttaaattaagtttcgttccttaggtctttcgtaaaaacttattttattcgataatttattttaaataataatctatttatttttttaaaaaatcaataccatgccttccaacaaaaacgaatttccttcgagcgaaaacaactttaaatatgtaatttaaatattttatttaaatttaataaatgtgatttttcaaatctattattaatttcaatttgattcaaagctttagttgcgtccgtacgaatggctttgtgttccaaaaaatgccacactcgcgctgatcaaaaaaaactacaaaacacttgccattgccacacacccggacaaaaacaatcaatgcagcggcaaattgtttacggtttgggttactgtacaatttaatttaatattttagcaagatatataaagaaaattatattcagctcattagcaatgccaaagatgatcttcttggccgctccagaagctgcagcagaatggaggaggtccgtttttgaattcttaaaatttggaacgatttatattaattattaattaaaatcactaatatattaaaatattaatttttcactaaattttactgttaatatgtacaggaggacaaccaccagcagcaaacgaacaaatccaacaaggtcttcgagaaacgagtgtttgaatcatttccgaaaaatgctgctgacaatgatgagaagagcagtgatagtgaaagtgaaaagggtaaaaattgggaacaattacatattaagcaaatctaattaaaaaaaaacattgcttaatattggatttattaattcagcaccaattttaaaatactatgctccagggttaattgatatcctaattttggtcggtaagcacataaattcaatgttatttagaataagcaaaaaattaaaaaatttgatttggtatgagcattatgtgttttcgaacctaaaaagacatgaaaacactaaaacctagtcctattattaatgcgaaccgtaattttatcaattaattatttttatttaatattttatttttgaaaataaaagtttactttacctaatattaaattcaatttataaacaaattaattaattaattatataaattgtagatgatgagttcaaaattgctgatgagaacttgtggtcggtctataaaatggtatgatttttttaaacattcttaccttttttttttgtaaattgcctaatcctcctaccgtactttttctataacatttgggaaaagatcgttagaaaagaattttttcaatcttcagttgcgtccgtacgaatggctttgtgttccgaaaaatgccacacgcgcgctgatcaacaaaaactacgaaaagctttccattgccactcatccggacaaaaacaatcaatgcagcggcaaattgtttacggtaa

SEQ ID NO: 14151 - DNA, 4672 bp, Heterodera glycines
attatgctatttaaaaatacttcaattaggaattttgattttctgatttctcgagtctccggagcttaatgttaactatttaatctgttgatttacaacatgggttggcacaaataataaatttacgcgtctaagcaaatgtaattggaagaagggttccaattcaaacgctaaaaaaagattcaattaggagaaaattcgttcattggcaaaacaataaagacgatgaaacaatggcggcaaatgcaatcgcaaaaggcgggggataaagcaaagaaaaagccacggaatgaatgcggagaaaaattgctaaggccaccatcggtcggctccattcaaatgccaatccaattattctgccccaatttgctcatttgtcttctcgggaaaaaccacaaggttttgttgtggcggagggtaaaaagtggcgggtttgtgccatcggagaagaaaaatgaaaaaaaacagagaaaatgctgaaaatgacgaatccttcccaatttgggaaaaatgggcgcgaaaggcgcaaagaaatgccaatttatcatagcaattaattaatgggttggctgtgccattgtttaaatcaaatgcaaaacgaagcgtaactgtaaacttaagataatttctattgatattcctactgtgcccaatttaccgtatgccatggggtattattttttgttttctgcctaaatttagcgtatgtccatttcgctttggccaccctctcttgcaatcaaatgcatcagtgccccgctgatcactgattgattgcttgcttatgaccagtgatcaccacctttgctgctgctgttggatgtgtccctccgagtgggcccgttgccgtagcgccgaaatgtccaacgccacggcggcgcacaagcctccggcgccgtccagcggcagacagcgtcggaagcgtcgtcgccggtgccgtttgccgacattagccgcttcctcctccgcttcttcgccaatgttggcactttcctggtgccgttgttgtgccgtatgctcctcttctcccatgttttgctgctcgtcttcttccttttcatccttccgctgctttttgccattgtccgtctccccactgcgcttttccttttccctttgcttttcctttttcagcgtcggttcaatgactacaacggcggacggcgatggcattggcaccgtcgccgtctccgctgccgccccttcgtcagcatactttggcaccatccttcgcataatttgcgctttcttttccactcgaatcagatcagtaatcccttcctttttcgattgctgcaacagaacgaaaggattggaaatgggaggactacggtatgcgcaaaacgtttctgaacactatgccaagcattgtttacaaagaaaaaataacttcgtaaaatttcgaggggactttcataaatacggcatccttttacggtaggggtcaactccgtctggccaactccgtctcagcaatgttcaaaaagctataagttttttctttgttggccaaacttcacaatcatggtatcattcgaaagccctagatgtttagaagatatttataagctatttctcagtgattaatcagctctcaaaaaagttgtcagttgaaaaccgcaaaaaaggcagaattttcgaagttttttatttctatctttttttatagttcgaaattttctgtaatttttagtaggctaatagagcctgtaaagagctttcgaatgatatcaagattgtttgattcggtcaataacttcaagagttatattgactcaaagttggctcagacggagttggcccgttccgatccttttagacttttttttgaatttgcctgtttggcgttttgtctttgaaccaaaagcacaagggaatcgttttgaactttgaactaattttttccaacaaaaagcgacaacattccctgaaggcttttcatcagacagaagagtgatttgaaagaaacaacattttgtgctttccctcctaaacaaaaacagccaaaaaaataaaaataatggaaatgtgttctcctcctccgacccaatttgccataggtcaaaaattggccaaatttttgccgcccccccccctcgcgcctaattttgcttttgtttgccatatggatttgaaaaggcagggaaataaagcgaaattcggaggggagggacagcaaaacccatcacacccacgtcgaaagcgttaccaaaattagacggtttgtgtaatcaaatgtatttatataaacataaagtaatgaaaatatttaatttaataaataaatttagtcatccgaaaaaatgattggaaaagccaaaaaaaggagagatcaatcaatgggagagaattataataagtgacatcgagaaaccattgtgagatgggagaaggcaaagaaagagagcagaggcagagagaaagtggcagagaatggggaaagggaacacacagaaacaaatgccaaacggaaagacggcgaaacattggccccccggggaaagagtgagtgagtgattgatgatcagagccatcccaacatccatcgctctttcatcccttcccttttcctcactcatccgctgccgatcacagtgcctctggcgcctctccgctgatcagtgatcggtcccttcgtcctcatcctccccctccccgtcttccgccgtcgctcggacgaattgccggggacggccgcccggcagccgctgttgtccgtgctcgggctgccgctgctggtggtgcccattggtggccccagccagaaaattctccggatcccaatgctaattgtaaggggggaaagtaatgtaaaaactaattagtaattaattaattgacaaaaaagaccgcccaattgtcccgtgagaaaaaatgacggagaaaaatgggaacaaaagggcaaagtaatggaattttaaccaattttatgagagcgttcggttttgaaagggaattcccgaacttgatgttttttagaatttttttcctccctaccatctcaaaaactcacatcgccgtgttcaatttcgggtccgttgtgcacaatgtggacagtgacgcgctcgttgaactcgagtccgttcagcaatttgggagtcagtctaagggaaagaatttttacatgaaaatcaagtttgctaaattgaacaaaaaagatcattatcgaaaaattttaatttttgactcttactcgatttcggggtttagaaatggtcaaaataggtgtgagattcgtaagcagggactcaaaacgcgtgaacaaattttcatgactgggcattatttataaaaaattttgcaacccaaaaggctatccctcccttttgtttttaataaaattcaaaaccaacctaattttaattagcgcctaaaattcaaacaatttgttttttgaaaatttggcaacctaaatttttacgattgtgtaaatttcaacttataatccaaatttaacacaaaataaggcatcgaaaacgaacaaaaagtattgcgttttggcaatgttttcgccgcctcccctcgccgtgccgctgttgcccagcagacggaccatcatgttgaagacggcccgctcgttgtccgggtccatgccctggttgatttcgtccatgcaacggaacggcaccggacagagattttgtagtgccaacagataaagcattgtggccacactgcgctcgccgcccgactgcgtgtgcgggtccaacacgcggaggccaacgccgttgcggaatttgacgaggatggacagaccgtactccgcgacattgtactgtaacaaaagaaataacacactgtaaataaatggaacattaaattttaagaatagaaatgtcgaaatcaacaatagcaccgccgagtgaatttttaaaaattcggcatcaagtacggaaaaataactcgaatttttcagaaaatccacaaaattactaattttagatgaatgatttttttcgaaaacgcgccacaaaaatacggtttgaaaagcaaaaaaaggtcgtttgggggaccacccaagccgaaatcctccgtccctggcaggcataaaatcctaggggaaattgtcgccgaacattttcccaaaattccatcgccccttccaaaacaagggcatggccatggttattttggccaaaaccaggtggggttggctcactttgttctccggcggcgtgtcgagccggacttcgccggcacagccgagttgggcgaaaaagttggtgaagttgttgctgatgttggccaccaactcgcccagcgggtccaaccactcgctgagtctgtcgtccatttcgcgcttccaccgttcgttccgttcgcctactcgccgcacttccgcgcccaatttgtcgtgctcctccaacagtcgctgatactcgtggacatcctgtaaaaaatgcaatattaatttaatgatgtattatttagtgggagcagctcgtccccccccccccccctccctcccgccggccccgagaaattttttaaaaaaaaatttgctaacttagaaatttttcaagaaaaaattcttagaaagttttttcataggaaaattctaagaaaaaatttttttgagaaatttttatggtgaattactaagatttttcaaaaaaaattccaaaaatcgctgaaaatttctcaaatttttttttcttagaattttcctatg

SEQ ID NO: 14152 - DNA, 2000 bp, Heterodera glycines
ccacgcgaaaatggcaacgcgaaaatggccacgcgatcttcctcagcgcgaaaatagccacgcgaaaacggccacgcgaaaacggccacgcgaaaatggccacgcgaaaatggcaacgcgaaaatggccacgcgaaaacggccacgcgaaaacggccacgcgaaaatggccacgcgaaaacggccacgcgaaaatggccacgcgaaaacggccacgcgaaaacggccacgcgaaaatggcaacgcgaaaatggccacgcgaaaatggcaacgcgaaaatagccatgcgaaaacggccacgcgaaaacggccacgcgaaaatggccacgcgaaaatggcaacgcgaaaatggccacgcgaaaacggccacgcgaaaacggccacgcgaaaatggccacgcgaaaacggccacgcgaaaacggccacgcgaaaatggcaacgcgaaaatggccacgcgaaaatggcaacgcgaaaatggccacgcgaaaacggccacgcgaaaacggccacgcgaaaacggccacgcgaaaatggcaacgcgaaaatggccacgcgaaaatggccacgcgaaaacgtcctggcccgaaataaaagtaccatttttttttctccttcttttgtggcttatcgtataaatgattaaattcttggcaagtcgctttgcctttgacggttgagtgagattgctgttagtttgttgtccaaaatctgactacgaatttcttgactattcgacatagttatttcgcattttctcactttctatgcgtgatttcgacagcaattgaacccgacaattagagactgggtttttaagaattattgacaaaaatgcaataaaaaaacgaaaaataacatataagattttcccaaaaaattgagaacaatatagccctaagaatcgaccctaacatttacaaaaaggacatccataagaaatgaaaaggttcttaaaaattcaatctcgaaatttttttttactcctttggcatcttgtgacgtggaaatcttttttcatttacaaacaaataaatacaatataaatcaaatctgagatgcgaagtgaattgtagactcaggacgaactacgtacatttttttagtttcttctcgctttccaataaacaactctacagccggctctaaattcctataaaatctcaaaaaatttaatcattcacttcaaattcaacaattaagaaacaattgatccgtattgaaagcaataaaaatgtttattaattttcttatcaaattgtattattatatttaaatacaaacttagaatttttaattaaataaaaaatgatatgaacatggaaaagatatctgttgagaaaattattagcgacctttttgtggtttatgctcgaggaaatcagcatttacatgaaaaaacacattaaaatatctcgaaaattttttttactcctttggcatcttgtgacgtggaaatcttttttcatttacaaacaaataaatacaatataaatcaaatctgagatgcgaagtgaattgtaggctcaggacgaactacgtacatttttttagtttcttctcgctttccaataaacaactctacagccggctctaaattcctataaaatctcaaaaaatttaatcattcacttcaaattcaacaattaagaattgaatttcagcgaagaaaatgccaaaaagaaaacactgtttgactttgacctagggttaagccccgagccatttaaaaactttgtcctggatttgaaaataaaacacatttgctaactctttacacctagcaggggtagtgcgtgaactgaataatccccgtgttgatcgagcaaaaaaaaatgccgtggattgcgcatcgctgatcgcgcattcaaaaattcaaaattttccgatttcgtaaaccaattttttaagccatggataatcatttacatactataaagatttaaattaaatatatagaacacattaagagggggcgcttaatttgattgtgcacagtctaag

SEQ ID NO: 14153 - DNA, 1783 bp, Heterodera glycines
  unsure (1)..(1783): unsure at all n locations
ttaagaaagatttattattcatttttgacatttaattcaaaaaaaaaagcattctaaaatattgaaaaaattcaaatatgaatttaagaaccaaatttgtttaaatttactttttttaaatacttaacaataatcaacaagatccactttttaaagattaaaccaagtttgtcattcatttcataaattttagataatataacaataacaataaaaaaattaataaatttctcgacaattacttaacatattcatcattattaacgcaagtgcattgattatagagatcaaaaaaaataataattggcaaataagcacatagtttttagctcgttacataaaattatacaaattataaatttatgataattaaataaaattaattttcttgttaattaataaatatggtacaacaataacgcaaaaaatttattatcttttattttaaaaaataaatttaaaaaataagtaaaataaaagcattttaatataattatacaagaaacaaaaactttaatagattaaaaaccgtaaaattattttaaattttttaataaagattaacataggactacaaggaaattaccgaattttcaacttttattgcaaaatatgttaccaaaaaacttttaataaatcaatttaagtccaattaaacatttaaattactagctaattaatccgtttttttactcaaatattaatcataggtaattttttaattgttaaattaccagcagtcaaataattaattcacaaaacataacataggatcataataacataataaattttccaaaggctttacaaaacaaaatattataaaagaattattttaaaatgtttaataaaagattaacataggactacaaggaattaccgaattttcaacttttattgcaaaatatgttaccaaaagactttaactaaattaatttaagtccaattaaacatttaaattactaactaaataatccgttttttactcaaatattaatcataggtaattttttaattgttaaattaccagcactatttatatcaattaattaattaatgcaccaaaatatgacatagcatcataataacataataaatcaaatggacaattatatgatttaaaaaaataatagaataaatagtttaaagatttaattgataattcaaaataataaagacgtacatcaaatttaattgaaattaaaaataacaaaaaaataattcaaaaatagggaaagaacataaaattttaaagattatgaaggcgacatcctaaatcttaattgaaattaaataaataaagtaattcaaaaaataaataaagatcataaattttgaaaggcacacaaagtaatccattttatgaagagtgaaacataattgaaaagaaaaattaatcgagagcgattttacataatgggcaagaaccagatattttgagccattttttaatacaattgagatgataaagatgggtgcattgtagagcagagacaatactatccataacaaaaagttccccacaaattgagcactcaataccctcgttaatatgcgattggttaatttggcaagtgggtaaacgcttaattttactaagcgggtaagggccgggaggaggcgggggttccactatagatgacaaagtaggttcaactgaaggacgaaccgattggcgggactgccgctcangacgangtaacccagtacnccctgacgtgctgngtctctcgtcaagaacaggctcctgcgccctggcaggtcttcggtagggatgctaaaa

SEQ ID NO: 14154 - DNA, 2209 bp, Heterodera glycines
tcaaacaaaaatgtgaaaattctgaaatatttgcctcaagattctggctattttgttgttgttgtggttggaaattggtgaaaaaatgagtcccgacattttgatggatgccaggcaaatgatttgacaaattcgtgggctgaaagaaacaaaaaaaatgttttaataaaaacaaagtgtatttgataatttaaatttgaaaaaagaatacactacctgaagattctggcaattttgttgttgttgtgattggaaattgtttgaaagatggggcccgacattttgttgggtaccaggcaaatgatttgaccaattcgtgggctaaaagaaacaaaaaaaaatgttttaataaaaacaatttgttttttgaattatttgcctgcaaattctgcgaattatcggcattttgtgggccaaccatggcatgtgtgatcatttgattgttgttggcacgcaatgccggcgccaactgaaaatttctttaatttttttttgatttgccgtagattctgtaattacaaaaaaaatcccgaaaattccataaaaacattaataagtaaatttgactaaaaatgacttaaacttctaaagaattttaaaattatacaattttttttatttgttcaaagatcaacaactttagcaagatatttttttatcgcttctttaaaaatttctcaattaatatagcaccaaataaagtatttttcgcatcccaatatcattttttaaatgcagaaaaactttattttttttaaaaaattttaaaactcaaaaataatccatgttataatagatttgataatatcattaaaatctgatttttaaacctgtgcaaatgattggttattgtgttgagcgtgtggtaaattattcgagacttgagctgacggaataaaaagctaaatagactaataaaaattggttagatttatattatttgattgcctgagcgaaagaggcattttggaaatttcccggcatttggttagttgctggggacacaaactattaacacaaacaaaagataataaatttaaataaaaattattcaaatgcctgatgttgttgatgcacaagagaagcgttttgataagggggaggcatttgactcggaggtacaacaatttgctaaataatttaaaaattatgtatttaaagaaaaaaagacttgaataatttattgcctgtgaagcagacgatgagttttggtaacccccgggcatttgataggcgccattcaattgacccatcccaaaaggatgagaaacaaaatgctaaatacccatttgaataattaaatctgactttttaaagaatttttttttaattaatgaatttgaattgcctgtggcactgttgaaaaagttggctgaaatgtgcccgctgaaggagtgccatggatcactgaagacatggggtgaatcccaagtgcggtcgggatcattggctaaataaaattaaagaaatttaaatacacaaatttttggttttacttaagtaaaataaaacaaaataaattgcctgaaactgctgaccaccgttttgacaatttggattagtgtattggaatggggtgccaacattttgctgccctgggatcattttttctataaaaaataaaaacttaaattgaataagaaatgaaatttattgggttaacacctgcaattttaaaagtgaaatgtgcgaatgctttagcagcagaagaaaattgtttggacagggagacactccgcctccatcgaacaaaaaacatttttttagttgcgaataaaattatttaaaaataaaaatttatttgctgaaaataaagaatgttacaaaaataatggccgcttttccatcctttttttctatgaaagacatactatttcctttcattcaattctcaccgtttatcgggtaacaaacataaacaaatttaacttcctttttccccagtgctacatggccgagtggttaaggcttcggccgaaccaaaggttcgattccaccgtttttgaatttttcttttaatttaataaaatttaaatttaaaaaataaataaaaataatcaaaatatttaaatatttaaaaaatatttcaaaaataaataaaaattaattgcggttagagactacatataggcaagagaaaaaaaaagctagagaaaaaaagctgcgaagccaatcaatcgataattgaagtagtctccctatgtagtga

SEQ ID NO: 14155 - DNA, 2788 bp, Heterodera glycines
cggcttgtcattgctctgcgggtgataaggcggacctaactttgcttaattcccctggtcctgcaaaaatgggaaaattcatttgagtgaaaaggtgggccattatcggtgacgaaccatatcgcgaaaatagccattccaattggacaatgacattgtcggcggttgtgctctggactgagaatatttctggccatttgctaaaagcatccacgacaattagatagagacgtccatcggaacatggtccggcaaaatccatgtgtagacgctcatacactttgtttgtagaaggccatgaacgaagcggcgcttttggcggtgcttttgctgcaagtgcacattcgtcacagttttggacgcacctgtcaatgtcgaggtccatgcgtggccagtacacgtgtcgctgtgcaagtgccttcattcgtacaatgccaggatgagtgaaatgtagcgcggacaggatgcgttggcgcaattctgccgggatgatgacgcgctctccaaacagaagacatccattgacttccgagagtttgtaccgatgtgtgaaataagatgccaaattttggggtgttttctttggccagccatttcgacaaaattcggaaacttccctgagagtttcgtcgagttgcgtttgttcggcaacttctttggtggtgaccggaagttgatcaattgttgccatgaacacaaattcgacagcggactcgtcgggctcatcgcgtgaggtcgggtgatcgtgatctgaaattgacaagggaagttcctcaatgttggcgatcactcggtcttcagattgtacagtttcgcgttgttgagcgaccagacgtgaaagaaagtccacctgaccaaatgaatttgttgaaatatatttgatttggaaatcataatttgaaagaattaaagcccatctttggagtcttgaagcggtgtaaattggtattccgttctttgatccaaaaatcgcaaccagcggcttgtggtcggtgagcagtgtaaagcggcgtccgtagatcattctgtggaacttttggacggcgaaaataagtgcaagggcctccttttctatttgtgaatagttctgctctgcggaggagagggaacgtgaggcatgctcaaccactttttcggagccatctggaaatgaatgactgattgtggctccgattccgtttttgctggcatccgctgcgacgatgatcggcttggatgggtcgtagtgggtgaggagaaggtcggactgcatcaactcctttgctttgacgaatgcttgttgttgttcgtgtccccattgccaaggaacatcctttttgagcaactcgtcaagcggtgtgcggagctcacgcattggtttgatgaagcgtccgtagtagttaagcgcgcccaaaaatgaccgaagtgtttgaaggtcatgtggtggtggcatgaaatcaattgcagctgaacgagccgggtccggacgaattccttcagctgaaacaatgtggccgaggaacttaatttgggaacacagaaatttgcatttgttcaaatgaacacgtaggccccagtcttggagccgggaaaagaatttcttgagaagcgaatggtgttcctccagtgttggtgtggccacaatgaagtcgtccaagtagccaaaaactccgttaagtccggcggtgagctcatccataagcttttgaaaaatgctgggagcgcttttgacaccaaatggcaggcgttggtactgaaataagccccggtgtgtgtttattcctactaattctttcgattcctcgtccaacgcaatttgcaaataggcgtctcggaagtcgatttggctgaatactgttgagccttccaacgctgcgaaaatgtcatcgatgcgcggaagtgggtggcgatttaactccaaacaatcgttgaggcctgttgcaaaatcaatgcacacacgcacatcgccgttcttctttcgaactgcaacgatcggcgctgcccacttgctgtaatcgacttgtttgatggcaccgcaagcgacgagccgatcaagttcggcgtcaactgctgatttggccgcatgtgggactggtcgaggacggcagaagacgggttgtactccggacttgaggtggagatgtgcgcacattttgttgcaaaggcctaagcttggggagaaaactttgggaaatttttgctttaaaattgtcgccaatttgtccgggtcctccgagattgagattgaatttgaatcggtgtcgaatttgaattgatctgtggtgagagtagtgacaatgggacgttgaagtgccgcttcgaacgccctgatccatggaagaccaaacaaattcattgctccttccggtgcgacatgacattctaattgaagtgtgactccttgataagtgactgagcaaatgaaatacccggagatttcgaaaaagtgccccgaatatgatttggcttttgaaatgccctttttgagtttggggctgcctaactgttcccataatgcttgctgaataacggccaaacgtgatccagaatcggccatcagtgatgctttgttgccattgagttgacaatcgaccatgatccaatccgaaatgtcgtctccgatgttgaagatggacattgttgcatggttgcggtgtgaattggacttggatgatggcgctggcaggcggcattttgattgatggtggccacggcgattgcagtttgagcagatcggtgcctttggacagtcgctgatccagtgcatttggtgcagtaacgcatggcgacggaggctgctgcggtttgc

SEQ ID NO: 14156 - DNA, 2058 bp, Heterodera glycines
gacttgtttgatggcaccgcaagcgacgagccgatcaagttcggcgtcaactgctgatttggccgcatgtgggactggtcgaggacggcagaagacgggttgtactccggacttgaggtggagatgtgcacacattttgttgcaaaggcctaagcttggggagaaaactttgggaaatttttgctttaaaattgtcgccaatttgtccgggtcctccgagattgagattgaatttgaatcggtgtcgaatttgaattgatctgtggtgagagtagtgacaatgggacgttgaagtgccgcttcgaacgccctgatccatggaagaccaaacaaattcattgctccttccggtgcgacatgacattctaattgaagtgtaactccttggaatgtgactgaacaaatgaaatacccggagatttcgaaaaagtgccccgaatatgatttggcttttgaaatgccctttttgagtttggggctgcctaactgttcccataatgcttgctgaatgacggccaaacgcgatccagagtcggccatcagtgatgctttgttgccattgagttgacaatcgaccatgatccaatccgaaatgtcgtctccaatgttgaagacagacattgtggcatggttgcggtgtgacttgtacttggatgatggcgatggcaggcggcattttgattgatggtggccacgacgattgcagtttgagcagatcggtgcctttggacagtcgctgatccagtgcatttggttgcagtaacggcatggcgacggaggctgctgcggtttgcgctgaaattgggatgatcgttgattgttgctggtggtggtcgtcgtcttggacgagctttgcgacacctccgcttttgttgttgatgatcccttaatttttggggttttagagtgattgaattggccacatgagttgaatgggctaatgcgttggaagtgttgcgaagagagagaaacgcgcggcattcttctgtgagcttctcgaatgagattgcttccggcggtgtcttctttttcgcttcttccaaaagtcgcaaacaacgctcacggagttctcgatcagtgtccgaaagtcccgtgaggaagatcagtgctttgatttcgtctttggtcagatccatttgtgatcgctcgcacattgcgttgacctggcttgcgaaatctaatggggattgtgaaattgattttgtgagctgaaaacattcaaatcgacgggtgaaaatggattttgtttcaccaaacatagccttgagcttgtcgatcgtctgcgccagtgtgaaatcagtgggcttgcttggaagcacactttctgcatagcggttgtactcctccgatccgagcttgccgagcaaaagtcgaacttgcatctgatcagggaggtctttcccatcaatttggatgaaaggcccataacggtcgagccaattttgaaatgttgaatccatttctggattgaatgaaaattcaccaagttgggaattaatggtggaataaattgttgaatgattggaaacattgggatttggttgggcattttgaagcaaattttgaaatgcttgggtctgttggtcgactaattgctttaggatttgagcaaagtcaacggccattttagtcagaaattgaattcaattggagcagagtgagtgatgaatttgaatggtgataagagagagaaatggttttgcttggtttcggccggcaatgctgcagtggtggtcaggcacagagaaatgaatggatggaaaatcaataaacgacctttggtgatgggatgatgcacaaatgcgctgagtgtagcggtcgcaatgacttacactttcacaaatgtgtctttccttatagcagtgcactcagaggctttttacggcgtaagtgttgcaataaggcttctcggctcgcttggcgttcagcgggctatgattttgccttgacgtttcaagccgatgtgttacggggtgggcaaaggtcgaaattgatggaaaatgagtgaaataggtgaagtgccgactgatgcgagctgctgacaccaacctcgcaaaa

SEQ ID NO: 14157 - DNA, 1084 bp, Heterodera glycines
aaattcagggggaattggtccgacgatgttttccgctggcattgatcgactgattggaattgctttttcggaattgtataaaaattcatttattttgttaattacagtatgcttcagtcacgatagccttaaaaagcgactgtatttggcactgtgaactgtaatttctgtattgtttggtttctgcttctctgttctattttcaataattgtctatgaaaatgttaaaagtaaccctccgaatgtgttcagttcatccagcaaaattgcaacatctttaactggttaataacgaaatgttcttttacatacaattctttttacattaaaaaataatgagtccaatttctcgagttttggctaatgaaaaaaataattgggtttcactaattggtctcattagcgggacgaccttttctatgtgatgctttaacaaataaaataacgaaaataacggctcttttttgcataacattttttcatacttaaatttctcatgagagtgagtcatgctgcttaaatttttcatatattttgaattttttttgtggcagaataaaaacactttcttttttgtgtttgcgaacaaaaatcgggacttttatttacatattttgggatttttctacatattacatatgtacatatttttatatatattttggacttttcgccattttttcgtacatattttgcaatttttgaggattttttaaggaaatttttattaaatgcccaaaaaatccaaaatttagcaatttttcgtacatattttcattttttttcatattttgagaatttatagaaatttcttgtgaaatttagattttttttgagaaatatacctctaaaaaatcaatttatttcaaaaacagataccaaaaattaatttttaaagtactaaaatgtgattctaggcctatttgggtcatttttattcagggttcgcagatgaaaattttcaaaagcctcatttggcagacaaaaaagcctcattttgattcaaaaagcctcatttttacaaaatttattcaaaacacgcttaaaatgttcaaatgttatatttctgattgtcccatgatca

SEQ ID NO: 14158 - DNA, 3593 bp, Heterodera glycines
gggatttccttggcctgatcaccagggcttataattatttggaaaaattgcaaaaatcaatcacttacttgaaactcaggcctagcctaagcttatgtacgaaaattcaatattttatgggccaaaaagcactgaaaattgccctaagttatctttttatgtatattaaaaaaagtctggcactaacttcatctgcgtgatttggacaccccaatatacacttttttgcaattttagccggtcgaccaaccacgcaaatcccatattttttccctcgactgtgggagggctgaaacgcccgaatacatgtttttagcttggtttgaagtagggttcgagccccgccgccgcccccgcccccgtgattcagacccccgcatcccccgcccccgcgaccagggatggacgaaatttcgtttcgttttcgtttcgtcctacattttcggcactttttgagtttcgttttcgtgtttcgttttcgtctaccaaagttttttcgtttcgttttcggtttcggttttcaaaattttgtttttcgtttcgtgtttcgttttcgtcagagcaaaattggacgaaaaaagtacgaaaaagcactggtaagaataggccccgttggtagatttttcattggcattccgttttttcaaaaagggggggggacaaaccacagaattaccatttttcttagtccgttttttccgtgttataagttccgttttactacacatcaaagtcttttttaggcctattaatgtcttccaaaagcaaattccagtattttaattgttgcgacacaattccaagcggcaatttatggttttgccgttctgaaaattgcagctacaaatttgaatcaaagaaattgtctgggtatccaatggcttcacttcgttctcacttaaaaaatcaccatcaactaaaattgaaagaattggaagaaaaagataaggctgcagaaagcctcaaaaataaggaaacgaacccgagacaaccgacgttaaaacgaatttttgcgacttcaagtccagtcattaaaaaaatagcgagggctgaatctgctaactcgtcgcaattaaccatcgaaaaaaccttttgtaggaatttaattttaaatgaatttacataatattttcagctcaatggacacccgacggagaaatgactaagaaaattgacaaggcaattaacgatttggtatgtactgctggattgccgttctcttttgtggaagaacttgggctaaaaaatttattaagaatattggttcctcactataaaactaggtattaatttgataaataaaactttcgatgatcaacttttttcaggggcagaaaatatttcacaaatgatgttttagagtacagctattccttgatgttgcaaaatgttaaaaggcgaattgaaagcactgattacattacaattgccgttgattcgtggtcctctgacacaacccactcaatttttggtataattggccattttttggatccgaattttgaacctaaattcgttgtgctcgcggcgatcccagtgaaaggtcgtcatataggccaaaatttttccaacatggtttcaaaagttagtttttgggtaaagcttaaaatgtaagtctgtgtttttaagactttgaacgcttatcaaattactgataaaaaattgcacttgattctacgtgatgacgaaagtgcgatgaaattggcgaccaatttgctcggttatgattccatgcaatgtcacaaaattcaattggtaaataaaataattttgtgtatatttggctattttaaggctgttggagatggctgaaagctccttggtgggtttttcgatgtaaaggaacgaatgaaaaaagcaatccgtcgcataagaaaatcgcgcataattgctgacgatttcaaagcattgcaaattgaaaatgatcttccactaaaaactttacaaaaagttttagtacatatttcatacatattttagcattttttatacatattttatttacatatttcgcgatttttcttacataaaaaaagatccctgattatgatatataaaactcatttttgttggaattataaaaatattttttttaaattaaagttttctcgaaattaaattataacttatggactaatcgacacatttggcatcattttcaattcttatgtcattgctgtaacatatttaacaaagtaatttatattaaacattgcgatttaaattatataattaatatttgtaattgatacctaattaatagaggtgtgccgtgactgaaaaaacccgtgaatcgtgaccgtgaattggtcccgtgaatcgtgaccgtgtattgaccccatgaatcgtgaccgtgaccgtgaatcgtgaccgtgaattgacgccgtgaatcgtgaccgtgaccatgaattgaccccgtgaatcgtgaccgtgaccgtgaattgaccccgtgaatcgtgaccgtgaattggtcccgtgaatcgtgaccgtgaccgtgtattgaccccatgaatcgtgaccgtgaccgtgaatcgtgaccgtgaatcgtgaccgtgaccgtgaccgtgaattgaccccgtgaatcgtgaccatgaattgaccccgtgaatcgtgaccgtgtattgaccccatgaatcgtgaccgtgaccgtgaattgaccccgtgaatcgtgaccgtgaattggtcccgtgaatcgtgaccgtgatccaaaaaacccgtgaaattcacggtaaccgtgaccgtgaattttttgagtttattttttttccgtcagctaatttttttgcttttcacaccgtcatttttctggtatgattttacaaaaaaaattgggaaaatggggtcaatggggtgccgatagacgcttgccagaaaatttttttttgaaaatttgagtcttatttatgcacacattttgtccaaaaatgaccaaattttgcgaaaatgagcaaattttatgaaacaataagtttttggggcccggcgttgtcgataggcgccgccggaggtaaaattgaaaatttgagtgcaatttattaaccttgctaacagattttatccctaaaatcagcaaattttgcaattttaatcggtctaaaaagtcaaaaaggtacaaattataggtgcgcttgcatttttcatgttaaaaaaatcgggtactgaagtgtccattagcaagcgcgctcataatttgcatttttcgcataattgtggacgttctaaattgaatccgatcatttttaaatggttttgagttttgtaaatatgagaaatacttacccaatttttaagaaaaattgtgttttaggtggaaaatttttgaaaatttgttgggatttgttaactgatcttgcccaaatagctttattttgagcgagtttttttaaagagatttaattattttttatttatatggggtcatccttgaaacttgactttttatttttttcgcacaatattgatagttggctttgttcaaaaaaagtttcaagaatagtgaggggccggcggtgccgataggcgccgccgggtaaatttttgaaatttttctctgtttcttatcaaattttgcccaaaaatgaccaaattctcta

SEQ ID NO: 14159 - DNA, 4115 bp, Heterodera glycines
cgaattctttgtaacatccaattgcttcgctggcgtatttttgtcggattttagggagccaaagattgatgcgccatcctaacgtcggtttggcaaatggaattgcttttgtaaactgaaggaattaagcatgcgtttttcaattatgtgaaaatggaaacctcgcaatgtcatcggccgatttgcttggcgaaatggcggggcttttcaacaacggactgtccccgtaggggagggaagagagttgggcactgataatggcctgttggatggcagaaatgttgacatttgagccaagcaaaattggaggtgacccggcggaagccgcaccaaaagcggaaggttgggaaaagcctgaaaatgaatgaagagagaggttgggacacatttaaattttaaaaagaatacatacccgtgccgaacatgcctgatcctgtctgaggcgatgttgtgccaaacagagaaggctgtgctggcttttgtaataagtttgttcccgtctgttgtccgaataaaccaccaacggggggctgttgttgctgttggggagaaccaaaaatgctaccagtgccaattttggacaagggggcgccgaacagagaagtcgactgggtggcaggagtgcctaatataaattattaaatgtattttattataataaaataccgaatgccccgaattgttgcgccggcttcgccccaaaaaggcccgtggtggcggccgtttgctgcggttgctggccaaaggaaaaggcactctgttgaggttgtccaccgaaaagactcgtagtcgtagtcttaaattactatcattatagaaaccaacagttaaccattcttcccaccgtcgcagcgccaaaaccaccgacggaagacggcgcagtgccaccgaaaatactgccagtggtttgctgctgtcccccaaaaatgctcggctgtgacacctgaccaaaagcctaaacagacaaattaaacccatttcccgaaagaaaagcagcacaccgatggcttattctgtccgaacagtccggttccaggtgttgtggtcgccccaaaggcactcgccgtctgttgctgcccgaaaagccctccgctaggctgggaggtggccccgaacatggacgttcccgctggttttgctgcgccaaagaggccacccgtttgagtctgtccgccaaacaatgacgacgtcgttgttgcagtcggaaatgttgcgcccgaagttgtagctggaattttttttatgggaattacaatttattgggagagaaggctaacgattgaccgattacgaaagagaaacactaaaattttctgacattttttgatactcaagatttcatagaatgggttcgattgcatatgatcaaagactggcctttctgcgattatctcataatattcaagggcgtagccaggagggatatagcccccctccacggaaaccaaaatttttttaatgataaatatgtgaaataggttaaaaatgaatattataaatttttatgtttcccttcttggcaggcagacaccggccctcgccgcgaagttcacaataaaggcttggactattggtaaaaaaagctgggtcaggaattgattttcgattaccatttcacccaaggcctgttttttgagaggaactctgagggttcctggctaaaaacgttttgatacgactttgtgtcctgttggattttgcaaaaacatacaagacccaaacgcggatcttggcaaattaacaaatatccaccgggtgagaagagtccgcccgctggcttcccaaaaagtccgccctgctgctgctgttgcggttgtcccataacattttgatgaccaaataaagaagtggacgcggcggaagcggcgccggtgtttttcgctctgccggcgatataatcctccacccgaagttccttaattatcattaaactgataaaagcgaaggattcgtcccgcgcacttccaaacttttgtgctcatactccttcatcgatgttatgcacatttgtttcgtgttcactttgtgaggtgttcctttcagttgcatttggtcctctccaattggtggcgcaaatttagccgctaaatcagttgatagataagaaattgtacaaggaaaagtaactaattttcaagtcatagcaatgaagttctgaaaatgttaggtaatttcaaaaattaaaaataaattatagcggtaagcaaggtatttataggcctataaaattacccagctttaaaataattcacgaccaagaacaacatataaaacaatttaatttcaaatctttaaagtaatatttaaaaaacaaccaaaacttgaagtgggttgagtggcaccgaatgccccgaattgttgcgccggcttcgccccaaaaaggcccgtggtggcggccgtttgctgcggttgctggccaaaggaaaaggcactctgttgaggttgtccaccgaaaagactcgtagtcgtagtcttaaattactatcgtaatagaaaccaacagttaaccattcttcccaccgtcgcagcgccaaaaccaccgacggaagacggcgcagtgccaccgaaaatactgccagtggtttgctgctgtcccccaaaaatgctcggctgtgacacctgaccaaaagcctaaacagacaaattaaacccatttcccgaaagaaaagcagcacaccgatggcttattctgtccgaacagtccggttccaggtgttgtggtcgccccaaaggcactcgccgtctgttgctgcccgaaaagccctccgctaggctgggaggtggccccgaacatggacgttcccgctggttttgctgcgccaaagaggccacccgtttgagtctgtccgccaaacaatgacgacgtcgttgttgcagtcggaaatgttgcgcccgaagtcgtggctgaaaaacaacaatgaattaatttttgaaaacccagtgaacttgaaaaaaatccgccagctggtttcgaaaaaaggcttccttgttgttgtcccaacgtgttttgctgtccgaatagggatcccgcaccgctcttcatttttagaaatatttaactaaaatcaaaatttctgtttccttgacaaattagataatcattcatattcatctcatctgattcgatttaggtaactaattaatgataaaattaaggaatatggcttattttgatttatattgattcatattttttcgccttgtactagaattttgggaagaaataaccaaatatccccgtacctgaattcgatcaaaaagatttttcgaatttagttggttcaaaaacggcgtaaatcatatctcattgaaggattaaattgcttttggtttgttttcatgtgtttaaagtagggtaggtcgggaccgggaccaaaacacggacaactgagtaccgaagtcccggttttgatcgggcccggggaattcccgggttttttctcggtgtctttttcccggttttcccagccaaaagtcccggttttacaacccgaaaagtcccagtcctggttttgcccaaaattcccggtcccgatctgccctaataaaaaccatcaaaaagggcgttatataaaaaaccatcaaataaaaatttccaacaaaaaactgcccaaatttttgtcaaaatcaatcgtattaaatattcttgatatcattcgataggcctaagagttctctattagctcacctaattttcaaaaattggtcaaatttgaacaaagttgtggcaaaaagtactcaagcaaccaggttttcagacattttcggtcataacttttttgaaagttaaacgaattttgaaattttgcattctagtagaaaatattaaggctatcgaagatattaagaaaataaaaatatcttaacaatttataacgaaaattttttgattaaacataaaatttttgatcatcaaaaactctgaccaaaacattattagaaccaacaaaattaagaaatcttgatatcattcggtagccctaaggttttctactaatctgcaaaatttcaaaaaatttggctaagtttcaaaaaagttatgtccaacattgcctgaaaagctggttgtttgagtacttttggccataactttgtttaaacctgacgaatttttt

SEQ ID NO: 14160 - DNA, 3245 bp, Heterodera glycines
  unsure (1)..(3245): unsure at all n locations
attcaggctaaggtcatttatgggcatgatcgtgggcttaactggctctttaatcaccacggaaggggaggatggtgtcctgcaggggccgaacggggcaaaactttattcgatgtccgttctttgtaaacttgtttgatttgaatttgataatccgcttttattgttcaaatatatttggaaattaaattattgtgccagcgattactacactttatattactatcagaatccgatctgatgtcataaaaaaacaacttgaaaatttctattcctttgacataacttttggacaatttaaacgtttttatttatattgtttactaaaaaggtggtgaaatttaatcaaaaaacataaaatgcactttctgataggtgtttaaattttctcatttcctagtgggagcaggacaaccagggttcctaagtgccctttttctaagattttcctttattttggcattccctccttattttaggcttattcttggatttgaaataaaaatctaacttattatggcaaaagcatacattgttcgtatcattcgataaccacgaggcttttcatagcaaatgaatgcagggcagatcatttataagcgcattcaaagaccaaatgatcacttatttatttacctatgcaaaatattgtgtgccttccctaattactaattaatgtctccttccatcaaacattattttgttgtgcaattattacattccgaaaatgagcagttttatcgccaaaaaactgtcataaataaacaaaaactcgggtcggtgtacgcgatgacaatgcgattcataaattaatgagagtcaagagaaaggttcacaaaattcgacagtttcgctaattgttgcgtcctcatatttttttaacgatcaatatactacagattcagaacacaatttttcgagcgactcccgaaaactaaacggagtgaatgctgttccacaaccttcataaaatttgctctgaaattcgaccctgaaatgatgaaatttgtttgaatgtgaaaatgtaaccaatgaatgcgttaccaatgcaatcgaagtgtgtgaagaaaggcactcagtccctccatgacgacaagctaaacacncaataaaagcaggtaaattgagaacaaaatgcttacaatcacaacagtaagcgtaaaaaatgcgaaaaaagacgagtaaatataaagtggggcaaaagtgccagtgacttttagggcgggaacgaaaaccatgtggaagagcacttcggacaattcttaattaagaaataagtcaaattaatgtacaaaaaaagagatagtttctgtgctttttacgtgcgtgtgccaaagagagggcccaaagtctgaggtaagaagccgtgtgggaaacgcagccgagcacaaattcaattgtgtgaatcgcctggtggacagtgaggtcggaaagcgtctgaatcggagaagtacagaatgacaaaaaagggactcgcggagagaaaagcgtaccaattcgtcctccgctcggtaggcccttccgccctctccgctcggctgtccgtttcttgtccccttgtccaagtcgttgttgctagtcgtggtggcgatcaattcagcaacttcggagtccattttaacacggaccaactgaaataattcattgtataatgaattatttttaataataacgtacaatattttttgacttttgcaattttctggtcgagtcctttctgttggccgccaccattccatccgtcgtacgatggtgatgccgaatcttgcgaaccaacggtttcccgcaaagcattatcggcacgcagaacaaagcaacgccaacgagtacggactccaccaaagcctgaaattgagaaataaaagtaattactaaaaatcggttaaagaattcatgtgtaatcgaaccaaaaggaaatcagataaattccgcaattcccccccccctccctcaacgactctcacttcacctgctgtgggtaccacaaggacaagtgacagtttgggtattccgtagaattgttgtttgaatcgacaaagccataaggtcgctgtttttgcatgaacatgttaatcagtccgatgagcagtgaaggtgcgcaatgactacctaaaattgagcaaaatatgaaagtaatatcgtaattaaaaagatattaataccggggtaataataaccgaaaatcacatccggttttaccgagaagaaaatccatttgacgaaaattaacacgcaaaggtaaacaaaaatagaagacaagaaaaagaaggacggaattgccactgtccacaaattgacggaagaatggaaaaatctaaaagaaatgcaaataaaacagaggagaaagtgcgttcacctggcattgaaaagtgacaaaacgacaccaaaagtcatttgagaaataccaaaaatgacagacattttcatctgaagataatttgttaacggaacaaatcaacaaatgattagtcacttttaaagaattgatgaaattcagccgattttccgccaaattccaaatggggtccaaccccatccaataagagccctcctgacgaagaaaagcaacatccgggtccaagcctaaaaccatttgacgaggcgaattggcgtcggaggacaacgcaattaactgagttaaactgagggggaaaatatcaaaatcgaattcaaaaaggtattcattacacgttattacttgtaaggacttgtccattttgaactgaaaatactgaacgatttggaaaaggcgtcgttgtacatcagtccagcgtaaattgagaacagtcccatcagagcgataatgaaacgaccaccaaaaaatgttaggaaaatctgcgagaaatgtctaacttatcaatggcaatgccaatcagaaaacgatcacaacactcacttcatctttgatgcgcgactgctcaattcgcctctcccacaaaatgagtgaaaggccggcaaggaaaagaacgagtccgtggccaatgtcgccgaacataacgccaaacagaaaagggaaggtgaccaaagtgaatggtgctgaagaaggaaaagtatgaaaatgggggagaaatgccaagggattgattaccggggttgatttccctgtagctggcaatgccgtaagagtcgacaatgtcttggaagacttgtacaaatttgttcgtccgattgtgcgtcggatgcatttcgcccgtatcaagtacctaaaagggaagatgcaaatgagaaagggcaattgtaagatg

SEQ ID NO: 14161 - DNA, 981 bp, Heterodera glycines
caaaaacgaaattatcaatttaaaatggagaaattcatgagaataacacacccaccactctgaagaaagcttccaccttttcatagacacttttgaactgcttcaaatcgttgaaattgcgcttcagctgggcctcgttggcaagaaactgccggatgtccctctcgatgtcgtataagtgtgactgaattgaaaaacagtaaattaattttctaattttccatgtccattacctccaaatcgtacatttcacgcaacagagtgatgtccgttcgagtggtgtccaatggcggaatgtggtcgctgacgcccccctccacgacttcagtctccaaatagcgaaggcaccgctcaatttctgcacaacggcgaacttcgcgtacatacgtccgttggaaggtggtcaaatgatggttgagctgaagagaaaaggtttaataacaaccccaattatccgaaaatcacatctttgaactgaacaagcgaatattggcccagctcaaccacacaggagtaggcagcatctctagacaatgaaacttaattaacggaattttgatgaattttgggggcaatacagtagtggagtcaataagccatttgaatttaaaaaacataaattgtgatttaatatggaattaaggaacaatcagattttaaaaatagtaaattaattgtaccgttggacgataagttggcacaattttagtggttcacttcgcaggctcatgtgtaccgagtaaggaaatttaattaaatcagcagagaaaatgacccatcatcgaccgcatggcgtcaattaattaaccaaaggcaggaggtggattgccttatacaggttgaggagcagtgggaggatcgatcatcaccaacactaaccaccaatcatttaacgtatggtttattacacagtgaagaaagttagaaagaggagaggagagaggagaaggacgaggaaggaatgtaatgacattgtaatgg

SEQ ID NO: 14162 - DNA, 3451 bp, Heterodera glycines
  unsure (1)..(3451): unsure at all n locations
tttttatttattttttctttaaaatttaatttaaaacttcttgttgattttccaaaattatatttaatgattacatatttaagcaaataaaaatagtttctaaaattgataaatataattaaaaaattcgtttattttttaaatatttattttatcttagacaatcttttatggcttacgaatggatattaaagagagaaagtaattttttgaattaattttttttaattttttaattatttttttggttttagtgcccataatttaataaaaagtgatcagaatagaatcaaaatttacaaggatatgtctccatagacagaggactaactgtcctttaattattccaacgcttactgattttaattttttttttcttttttcaagtttttttaatatttaaaaatatatttttaaaatattcttactacttaacaattttactttttcacatgtatgtcaaaatcacattactttttttgtcactttttttaataaaaataaaaaatcaattttattattaatttattttgaaaaatgtgctggcaaaatcaattgaatttgccatttttcacataaattaaatttataaatataaaaattattccattacttttttggctgtgaaaaaaatgaattatgccaaaatttgtttcattttcctgcaactttttccaattttattccattcatcggaaggtaaattttttaaataattataaattgcattttaaatccgataaatttagttttaaaagtaaattaataaaaaattgaattacaaattttttttttggaaatttctaaaattttatttattatggaaaaatgattttcttcaatttaatgggagtcactgaaacaatttttcggcaaattcgaacctatcgtgaacaaaaattttaaataaatccgcaattaaaaatttaaataaattttcatataaagaaattctggcccagtattaaaaattatttgatttacaggccgtgtcgaactttggcaagtcagccaagggtatgtttcggtgggcagggtttttttcatttatgaatgactaaattcgaacccgtccgaaaattaatgctccgtttttcgggtaaaaaccccgggggggggggaggcttttcaaacaaatttttgtccaaaatagacaattttatgggggtttttggccgaaaaaatcattgttttttcacccagtaatcccgattactacacacggggcgctattctgaatgaggatgctgtgcncaatgaaaattacaacggcggaggccaacattatgccacattctgagcaaaaattatgattgattgaatgatcgccagtccaattttgcatactgtacaaaaatcattactgttgctttaggttttcacttttgtatataaattttaaaaacataaaaataacaacaaaatgaagcaaaaaaaagtgaaaatgtcacaaattgtgggaaaacaaacataaaaaaacaacagcagcagcggaggtaaatgaaaaagacaaaatgataagtgttgttgatggataaacacaaacacttcgggagggcgggatcaacttgaaaatttccaacttaaaaaaacaccgagagtttcattagacgacaataagattttttcgcgcatttttcagttatttattctgttttccctgacttttgggtattagaaatcatttaattgctcctattaaactttggtcgggtgtaaggattaattagatgaattggcagggtgtcgaaaaataactcgcccccaaaaaaaatccatggcattttaaaatgtccgccaccagcacacatcattggcacatcaccatggtggaaatgacatcatcgatcgatcggatcggcttcgttccgttctctgtccccccccccccccccgacccctccattgtccgatcggtcagtcatcgctcatcaaatgtccccgtccgtcgtcatcgtcgccgtctcctcctcctctccgatgccgctgctgcactgtgccaccgtccgctgggccacccggtcgccaatgttcgcgctgctcagctgcttgaccgggaatgccaacgacgcgttgtaggcacaaatgatggtggtgtcgaacagggacaccgagttgcgggccaacctttttgaagaagagggacatggagaatactttaatttgcaaaacaaccccaactgtcagaccaaattttgtgagtgttacgaaataggacaaaaaaacaaaatttttcgtgtatttttgtattataatttattggttcgtttttcaaatttgattttttcaaaatttaaaaaaccctgaaaaattgagttaaaaggtaaaggcattaaagattgtataattttaattatttatcggtttttcccattttttgtgaaacccccaattttagttaggcctttttccggctaataatctaaaatcgttaaaaatattaaataaacttgtcctctacaatttgatacaacacgccgtccgtgcgatggcctcccgcgtctcccggggcaccaattgcgtgtccgccaagtaaccgccggtgctcgcctcgtcgtcgctcagatggcgtgacacccaaatgtagctgaacaaaaacttattatcattgaaaaaacccaacaaaagtttcagcgaggcctaattacacatattaattgcctcgcacatcttacttaaaaagaggtgggtgggggttagaattttcggctttgtttaggtcccgcccaagttttggcccaaattttttcaccaaaaatcccatggaccggaagtcccaattaaatggaaaatcaatacaaaaacagcaaatcggaccgacccatttcggccaagaatgacggaggccccgcatggcaaattgtggaaatgggacttgcgatgtcggaccagatggggcagtacctgaagcacatataaaaagggatttgaaaaaacaaatttattagtcaacggatcaaggaacgaaaacataaaaaatgggtagatttttgaaaatttttaccctcctgaaaatattacctcaaaaatttttcgaccaataaaatatgaacttattctgtgcaaattttgaaaaatttccggccaataataaaagtgttctctttgctaatgctgcggctccccttaataagtacgccttggccaagctttccgtacttgagacttcgcgtgtgcaatgaaatggaaccgtcttggaaaagttgttgaacctaaagaagcgaaaaattcgtaaaatctgcccccctaattctggcaaaaaaaatttgaagccttggctgggtgctctttcccccaacccccgctgccccccccccccccgaaaatttttgaaaaaattaaacaatttaccataaaattttgaaaaaatgctagataaatttttcagaatttttttctcggatatttcttaatgaaaaaccattttctgggggaaagtgctgcttcctcc

SEQ ID NO: 14163 - DNA, 890 bp, Heterodera glycines
agctttgaatgaatgaacaaaaaccgactgggaactcttgggtccgtcgccgccgccaccgtcggcgttccgttgccccaattccatggataacaactaaaaatgtttgagttatgaaaaatatgtgatggatggcatcatcgtttgtcattttccttccaactgacgttgatgcgaattccatcgttcctccgaccaatcccacgggcatttggcctcctgtcgcggccaaataattcgcctgcattggccatccggcggcgattccgttcagtgccgcagctgcggatgccgccgccggaccaatcggagcgatattaacggaagagacgggaggagacttgagaagagaggaggcggaggcattgggcgaagtcggccgattggagtgggcggaagaaggcgcggacgaattcattccgttgggggaggagaccaaaaggcaacgttgggcttgggctgaacggaaaaaggggcgtaacaaatgactttattgagtcaaaaaaggattaaatgccatcctggtggatgaaatatcgaaaagctatttcaagggttctgatcaatgcttcccatttgccctggtcaatgttccctggctgtacacatcgattccccctcagcccattacccaaccggttgatctctcttccgctcccttccccttcatttccctcccttccctttcctttcccttcctctcccttttgtgtcccatagttttcgcccagaattggctgcaagttaactgccaattggcccaattcacactttcacgaactcactaaatttgggttgcataatgcaataaagtccgtttttcatggctaatcgttggttttccctcaagggagggagggatcatcccctcccccccccactcgataaat

SEQ ID NO: 14164 - DNA, 1293 bp, Heterodera glycines
acgatgaatagaggagagaacggaaaggggagagaagaatggaggggggagagagcgtgtccattaaggtgggcggggcttcgtgtgatgagagacccaattagagatgaggacggatggcagtaggaaaagagggcattgtgtgatcagcgaccggagcggacggagaaaagccccgccgcacgcaaaggaaacggcggagagagtgatcaaacatatttggacattacaaccgtatttttgaatattatatcttgctaatttctttctttccttccctttccttttcctttactttccttattttattttattcccttctcttttaaatgttttaaatcctttttttatttatacactattttagcatttttattccctttttctttactttttgtttgattctgctgggtgtgtgtacaaactgtaagatacccgtaattttctttctatgcctttattttctttctccccaatccccttatcgtaaccgccataccgtaacttttctctcaaatataccattaccgtaatctttttagtttctctatgttcttttgttttcacgcccatccatcccaactgcccatcttttcttgccaattcactctcagtcagtgccaaatgccgtgcttaattgcaaagcgcttttcgcttttcccctcccccgctccatcgtccgcttctctctctcgagaggcgtgccggtgcccatcccccgcttctcccccccccccttcttacgagtgccatcctcaaattcattccctaagcccatctgtcctcctcctcccccctcccctcccgcgctcttttccgttctcccaaaaccgaaatcatttttgctctccacttgaggagacagcggaggggggggggggggacttgataaaatctattgatttggctcccgtgaacgcatctaccatcgcgatgacgagatataaatgtgtccaaagagacatacccatttatctgacaaataattctgtacttcaatatctcttaggataatggatcaaattatgtagatgatatccggaacggattaacatcagaataacgagatatatgattgtcctaaaaatagataaccatttttctgacaattaattctcaattgccgcagctcttacgggaatggaaaacctattgaagaggctatccggaacggattagcatctgggttacgagatagaaaattgtcctacaaaaagataaccatttttctgagaattaattcacaatttccgcagctcttacggtaatggaataaattttgaataggctatc

SEQ ID NO: 14165 - DNA, 1137 bp, Heterodera glycines
ttttttaaaatttttagaaaaattataatcatttgccatttatttatccattcgtttgactttttctgccttttgttaactttggtccgtttctttgctcgttaaaatgtttttctgaattctctgtttggatttttcaaaactttcgttgttttgttttttttcagatttttagtgcaaaaaatggaccaaatcagaaaacaatttttgttggatcgcaaaattgacctaccgaaggcgatgaccagcagttcggctgctctctcatcggcaaattgtggcatcgttcgctttcttcggcattccctttggctcctttcttctttctgcttttcggcctctctctttgcttcagtttttccttccttctccttcccgtcattttctccttctccctcttctactttcttctgtccgtccttttcccctgtttctctttctctccgttcctttccttctttttctttgtcctcttctttctccatttcttctctctcttcctcttctcctttcttctcccagtcattttcccctttttcactttctttccttctctttccctctctaattttctcttctcttttcttccctccggcgtctcctcctctttctcgctctctctccgtttttttccttctctttccttctcctccttcctcctcctcttctttcacgactccttctctctcttcctttcctcctttctctcctcccttttctttttctcccctttcttttttctcctccctttctctgtcttccatttcctctttctcttctttcttctctctttccctcatctttttttgttcttcttcctcttttcctcttctttttccgttttctccaattaaatcacaaactaaaaactttgagcatgatgccgacggtagacagtgcttttccatagttaaagtgtgaataaataaatttattagtcctttaaacaaaatcatttaaaattcagaaaaaattcaatcataaaaacttaacgagatttattattttgtaattataaaaagtaattgcaaaagttaatttggacatgaagcatcaataacattggttagtcggggccgagacgggaattaaggtttcccccccccccacccatttcccggtcccggcagggcaact

SEQ ID NO: 14166 - DNA, 3296 bp, Heterodera glycines
aaaatgttctaagacaatttttcgctaaaatcaaccccctgacgagttatgggcccgggactcaaatgtcccgctcaggccaaaatttttttctatttccgggaaaaaaccgaaatttttccaaaaaaattaccagtcgatagagctcgaaaaactgttgcttgaaagtggtctccgtttttctgggaaaattcgttaaaaaataataaaattcaaaaacccgaaaaccgttttttaggcctagctcgaaaaattttgaaaattttcgaaattttaaaatttggaaaaatcaagctcattatgttctacaataagtccgctggagccccctcgctcagatcaaacgctgacgcggtattcacctgggacgcaagaaaaagtgagaaatcggtccccgggactcagacatttgaccaaaagtacgagttattgaccctggactcaatgtcccgctcttaaaacatttgttcataaaaataaccatattttccatgggagtccatttatgtacactttttcgctgtatcgcccgatctcatccgcctctcgtcaaacaccgacattttttcaacttcgtttgttgttaaaatgcccggatgaactgtaaatatggaaaggctggtgaatataataattttataaaatagtccgaaaaagattcggacttatttaaaaataaatttgtaacatttttaaattaaaaaaaatttactgcattccacattgaaatttcttcacggatttgcaattcgtcgcgttccaaaatttcgcacaacattttttggtcaatttgcaaaaatccatccgatttgatcaaagtgtcggcattttcgtcaatgtaaaataaacaatggcaggcaaaattctaaatttgaatgaaaataaagtattaaaaaaaattggctcttgattgagaataaaaataagtgaaaaaaggaacattatggaaaaaaatcgatgcgataatttccgcttttaaacacaatttagaaatatcaagttaaattgagagaagtttttctctcaaatttccttactatttttctcttctctgcccgccgctaaaaatggtagcagcgacgagtcagagaagagaaaatagtaaggaaattgaagagaaaattttatttttttattcaaaacaatttagtgattaaaggaggtacaaaagtgattaaaagaggtacaacagtgattaaatttgaacaaaagttgaggccgagttgggatgggcaaaatgggaaaatgtccattcaaaatttcattacatacaatgatgaaatgttaaaaaaaaattactaaaaaagccaaaaaatgattatggatatttttaaataaaaacatttttttgcaaaagaaaaaaacaaaggcattgatgaatttaatagatacttgtctcagcaaaaaaaaatttgcggcttcagaattataaacagaaataggaaaaatggttgatttatgaaaaagatttaatatgaattcaagcactttaatttaaaattgttgaaaaattatttttaatttatgtttgtttaaaaacaccagtgattataaaatgtacaacaatgattataaaaggtacaaaagtgattggaaaagttataagagtaattagaagaggtacaaaagtgattagaaaaagtacaaaaattgtgaaatggtacaaccatggttaacagggtaaaatcatgatttcaaaattaaataaataaggaaatggtttatgaaaaaatataattaaaaaaaatgtattaataatttttaaaaaattattaaaaaatgctttcttttattaattaaaaataaactttgaatttacaatgattgagtattattgtattgaaaataaatttttgacaaattataattaaaaaaacaaataaattctttaatttaaaaataaaaaataattaattttaaatgaatacatttatttaccaaaattatttacttcaaattaaacatttttatttattattaataaaagaaatctattttttattaataaaaacattgaaaataacgtaaaaatgcacagaaaaataatgtacaccgtccggatccgaacctgccccctcccccctcaaaatgatgcctcagaatccccaatcacacagggattctgagggcttaacgatgtaataactgaaatctgatgtcagattagtgatcagcggcctaaattggccctaaagacatatttttggaagatttttgtgaaaaaaattttccactcaaaaatcctggtcacccccctttggtcccgaagccgcccccccccaaaaattgggaatttaaaaaaaatatcagcgatttttaggccgcttccagtgattagaagaggtacaaaagtgattataagaggtacaacagtgattagaagaggtacaatggtgattagaagaggtacaaaagtgattataagaggtacaacagtgattagaagaggtgcaactgtgattagaagtggtacaacagtgattagaagaggtaaacagtgatcagaagaggtagaacagtgatgagaagaggtacaactgtgattagaagtggtacaacattgttaggagaggtacaatattgtttaaaattaaataaataaggaaacgtttttattaaaagttaaaaatcgagtgcattttaatttaaaaattttttaataataaaatactcttttattaattaaaaacaaccttggaaattattaattgaatatttatttaatttgaaattaaatgaatttttttttacaaattcaaaaataaataatgaaattctttaatttaaaaaaaataaatttaaataatttaaaagaaatcttcaaaaattaattaaaaacattgtaaaataagccaaaaatacaaagaaaaataatgttacaccgtccggattcgaacctgctgcccccccccctcagaacatgtcccagaatccccaatcacacagggattctgagggcttaacgatgtcaaacgtaaaatctgatcacgtattcgtgatcagcggcccaaataacccctaaagacatgtttttggaagatttttgtcgaaaaaattttttcactcaaaaaccatgtgcacccccctttggtcccgaatctcaaaatcacttttatttttataaaaattcttaaaaaagtgataaaaatgccagataaaatttaaataatagagcaaaaaactgcggatttttgtagtattttatttttccagaatatcttttcagaaccgagttatgaatttttttctggaaattcgaatttttccagaaattctggaataacttttttcctttt

SEQ ID NO: 14167 - DNA, 1750 bp, Heterodera glycines
atttgcacattttcaatagtttatttacactttaagaccgtccttgctgcggaagagcgcgaaactgaacttcgaagacaaattcgggttctccgggaaaagtcgacaacggagggcacttccatggtcaattcgctggaacagtaccaggtaaggaaatggaaaaaagaacggagtttttgtttaccagcagaatttgtgagagaatcgtacaaaataaaacgggaggacaatcaaaatttggtgaccgtttttttcccggaagaggaaaattacgaagggatttaaccaaaatgtaacaacattaaaaagtcaatttagctcaaagtcagtgaattgaaagaaaaagttgaacacttcggaattgagaaaattcaaatggaggcgaaattaacggaaaaggacaaaatgttggctgagatgaacaaaacacttgcagatttacagagtgtgctcagagtacagttttacttgtgcaaaaatgcaataaaataagaagtaaatttaaggaattggcggaagaccaaaaaatggaaaggcaaaaatcggacacggaactttcgggtgtcagggaagatctgaaagtgtgtgagaaattaataaaaatgaaaaaattataaaaacgaaatttcagcagaaacggcacacactcaaagaaattgaagaagcgaaaacgaatttggaggacgcacttgcgaaaatcactcgcgaattgaatttgtcaaatgagcaattggtgaggaaggaaaatttggtggaggaattggagaaccaattggaagagatgcgaattgtagggacgggaaaggtaaaaattggaaaggtattcgggggaggggacaaatggacaaaatgatcacttttattggagcaatttaaacatttaattatttagcaccaatacatcatctctactgaccaaactgtcgttggtggcatcaacggaagtggcgctgtttcttcacacaaaattgacgacgcgacacttcgccaattgttcctttcctattttactgcggaaaagtctaaacaacccgaaattgcaattgtgatgtcaagaatattgggatattctgcagaagtgagtgtcttgttatttctttgggaatgatttcggttggcgcttaccaaaattttttccgaaacagtttttttgagtacgtttgggtcgaatgggcgaacgccccttcaccgattattttttcttttatctccaaaaaattggtaaagaaatgttactttacttaggcattgcatttaaagaagaataaatgaaataaaaattaacaatttacaacgaaaagaaaatgaaaaataatgcttgacaatatgaactgggaattatgatgttcaaatgagctggtgttcatttgacagcctccatttgaaccaatccgttgtgagagaaatttatggatttgccccttggatcagagacccctcccctaatatgtcacttccttttttctaggaactatctcaaatcatatcagatattatatagtacacctcctctgctcctttatatcctacttactttgccacatcttaggcccgatcacatcgcccttctcataaaatatctcttatatgtcttatacgatttgaatgattttctaaaaaatgagaataaagttgaaaataaactacatgtcacaatacaacttgcatgaggaaaaattgatgacagcatcacgatgaaatcagtcactaatgctttcaaatcgatgtcgggacaattgacacctct

SEQ ID NO: 14168 - DNA, 1505 bp, Heterodera glycines
agcagggaacagaagtggcggagggacaggcggcggaagaggcggcccggaaacaacgtgaattggagcagaagttggccaagttgaagggactgtaccagcagttgagggaggaccacatcaaagttggaccagggggagggattaaaacgaactcaaagggatcccattgaaggcactgacagaaatccgagacttacggacaaaaatcgacacggacggggaggaaaagcgcaaaaacgacaacgaattggagaacaccaaacaacagctgaagcagacggaacaggagagagcattcttcgaatcacaggtcgacaattcaattgggaaagggacaatttggcagtatttcaggcaaaattagtgcaagaaaacatccgaaccagtgctcaaactgttcacgaagcgcagtccaaaattggacagttggagggacaaattgaggaggtaaacgacacattggccagtgaaaaggcaaagaccgacgaattggaaaggaaaagcaaagcgacgaacgaacgaatcttacagacttttagaggtcagttttttgtggataacagatcacttcttgaaatcatagttccgttttcgttccttttctgattgatcatttttcttcttcagaatgcctttgttcggctgcctttgcgattttggaacagtctttggaggatttgcaaaatgcttcttccatttcttacccattacgtaatcatactttgtggattgttcttaacttgatgctgatttgccacatttccttcagaattggccatgccctctcttcggacggtcattgaccaattggactccgtcgcactttccccgtccttcgccactctctccgccgatcagaagtcctcctccctgttgcccctctccgatcagttcaaatcgcttttcgttctttcccatcgcctttccgatgttctcatcggttgtgcgtccgccgcttacaccgtttccattcaacactttgaaggtgtttttaattcccttaaagctaattaagggattaaattgttcagaagtgaatgagcagtgccgtcgtgtccatacggaggcggcgtacttttacaaagatttgctgaaagaacagaacgaagggaagggaaagctgcggacggagttgggccgattggaggcattggtgggggcattgccaagcgaaacgggcgcaggaggaggggacatcgacgtggaaatggtgggcagacaattggacgaggaaatgcaacggatgggcacggcaatcgccacggccgtggaacacatcggcgaattgcaaaagcgaaggtgaaatcggggcaaaaagcaagcaaaacggaagagttcgacacattttgaatttgatggtttttttagtcgggagacgaacagcggaatgcgtttggaagtgaacgacaagattttggactcgtgcaatgggctgatgaacgcggtccgcgaattggtcatccgaagcaaagaagtgcaggaggaaattgtggcacagggca

SEQ ID NO: 14169 - DNA, 3361 bp, Heterodera glycines
  unsure (1)..(3361): unsure at all n locations
catgcctgcannggtccttttatctggtctacttaagaataagaacataagaaatctccccttatcatattaaagccattttcaagcagaatcagaattaatatttgaatccaatttatcgtttttgacatggaattagctcgactaaaaatcgaaaaaagctagaaggcttaaaattctgcttaatttgtggagtaaatgccgttgtttttgcccgctgatcatttcaaattttgcccgatgggtctgaaaatattgtcggttcgtctctttttctgctgatctgtcagtcgtccgtcaagtaaaggatcagcgtgtattccatgtccggctccacctgcaaatgcgtgtccgcctgcagcggcttcgtttcgccagaggaaggccccaaaaacacagcctcacacgtcaaattgacacactcaaaacaaaacccaaatgcaaaaattatttaaatattgcttaaatgtattatggaactaaactcgtcttctgctttgaaaaagtgaattaatgtgcttaaaaatttgtcaaaattcggaattctggggctaaaacgctgaaaatagttccattcctgacactttcgtttatggatttacatcgtttttaaaaaaaattatgaattaaaattatctctcgattcctattttttactgcgtcagtaattttttgttgtataattaataaaaagaattttgaatttaatcattttaatagtgactaagcgaaacattttttgttagtgccatggaatgatgtcaaaaatgttcaatttgttctgacaaatgagaaatgttatgccaattttttgtcaaaatgacagttttacaaaatgtttctctttttttgttcatttatttcaattttcttcaaatttatttaaattcaaaatggcactcactttgtattccttggcgaactgtccgatcgctttcttcttcaaactcttcactttgtcttgcttccgtgtgcgcaaaatgcccattcgttctgccaacggttcgcccgtccattggatttcgttgcctttccaaagaaaatctttttttgctcgaaaaatgcgcagaaaaacggtgacatttgtccactaaattaaaattagaaaattacaatataattatttaaaatcaatttataaaaatggcaaaatattttattgtaattaccgataatttctttttcgggcgttcgttggcctttttcagtgaagccattaattatgtgaaataaattgagtctttttttggtcagttcaaatcttcatcattttgttaaggaaaaataaattaattgttttatttttaattgagccaaaataaaatttgttaagtgcagaaaatattagaggaagggactgtccaaggattttgccttggagaaggttttttttcggcgcacttttgcgattttgagccaatttttgtggatttttggaaaaaatagcgaaattttttgtgaaatttaggcctgcggtacggaaaaattttggtgtcagactttcccaaaacgaacgatagcaatttaaattgattttccagttttttggaaattcttaaaaggaaataagcaaaaatcttagaaaaaaagtacaaacgacgaaaactcatgcacaacaattgcccatttaaagcgaaaaattatttgggaaaatattgaaattctattttaattgttgtaaatcaatgaatgggaacaaaagtcgacggaaaataatttattttttaagtttagaaaaaagtatttttgaatttatttgcattttatttggaaatattttgattttctcaaatgtgagaatagagaatcatttgttaaaatgcaataaaagatcgtccacatattccgcagcaaaagatcttttgctgatatttttgtgaaattttatggattggaaaaagcaaaaaaaaaaatgcaaaaaaaagggaaaggccgtcaatggtcagagagatggaaaaaagcaactttaaaatgtagaaaatcttcacattttatcttaatgggttttttaataaattaatagggatgcgatttttaggtaagaaaaatcccagaataggtacttaaatcgcatccctataaattaatattttaacagaaaacgggaaaatagccataaaaatcacaaataaaaatgtattatttaaagaaaaattttcattttcttctttctttaataaaatcaaaagttttttttatcaccgttccccggtttacgaatccccgtccgggggttcccggtttagtcatccccgctgtccccgttctcctgtttgaccggggatctcccgccccccccccgcggtaacgaccctagtctgttctgtattggtgacatttcttcatgtaattttctaaatattacatgcattaacaatttttcttttcattaaatttaattcattttttattattaaattcacaaattgtgaaaaattatagtaaagcaatgatttgttacttattacctttattattatattttttttgttgttaaaatagattcttttcatcttttctataaattgccactttcatatttaaaattattgatgtgttgattttaattatttatgaaaatgagttggctaatatttattacttttcaatttaaaaggtgagcagatggaaaagcaaatgaacaatttcgtaatgttttattttaaagaaatgttaaaaaagaagcattacaaaacacatacctttccatttatttcttgtgaaattcaaaaaattattgaataattcacaaatatttaaataatatttatcaaattctgttatgcatacacacattaattaatttattgaagactcttaataaaaaaattgttaaatttataaagcccatcctaaaagaatcatttaataaaaattttcatttgaaatataaaatttacttttatatacaatatttttagaaaatgcacaaaatcattactttgtttgtcgttttgtttttgtattcttctaaattcaatggacacccaaagggtaaaaattaaattaaataaaaataaaaataattaatttaatcacaaggagaaataactgaagaggaagccgaagtctcggcagaagaaacagaagcagcgccagaagtgaaaaatggccattgcaaatttgaaggaatgcttcttttgggacaaaatgccgacaaaaatgtcgatcttttgtccattttggaaagtgccgaaaacaatgaaaaagccaaagatacggaaaggactgacaaagtgaaaataattaggccaagcgaaatccatcgattcattgaatcgctggaggggcaaacggtggccaaaaatggcatacaattcaacgtaatgtctggggtgaaagaggaggacaaactgacgat

SEQ ID NO: 14170 - DNA, 2384 bp, Heterodera glycines
  unsure (1)..(2384): unsure at all n locations
agtgatttatctttgctcagctgcgcatttcgcacgtgactttttggaagaaacgcgcacagtgatgcggcacaaattcctcaacgaatggggcgacgaaagggacatgtacgagacgagcaattgggaaattgtcaaaaaaagacgacaaccgaaaaataattaaatacaaaaaaacgaacaattaaaacaccttgaaggcttatggtgaattactaagattttccaaaaaatgttggaaaattttcggatttttttgtacaccgtaaaaatgagttgaatgtcatcaaattctaaagctattctttctttactcttgagattgaagtgtttatttttaggatttgtctttttcaggctcatttatccgccggcaaatggccattactccgcgtacagcagcgatcaaatcatcaaacattttgcacacattgttaaagcggtaaaaaagaagatgacaatgagagtgaaatcctgggtgatagaaagtgaggaagagataggagaaaggaagagagagactgcgaagagagagagagagggacagacaaatgttatggatagagagagaggaaaaggcttgatttttgtcattttttcagtattattccatccaaaacgactcgttcgccgcgttcagctacgatacatcggtggcacaaatgccctaccaggacgtgtgggacgacgagcttggcaaggcgcacattgtcgacgagcaccaatcactgaggctgcacaccgtttttgccaacattccgccactgcgcttgtgcattgaccgaattgcggacgtgaaaattcagaacaaaatttacatttttgacaccagcgtagagaatggtaacggattttcacaaaaaggaccaatttttatgattttgagcaaaatttttaaggaaaattaaaatttttggagtccggcggtggtgccgccaggagtttttgaaaatttaaacggatatgagctattctcattgtcacagagtgctttgtgttggatttcacgcagacggaggtggacgacgtgttccgcgacccgttcaccgtgcgtcgactgttggtccaacggaacataaccttccgggcggaggacgcgctgattgtgtccaaggcattcatcaacttcaatgtgcgcaccattcactacagcacgttgcaaaatgatcggaagccggagtgctacctgatcagactgaccatccgttttgacaactcacggcacacgggccaggtcaaggtggacctgattgccacgatcaggcacgtgttttttttgaattttcctataaaaaaattctaagatttttttcatggaaaatactgttgagaaatttttatttttcggggggggggggaacgacctgctccgcgtctaatgcttttaaatgattttgagaaattttcaaaaaaatatttcttccatttttcttgaaaatatacaattccaagcattcgtcataaagtcgtttccctttacagttacatcaatttgtgtaacggacgcattcagcaaggtgaaaaaagcttatcacagggattgaaggcgcctttgaaattttgataatttttccccataaaacgaaagcaaaattaaaaccattattttatttccattgaatgccaaaagttcctttttcattatcaaagcagacaattcggtgccattcaaaaaaaaaatccaaattggaatattctgtttttcttcttacagtaaaccgcttcgggttgggtacggtaatgatcgctctgctcgatctgttcgtgctgtccatgtgccttggctcgctgtttctctgcgtgcgctcgttggtcaaaggacatttgttgaaaaatgtttgaaaaataaaatataatttaaattattattgttattatttccaaaagactacacgtgaatacttcgatcgggcatttggcattcggttgagcatccaagacaagtgggagttcttcaacatgtggtacggcattgttgtcgtggtaaggcgtgccgtaacaaaacatacaatgatgaagcccaacatttaaaatgggatcccacacataaataaaccccgcacggcgggaatcgagaatttgactcgagattgggtctaaaacaagggatttataacgtacctaatagtggttctgaaaccaaaaattctcttaaccacgactctcgagcatcgcttattcgtaggccgtcggtctctatggcgtttttagccttttgctctatgacacccgaagtttttcaccgcactaatttcagggaaacagtcattggaaaacgngggaggtacgggcgcgacggtgctgcgacaagcgcccgcccaaattcttttttgcaaatttatttagtaacgaaccgccagtataaaattttttactaacttttt

SEQ ID NO: 14171 - DNA, 1641 bp, Heterodera glycines
  unsure (1)..(1641): unsure at all n locations
atttggagggcaaatctgacgaaaaatgactttgatcagagacaaacacatgccgacgaaggcaaggnggaagcacgcagcggaacagagcataaccaaaccaacgaagaagtgagtactgaaatggaaaggaatcaaaagggaggataaaatgggaaaaataaaaaattaaattgaaatggctgaccgaataatggaaagcgtgtcactccaaccgctgatttaaaaagtattggaatgttcttgagcagttagtgattgcttattaccaggcatattccgacagtccaagtgcttggatgaaacaaaaaatggtgtggaggaagaggaccaagaagaagaccaggaaattgaaggacgaatcatcactgacaaagaacagagaatgaaaagaaaagttaaggcattgcccaccgaaatgctttgtaaacggggcgaaaccaaaggagaaaagcgcacggagtgaacagagccaattgaatgacagccaaaaaggggagaccgatgggaccaccggcgaacagaacgaacagcaaagaggcgaccaagttgaaggccaaggccaacacgtacagcagatagacatggtaagcccaacggacggtttcctgaaatgggaaagaaaggggagaaaagataaaaggagacaaaaacacactgaaacaatgacgacacctgaaactgttggggaatctccacatcgatgtcctggtaaaagcacggcttcagcggcacaatgctcggaagcggaggccaattgtggtcccgattctgtgccccaaagccaaggccgtttgcctgcggctgcgtttgctgacgacggttttgctcctaattgaggcaacggatgtattgtagaagaaatcagggtttttggaccaaagggaattcaatttttacccaacaaatgatattaaatattctaattccatttcaattttgagtcaatcgctcgtccgtccccgttcgcaaacgtcgtcggaagactttttgaaccataactttgttcactgtcaatcaaattaagaattgttggtgttgttcgatagctctatgtgtttattattaatttgcaaaatctcaaaaattttcgttaagtttcaaaaaagttatggccagaaggaactcaaaaacccagtaattcgaactttttttgctctgattttttttgtgcataaataaaatttttgaaaatttgcaggctaatagcatttttcgaatgctttcgaataataccaagaatggttaatttggttgagaaagaaaaaagttatggtcgaaaaattcgttcgacgacgtttcggctgacgacgttttgtcctactccgccccgttcgacctgttcccttttgctcaattcctcctgtcgacgaaacaattcatcttgtcccatgctaactgccggtggagtcgagttggtagccttaaatagggaattcaaaacaaacaatctttgcaactggttgtgagttggatggaccattaaattgcgaaaattaattggcgtcttcttgccaaatctaataaaattaattcatttctccatgaaagtcttttgccgaattttgcttttttatttgtgacgacgtaaaagaaacttaaaagggtcaattttatgaaggttattcccagggcgagaga

SEQ ID NO: 14172 - DNA, 1034 bp, Heterodera glycines
ccccctccctcttttacagcccccccttacgacgaacgatgggggggggggggtgtttcgagacaccccttgtatatgtatgattttatgtatgaaagaacatagaaataaaaaaatttggatcaaaaattttagctatatattacaatttgtttatgagatttatcatcattgatttgatttacgagtcaatgacggtttttatttttgaaatgatgatttctaagcgcaaaatggacctaaaatcgattttaaaaatcctccaggcggtggctatggcacagccggaccccgcttcccaaaaagttttcttggaaaaacgcaccgcaaaaaacttttttgttgattttttgatttggatcaaaatgatgatttttggcctcaaatgcttttttcatttggcaaaattatgaatcatatatttatgattttcaaatttttatctgatagcccaattgccgaaatgttgctgtaaacaaataagaatgcttttcaagaaaagccacatcaaatgtcgaattggatgccatcattaagacaattgggagagggaaaattccaacgaaagtcgaaaattggattttatcaccagaattataattgtatttcttttatatatttgaacgcaattttattttttattatttagatttccatttttgtgttttgggataaaaaaaaaatcagcttggaattatgtctttcctccattcattttgttctgtgggcaatgatttttctcttccaaaaactaaaaccgatattatgagaagggataatgaattgaatagcgaaatcatcagcggcggcgggaagcaaagggatgaaagtccggctgaacaacagaggcgggggggggggggattcataaagagaatggagagggggaggaatccctccccggggtgagagctcagattcatacaggcagagacggagagatcgcccaaggcgatttcgcctcggagtgacccacttcaatgcaactgctgctgatggctggctggctggctgttctgcctcaggagaaatcc

SEQ ID NO: 14173 - DNA, 888 bp, Heterodera glycines
  unsure (1)..(888): unsure at all n locations
attaaaaaatgtcagaatgaatgaatcataagctgaagctggattctctgttattgaagcaaacaaaaaggagnaagaatgctaaaatcattttttgtgacattttccactggaacatttaaaaaaaaaagattttaattatgcgttaatttttattccgttttcagtgtctgctaattttcgaatttgccgctccaattcgcttctgtttacccttttctgctggtcaatgactaaattttcatggggtttcctgcgccgtggcgacaatgttcgagtaattattgaatatttttaccattttcaattcattttattacatattaagcatttctccaccaatccgttctctgtcctgattttgttcgtccttttcgccgtcttttccaactttgtcaattgctctgatcctccagtcggtctttccgcaaaaatggtcctttgtccgctcagtttaaaccgacaactcgggtgcacttgcaccgtcctttccgaaagtcattcggtccaaattctgtgcaacggtacccaacccgacaaagtatgggcagttttgggcggtttcgcccccaacattgacaaattggcaatccgtcgctgcacaacgaacaaaaagagcagcatattgaagaatatgctcccgttgaaggttaattggtggctggtcacaagaaaccatgacgaacgattgactgagtttaggttcgaagccttgagatttccaactgcgcaattgcacaaatccaaccgaacgcctttgactcgttggccgattcgttggaagagctgtccctcgaaagcaatgcgctcacttcgcttccgaatctccacaaattaaagcgtgtaaaatccctcaacttcaacaacaattcggtgagcagcggacaa

SEQ ID NO: 14174 - DNA, 1781 bp, Heterodera glycines
  unsure (1)..(1781): unsure at all n locations
gatgaaggaattgattacgctttatgagatgaataaaaacgaaatgatgagacgaacagcgggcgccatttcaatgccattcaatttcgaatagccgattattggataaaagattggtagctataaatgtacagctcgtatggccttgaccaagccaatgattttaatttctataaaatttgaactattggaaataataaaatatttgggccgattaaaatagtaaaattaaatttaggtatgatcaggacacaaaacataaatttaaaatgattgaggcgcaaatattcttaaggggagcaaatgtccgaaaattgcccttaaggaatgggacattaatatccgggctcaaatgtcggggcggaaatgttcgatttttagtgggggcacaatacccgaggcgctgcttttattttcgagttgattatttcattgtaattttgtgtatttttgaatttattattgtgcgaccccatctgtgagcgacacgcggctgccacgatgagcatattggcaacgatgtcgacgggaataatatccgcaacggatttcatatcaccacacatatctgtcagcagtcctaaagtgattaaaaatataaataaataaatagtcacgtaattatttaaaatactttcccattaacgcggagaaaaccgatctctcgtccagtctttaactgtctgttcccgtattggttctctcattttccccactctctctcaccgtctcactctctttttctctcttttactcccccgtaaatttttaatacaatatcaaattttgattgcaaaaacaacagacaaatgctgactgacccttcccaacactggcaaatatgcccgtggccccattcaaattgtcaatccatcccggcaatggttcttgccaaattgcaccaatgctgaaagataattgtgtattaagatcaatcagctgattgtgagtaagaaaagtaaaaagcgcaccgcaaaaaatgggtgtgatttccctagaatctgggtgtaaaattattaaaaatatggcaaaaatttccaattttcccccagcggcgccatcgaccccattggactcctcctgttccccaaaagtttattgaaaaaaagcttgtcctgaaaacgctgtaattaataaaatgatcaattataattttagaaaaacgaaattcattaaaatattttcctggcctttccgtcaaactcaggccatttgcgcagccctctattaaaacaaaattgcgaatcgttctcacattgatggacgcgcaatgattactggcagatccttcgcgcttttgctcaactgattctcggccattgccttcgcaaaagtgtaagtgttcggtcggtccttcaaaaataaaacaaaattccatgaaaattttgaaaattaaacttgaaacatcaaatttaaataatatagattattaatccgttgcctccaacaatttgtcctcaattgcctccaccatttcgtcgctcatccattccatcgttcccaccaatttgctcacttccactttttgctcgtaaatgcgctcttccgttttggccaaattgcaatttgcataagcgctggaagcgtggacaaaggcctaacacaaaaaaaggagttcactttgattgaaaattcccatanattattgaccttcagctgtggcatttgttggcacagctcaacaagtcgttgagtgccaattacattcctaaatcatctcattttaattgagcaatatttgacaaaacttaaacgaaatttgttgttttttacttatatta

SEQ ID NO: 14175 - DNA, 2953 bp, Heterodera glycines
gcaaaaacaacagacaaatgctgactgaccccttcccaaccctggcaaatatgcccgtggcccgcattcaaattgtcaatccatcccggcaatggttcttgccaaattgcaccaatgctgaaaaataattgtgtattaagatcaatcagctgattgtgagtaagaaaagtaaaaagcgcaccgcaaaaaatgggtgtgatttccctagaatctgggtgtaaaattattaaaaatatggcaaaaatttccaattttcccccagcggcgccatcgaccccattggactcctcctgttccccaaaagtttattgaaaaaaagcttgtcttgaaaacgctgtaattaataaaatgatcaattataattttagaaaaacgaaattcattaaaatatttttggaaattgttttccgggcctttctgtcaaactcaggccatttgcgcagccctctattaaaacaaaattgcgaatcgttctcacattgatggacgcgcaatgattactggcagatccttcgcgcttttgctcaactgattctcggccattgccttcgcaaaagtgtaagtgttcggtcggtccttcaaaaataaaacaaaattccatgaaaattttgaaaattaaacttgaaacatcaaatttaaataatatagattattaatccgttgcctccaacaatttgtcctcaattgccaccaccatttcgtcgctcatccattccatcgttcccaccaatttgctcacttccactttttgctcgtaaatgcgctcttccgttttggccaaattgcaatttgcataagcgctggaagcgtggacaaaggcctaacacaaaaaaaggagttcactttgattgaaaattcccataaattattgaccttcagctgtggcatttgttggcacagctcaacaagtcgttgagtgccaattacattcctaaatcatctcattttaattgagcaataattgacaaaacttaaacgaaatttgttgttttttactttatattatcaatgtcatgtcccccccccatcttaatttgcttttacatttgaatggcaactttaagggcctcgtcaaatttgacggtagcggcgcaatggaacacaaacttaaattaatgagaaaaaaattagtgctaatttaacttttaagtttataaaaattaaataattaaaaaacttaatgggttagcgtattaccgtaacttggttgatcagcgcagtacggtcctgctcattaatgccaatcccttccattttcaggtcaccactgattgggaccaatttatttaagcgtgtttcatcgacacaccgaattcggttgaataatgggctcttaatttttttattttaaaaaacacctttaaattattaaaatgcctcaagcaaattatcgagccgctctttaattgtttgattgtttaacggacggatgagcagaaaaattttatcaatttttggctgcgtgaataacaaattttcaagcagcactttacccaaaaagccagtggcacctgtgatcagcaaactgaagggatgaataattaaagtaattaggggattcattaccaactgccttcatacagaggcgacacttttaattgatcaatgttagataaattcatatttgacaatatgtagtaataattgagcttaaataatggtaaaaattaaaaaatgcataaagcagcagagattcacatttcacaaaagtcattaattgaaaaggcgagctttttcttttgttgaaatgaatggcgtgtttctttctttacgctgtcgacagttatagcaaaatattaattaattaattaatcacttttcacaaaaaagaggaatcaaaaagaaagcaattcaaaaagaaattgtctgttgaagataattaaaataaacatttttttatttcccgacaaatgaggggtggtaaatttttgggaaaggaaaattggtgataaaggtcaatcaataaatgataaatcaatgtgcaaaataaaagcgaattcattaagaaactttgggctaattaggcttattttaaactgaacaaaggggaatcctaattgaataaaaaatatatcgttaataaaagagcataaatacataaaagaatagggaaatcattcattccgtcgcttcccccggggggggggggagattggtgcagcgggcggctcctttatcaatggggcagcaaaaggaggaagggacagagacagaccatcgccggcgggggatgggagcatggcgcggaaaagtggtcccatatcgaccgcgaaatgtttgtattgataaaaatgataattgatattagtgatattaatgataattgacaatgataatgataatggacagcaaatgcggacggaggacaagtgcaggtggtggtgaaatattgtgtacaaagtccggggtttataagtaatttggcgattgaaaggtgaaaaacaaaaaacggaggggccgaaagaaagcgaaatatttacaaaaacagaaaaagcgaaacacaacgaaaagttaattaaggttgcctaattatcaattttaaatgtattgcaatgcattattaattatgattgggatggtgacactttaatagaaacacaacaacggtaattatgtctgattaatttgccatggtaaaaattgcaatgtcaccagagccatttcaaactacaaaaaatggaatgaatacaaatgtgaacttaaaaacgattaaatcttcttaatttcaatttttgagaatttttctatggatttttgcttttttctaatttcgattcttcaatttttacatattttcatcagaccaaccgttaaaaaaaatttttttttttgcttgttacttacttcataaattgaattttattttacttatttttctaaaaatggaagattgagagatacgccgccaggaaaaaaaatggaaatttttgccagttttattaacggatgaaaa

SEQ ID NO: 14176 - DNA, 1497 bp, Heterodera glycines
  unsure (1)..(1497): unsure at all n locations
aaaaagtttttgggaaaagcgcgcttcaagaaagctttttatttttttttaaattttggataaaattttacagaaaaatgatttttactttatgattttgactattaaaaagttgtagaaaaaatttcgcgtttcgcaatttcgcattttttggaatttcgcgtttcgcattttattttccgatttggcccatccctggccgatatgtaccatcgggaaaaattttgaaaactttgtaagaaattgacccccccccctcccccttcccttgtccacctatggaaaacattggccatttttaaaacaaatttaattgttggaaaaagaaaaatgaaatttttcaatgctaatgaggaaaaaatttgacaaatttaaagaattaaaaatttatttatttttttcaacccccaggcatcaaaattctgcacattggcaatttgatatgcaaattgttgacggatgtgctcccaccaacatcattaaagaataataatggaccacgacgacggcgacggcaagcgggcaaagcggacagcacattacgcagatgcacccgcagggagtaccgtatgctcagcgatgaccaacggacccgctttgtactgtagaacctaattatttatctcaagtaataggcgaaagaaccgatttataagcggaagaacaaaaacaaatgaaaaattttgtaattaggaagggaaaaaagtaattaaattaccatatttaatagagcccacgggcgcttgtttttcaaccaccctcaaaagggggggggcttattttaggaaatacggtatattaaaatggagaaaaaagccaaaatatgggcatatatttcataaaaattgggaatagtaaatttatttaatcaaagcgaaaaatggctttatttgaggcttaaagcaaaaaaaaatttaggcaaagaaaaaaaaatcattgaaaaaaataataggtagtttattcttaaataaaattgcaaatttttatttattatttttctttatttaattatttttcaatttttttttatcattattttataaattgtcttaggcgctgagttatctccaattgacgggtctttgacgcgaacattttcatttaataaattaccaaaattaaattacagtaaattattttagcataatgcactgttgcaactgaagcgtggctatggctcatatgaatacgaccgaatcacggcactccattccaatatcaatatgatgccatccgcgcacagtgggccaacatttccattatggcacagagaatacaataaacggtgaaaaaactgtttttgtatattataaaaatgtaaacggtatttttgtatattacgccgtaattacggattacggatttcagtaattgaaaaaacagttaacttcatttataatttcaaggaaaataagccttttctgtgntttaattttttcattgttatcctattanatattttctanaaaagctaagtttttttttattttattattt

SEQ ID NO: 14177 - DNA, 1025 bp, Heterodera glycines
atttatgaatttgtaaattaaagacattcgataaaattattcataaaactgcgctcaaaatcaacaaaattattttaaaatgttgatataaatcggcggcactatgtgttctctattagccttcaaaataatttaaaaattctttaaattttaaaattgtcatgacccgaggaactcaaaaaactgtttttttttttttttgaaattttccaagctaatagaaaacacttaagggtatcgaaaatttataataaaaaaaaatccatttgatgatttttgactaacatcataacacacaccatcccgaaatcatacaaatatttaatattgtgaagtatttaaatcaaaaatccaccattttaggcgaatcttcccacatcgccacaggacccaattttctttctacaccattcattcactgattatgtaggcaatataatttttttaatttttaatatgcacattcaaaaacattttgcctttattatattggattatttaatttccaaatgccaaactttgggtcgactatatgtaacggcagttcgtacaaaggcttagactaattctaagctttaggcttaagctaaggctcaggcctaagattaggcttggtttggatgttgcttaggcctaagcttaggcttttgtgaaaattattgcacaaactgtctattgtacgaactgctgctattggactcctcttctcggtttagctgtgggagcaatggcggttacggtaccaggaccgtacccagcgcgagacgcaatttccaccggacgatcaaattgtgccggtaaaaatggtgaaaatcaaaaaaaaaaagtaatttttttttaaatagtgttccggctcggaaaattatcatctcaatgcaacaatgttgccatttacaaacccaaatgtgaccaaccgaagtaattaataacaaattttgataggaattattgggatgattttatgggttaataaaagggctggaatgcgtccaaacccttttttccaagtacgggtataatgtttt

SEQ ID NO: 14178 - DNA, 902 bp, Heterodera glycines
tccaccaacgcattgaaacgtggcgaaagaagtgccaatttgaggccgagttgggcatggtcaaaactgggcaaaatgtccatccaaacgtcgttgcaaatccaactgaaatgggaaaagagtttagttaaataaatgacgaatttgtgcttaccgtcggttcattttttggcaattagcaaaatttgctgttgaatttcgaatgatgtcacacaaatagcagaaaaataattgcgttggataaagcctggatttttagggttttcctattttttacggataatactgatgagaaaaacacgagaatcgcattttattaaaacaattttgaaccagttcagcttcaactgttgccaatgggctcgaggggttggacaagtgccaataggaggcgaaaaatcattgccaaaaacggaaggcgcggaaacattttgacataaaatgacgacggatcggaagaaaaagggaacgcacataagaggaccaccaaataggagaatattttgcaaatgatgagatttcggggagtttccccaaataaataatcaattcgactgataattttttatccaacttcatttgtaaaggttaaattcgcatttttcaaattttgaaaattgaccaaaatggaaaaacataactcgtactgtctttcgacaaaaaaatgccatagttttgccctaatggacttatttaaatattcttggtataactcgatagccctaaagattctctgtatacaggcaaaatttcaaaaaaattgatgaagaatgaaaaaagtcatgtacgaattttttttttttttacgatttttggtcataactttttttgaaagcaataaaattttcttgacttttttgcctgcagatatagaaactttaagggctatcgaatgcgaaaaa

SEQ ID NO: 14179 - DNA, 974 bp, Heterodera glycines
gtttacaaaatctatgcagagttctttaaagtttttcatatagtacgcattaatttaatcccaaattcccagctttttcgtattgatttaccctgcaattcagcagttggttccaaagttagggactgctgaatggtcaatcacaacgctcattgtgtacaactgggcaaaccccctaggcgctgtcttaaaaattttgtgtcttttttacttaattgttcccaagttaagcttacatcaaaagtgccatcacaaatgtttggctattgcatatcaccaattttttgttaaggaaatgattggactttccgctcaaactgcttaacgaaagtatatcaaactttaaaaactgttgtgaatttttgtccccagttatataatgagaaaattatatgtacaaatatttgcagtttatttatatttcgtttttgaccaatcttcaaattttggcatgaatttttttcaaaaaactctttagtgtcgaaattactcagtgtcgaaaatactcagtgtcgaaaatgaagtaaaacagtgaaagctttgaaaatagttcagtgtcgaaattacccagtgtcgggattacatggcacccttttagaggtcgctgatacgaaaccgctcgaacttttacaggcttatgacgacgcgacttccgatgcgcagacaacgggcgagagtatttgcgcggagtccgtcacgatcatgggactgttgcaggacaacatctcgtttttggctataacttttttctttgccaaccaaatccaacattgttggtgtcattcgatagccctatgtatcctctattagcctgcaaaatttcgaaaaatttcgttcaggttcaaaaaagttatggccagaagaattcaaaaaaccaaattttccaacttttttagctcgaactttttttgaacttgacgaaatttttcggaggaggcaggctaatagagcatctaaagagctttcgaatgata

SEQ ID NO: 14180 - DNA, 4122 bp, Heterodera glycines
  unsure (1)..(4122): unsure at all n locations
gacgacgactcgcnagtgttatggatgagttgcgtatgataaagttggatatggatgagttgggcatgactcattaaaatgataagcacatgctctttcttatacatgnaagaggggcttgcgatttttgaattctgctaaagagcctgagatttgcatcttggcactaaacccgacattagttagcagattttataatacggttcgatcttagataagaaattgttgtattcttgaatacagtccagcaagagaaatttgcatgcaaaaagtgaaagcgatcaattttttgacaaaaataatcatgcaagtcttatttattacttacttcattacatataaattttgtatatgcaaatgtatattaatattaattcatatgtacaataaattatgtatatgtagcagatcaattaaaaagtactgttggaatcaactactgtcgaaaacaatcactgtcgaaaacatctggtacgatacagactcctattttgtcgcaattccatgcgttttaagtgagtggacggttcagtcccaaaggtatttggccttcagaccgggtctggaacagggatgttgctctctcgtgtctcgtattctcgtgtttttagaccgtctcgtattcgtatctcgtaatttggcacgaaacacgagatattttatgcactggtaagaatgggggggggagggttgagaaaatatttttgggaaaattaagagaaaaagaaaaatttaaaaaaataataatttagttaaaatagaaacatttattctacctggccaaacccccagtccttacttggtttctgcaatggttcgattcccacacagaataaaatatttcttattcattttaattgtaaagatatttttaaaatttaattaggaaattttccaactaccaaaaataaaaacaattaaaatatttctttcatttttttaaacatagccaaaaaatacaattgttagtgccaaatctttaataaatggtgacaagatttccaaaaaccgccggacccaaattccctaatttttaaaatttaattcaaaaaccagcagaaaagtgatcattttatagacaaaacctcttaacaaaatacacctaaattttccccggcggcgcctatcggcaccgccagacccctctactcaacaattgttgtaaaaaaatgcgctagaaatagatctcatcaaaagtaaggaattttaaataaaatttaaataaattgatttctcatttttgatttaaaaaatgtgaaaataaattgatttttaacacaccgagtcaaaaaacgagacatgtgccaataaatagagagtgcagagaaaaatacatttctctcattttggcgtactatttctttacagagaaagaaaaaaatttaaaaaatgacgatattcaagggcacccccacaaagtgtccaagccacgaaatgtccaaaagagtaaaaacccacgaaatgtccaaaatttttcaaaatttataaaaacaaaatgagtctaatttaggatttttagggttttcggggtcgctgaatacgaatataccctttatattacgccttgcctaaccttaggcccatccgaataataaaaaaactcaatttcgagacttggacattttgtgggtcagcgctcctgccctgtcctgaactgtaactgtgagaccgattatttaattccaagggctgtcaagtcaagtgtccttatttctctagcatttgtccttattttgttaatattcagtaaatgaaaatatctcaaatttttttaattggttttttaaagattaaattagccatttttttctgcaaaatgaaagtggttgcgctggtgtcgggcggcaaggacagctgcttcaacatgatgcgatgtgcggaggaagggcacgaggtggtctgtgtggccaatttgcatccaccgaacgaggtagaaaagcaaaatttcaaaattccatattttacaaaatgcaaaatttccggtaatggtcccgttttgtcgcccattttaaatttaaatttattttcaaaagtcgtgtaaatatttttcaaggcttttcggggccgcttatcacaaatccggcacccgtttgactaactcagaacctcggattttttgtcagattctgaccctgggtttggaactggtcgaaatggatggatgctcttatgcagtttatttagccccacaaaattttttcacttttcaagcaaaaaacacagcaatatataggtttacggggtcacttgccacgaatctggaaccatttcgactaatttcgaaccccgaacccgaattcggataaaaagtcgaaaattcacttaccaaaattcatatttgcccaaaatctatttaaatttacgaaatggatgctggattcggatcatccatcaaccacaaaaatctctaaaaaaatattttcacaaccaaaattagcaaattttcagattgccgagttggacagttacatgtaccaaagtgtgggcagtgagggaatcaaggttagtgagactaaatatgtatgctttaaaataaagaaattgaatgcaatttaaatttttttaatgcatttgcaatccaaaaattaaaaaaaaggtgccataattttttttaattttcggcttcaaatttttaattttccttaaatttcattttttgcatttccgagggctcctttgtttggaaaaaaactcctaggcctgttttcctgcaattttcagttttacgcggatgcccttggcctgccgctgttccaacgcaaaatttcggggcgtccaaaatgtgtagagagcaacacttatgtgcaggacgaggaggacgaagtggaggatttgtaccaccttttgaagacggtcaaagaatgggacccggaaattcggggtgattttttaatttaactgtgcattttttacatcttttggcaaacaaaaaaatttttgctcaattttcttaaataaaatttcagaattaaatttacaaaaaaagaactaaaggaaaatggcattttttgacgaacgatagcaaaatgaaaatttaaaaaaacctacaatttcatcaaatatttattggaaatgaattattttttggattttaaatttaattttttgtttttaggcgtttccgcgggcgcgataaacagcacttatcaaaaattgcgtgttgaacatgtgtgcgaacggcttggactcgtcccgctgtgcttcctgtgggaattggaccaactccaactgttggacgccatggtcagtgaatggtgctgcacaaaatgacaaaagaaaattttgagtttttccggttttactgttctttgggatttatgaaaaattacacaaaaacattttgcaaactcgagaatgttgatccaaaaagcattgaaaaatgctgctctttttgatgcgatgtgaaaaaatgccacagaaaattttttagtttaaaatttttcgtgttttcctttttctaattgttttttcttacagttttctgtgagattaagaaaaaatccatgttttcaaaaaaaaaaaacaaaaattagtagccctttttactttccctgtttgaataccaaaatccgcaaatgttcgtccattcttcgtagcttctctttttcttattgtttgagaagaattcaatggcaattgaagagggggaacagtttgccctctcccacctgaaaaatttgaattcttacatgttttactagtaatagtttactcaaaaattaaaaaaaaaaaattttttttcttaaatttcaaattgctaaaaaattttgtgccgtcctcgcagatttccgctggtgtgaaggccgtgctgatcaaagttgccgcacttgggctgaccccaaaacacttgggccattcgcttggacaggtgagaaaatgctaatgacaatgacaatgacagcagcggccggttgaatacgacgatttttctttgaagattcgcgaaatttttaaccgtttttttacaaattttacatttacttagtgtgaatttgttatttctgagggcttcaaaaattggaactttgactgtgtaatgaggaaacttgatgttttggaggtccctaaattcaaatccaaaaagaaaattaattaatgcttaataaaactaaataatcttgg

SEQ ID NO: 14181 - DNA, 1215 bp, Heterodera glycines
atgggccaaattgaaaaataaaaagcgaactgcgaaaattgcgaaactgaaaaatgcgaaatgaaaaaaaagcgaaatgcgaaaagccaaaatatgcgaaaagcgaaacgcgaaatttttttcaaaaattttaccaatagtaaaatcatagattttgtggttgtgatgcaaaaaaaaaaacaaaaatctctgcattttccggttcaatctttttctcacatcacaaaaaatgacaaattctacccattttgtggttaaaatttcaaaaatcatggtaaaatgagggtccggcggtgccgtcaggcgcccccggaaaatttttttttggaaattgtaataaaatatgatatgtaggaaaagttgcaaaaatttcaaaaaatttactatttatttcaaaaaaatactgaaaaaggcatgaaaaaggcacaaaggtcaaaaaaggcaccaaaatcgcaaaaaggcaaaaaaatgcacctaaaagttcaaactagaagcttaaaaccaagttaaaaacgcgtttttcgtgcgtattagaccataacaagttagcaaaaaaggtaattattaatcctctgcagcccaaaataataataaactgaagcattcgttttaaaaattaaattttcaaatatattcattcttaggagtggaaatttcgcatttcgcgccaaagagcgaaatgtaaaaagcgaaatgcgaaacaccaaaaaatgcgaaaggcaaaatgcgaaacgtcggcccatccctgatccgtactattaccaaattgagcaaaatttttggaaaattggtgagattggtctttgagggggtaccaacaaggaaaatcgaaaattttcagcaaactttttttccttaaaaatttcaggtgtggtgggacctttggaggggaagggagtaaggacctcgcccccttttgggactgtccctgacctgtacatgggtccaggtacaggtcgatctctaaaagaagcaaaaccgaaacacacatatgtgaaccttttattgaatcaaacataaaattatttattgcaaaacgatattaatagcaatctttgctcattgcctcttctccgtttgaaatgctcactgtgcagctgttattcacaattggtataagtgtttccacctaaaaattggaatttgaagaccaaaaaatggcttcgactcactaacgattgcactcaaatcctccctctgttgttccttccgtcg

SEQ ID NO: 14182 - DNA, 1811 bp, Heterodera glycines
ttcgtcgaaggaatgcatttggacagttcagtacacagaatagctcctttctgtaggcattgttcagattcctcctcctccaacatttgctctattatgtcaagcaattcatttgcacttgcgattattgccaattggtcagacgcagaattttggtcggccaatgggtccacggacaatgtgacaacgaattggtggataaatgacaacaagtcggatctgggaaatatttcactgaataaaaagttgaatctgagttagaccgagctaacaatgaaattgttcaagaaacgaactccatacatttaatgtaagagaaatacgactcacttcacttcggcactgtcaaaattctgcgtataaatgcgttgccaatgttgcactgtttgacaaggaaaatgtttgcacaaaatggtaagggcagggccacacagaaacgaatttgactcattcagggcacaacggatgaggaaatcacacaaaacagactgatctgaataaatgatcaattaaaaaaaatattttttatcgagtttattgcaaatgcactcgaaatgtgtggcataatccattggcatgcaattataagttcaagcgcactgtgctcactctcccattggaattggtcatggatggaagaaggacggacagatctgtcaccaaccagtgccatggaaaccaaattggccaattgcacacccaaattttgatgttgggcaaacagttgttgaagaatggaggaagagttcgagtcgtttttctgcacctttttgcagaaggtacagaagaaatttcgtgccgaaagacgggaatccttaacgggaaagtaaattaacagatgcaatgattggaccatttataaccaaaaggtgtggaatgaactggtcaaacgcccgggaaatggtctccgagaatgagtcagtgccgaacaatgcttcgacaaaggaggaaatggccgagtcggcacacggctgatgatcacgtcgaatgagcgatggaaagagcgaacggagaagctccgagaagccctttttgaagaaatgaaaatgccagaaaaggaagaagtgcaacattaccgctttgtcataaaaaaacgaatatttgggaagcaatggaccaattaagcccaaattccattccgaactgctgcccaacaactcaaaaattgttttccgactcaaattgcaactttctccagtgtcctcagcgagcagctcagccaatttagccaacattagagagaagccatggcggtctttgaaggaaaagccatcgtcggaggggtcaattgaaccagaaaaactaaagagcacaaagttatatacctatacagatatggtcggcaaatcattttcttttatgaatggtataaatgctggacgaaggtctgtttgaattatctgaaacattttatgaaaatacactgcttctccttagtactgttttattcccctttattgcgggtctcctcgcgttacggtcagaccacggaaaccaaccccacccaagatgtctgctgaagttctaccttaaataagacgttatgaaaaatgaatactctactttatcttcgagcaccagcacaacggcttgttccgggtctatgctaaacatatcagtgccgattaaactgtaacgaatgcgttcgttctctcccgcgtccgcatccgttgccacgaggcgaatgtaattaacgtaattagtgccggcgctaatttgtgtattcccatatccgttggatgtaaaccctcatccttcaaatgggcattgaattctcattgaattcctaaatgccaagtgtccattgaaat

SEQ ID NO: 14183 - DNA, 1297 bp, Heterodera glycines
gacaatgaaaaactcggcatgggtcaaagcatccaccaacgaagaaaaaagagagccattcaccgacgccgaacaactaattgctttggtgtcgtgcattcccattaaagtcattgcaatgcgttcgatggagggacggcgagcaattcgggtggactcattggccaaaagggcggaaatgtgctgcttagcaatttctgaaacgcaaaaaattcttgcggtgcctttctttagtgaattttcacgactcatcgcaaagcacaggtggacaagggggggggggggggaggggtggtgatcaatttcataaaattttcgatgaaaatcgaaaaagcactggcaaagatggaaaaattaggcttctgattgtgaggggtgagggtgagtgggtttcacactagaagtcgaccctgctctatccaatggtatatcgtttatatgcaatttcctagtcacagctcggaatgttcccttgttagatgagttggatatggatcagggatgggccgacgtttcacttttcgcatttcgcctttcgcattttttggcgtttcgcatttcgcttttcgcatttcgctctttggcgcgaaatgcgaaatttccaccccctaagaatgaatatatttgaaaatttaatttttaaaacgaatgcttcagtttattattttctgttaacatattacactcaaaattgcataatggaaaaattcttctaatttctccccacaaacgagaattaaaaaattttatgggtacatttttgaatataggcaatttttcgtaacaaagtgcactcaaattttcaaatttttttttcaaaaaatttcacttgggaaaattcccggttggtcccagtcccggacgaaaatcgaggtcccggtcccgacttttctggtcccggtaagtcccggtccaggttttttaacttggtttgaagcttttatcttgaactttttggagcatttttttgccttttttgcgatttatttttttgaaataaatagtaaattttttgaaaatttaacaacttttcctaccatattttattacaatttccaaaaaattttccggcggcgattatcggcaccgccggaccttcattttaccttaatttttgaaattttaaccacaaaatgggtagaatttgtcattttttatctgagaaaaagatcgaaccggaaaatgcagatttttttttgcatcacaacctcaaaagctattggtaaaatttaaaaaaaaaattcgcttttcgcatttacggcgtttcgcatttcgcttttttttcatttcgtatttt

SEQ ID NO: 14184 - DNA, 4199 bp, Heterodera glycines
  unsure (1)..(4199): unsure at all n locations
gttttggagaaaattttacgcttttcatttaaattttaaacttaattactttttactgtcgaaaagtcacctcctgaaatttataatatttctgtcgaaatgtcctttgctgtcgaaaagtccggcgcccaaaagtccggcgcccatgggggcaggtgtagaataagaaatcaagtgggctgaaaaaatttttcgcggaaaacgaatgggtgaagaagttcttaggattttaaaattttaaaaaatttataatttaatttttcattttattgctccgtttaactaatgctttagcacagaattgagtcaaaaacgagatttcttaattaggattttttgaattttgctttcttcttcctgtatatctatttttaggtcacaattacaatttagctgaaataaattgatgtattcaaattttaattttttgggtcatatttttgccgttcatttattttcgtttgacctcataaatatatcaataaaacccactgaagaatgatgctctcttctgtctttttgaaccgatgccatttttttcaacgaattatttcttataactgaaaatatttttattttaaactcaaaaatgtcaatttctaccagttcaacaaatgctgatttcacaccatcaataggtgaaggagttaatgaaatgggaaaaggttgaaaataaatggatttttttggggaagggagtaaataaatattataattaaatcagggaattaaatttataaattttcagaagttaatgacgattcaattagtttggatgaagattggcaatttgatagaaaaaatgaaactgttgctgatcggcaacaattgctgatggtgggcaatgaaagaagcttcaatgaggcatttacatatatttttcgacaaaattatttatttttaaaggaatttcatgaaagttatgctaagaataagatgaaaatggaattcaaaattaccaaacttgtacttgagaaggtaagttttacaaagaaaagtttaaaaatccccatttaacgagcagaagaaaaaccattgattttaagcgggacaaaatacttcgcaaagtcaaacgcacactgtcgaattcaaatccttctgagttaaggcagtttccaacaatatgcgaaaattcgttccgcagatcaccattgtcttaaaaaaacttttgaggtaagggaagttcggctgtgctgatattgcacaaaaaagtcccagcgcctcgtgctatcgacacccccccccccctccacccccgtgatcggcgacttgaatgatgactctctcctgtatttacggaatttagatccatggcatatggatattttgtcgttgggccgccataacatttgccaaacaattttacaaaaatacaggtggagaaaaacagaagggcgggaaacgaaggcattggttgtgtgaaaatatactaataaattaaagaggctgaaataatttaaaatttaactcaattaaaaaaaaattaaatttaaggaaaaaatttatattttgaaagtacatcaattggggaagtgagaaggaatgtgatgaatcagtggccaaatcagcgagggacacataattatttatttttgtgcgaaatatatttatgttaatgagcttatttgtggtagaagcattttgtaattgaacaaatatttaaataattaggacggattgagtacaaacagttatcagaacagggatttgccggggccagaagcctggggaccgggaactgggaggaccaactgggaaaaacaacttaattaaattaataatttttttaagttaaaaattaaacttttctagccgacatttgcggaccgacatttgtgactaaattatcaaaaaaaagaaaaaaaaaatttaaaatgaattttcaaataaattttcgtaattacccaattgaaataatgactgaaggtgataattaaatagtgcttcttgctctaagctatgtcaatttcgacatactttttttctttaatcggaaaatttacccacaactaaacgaatttatcacatatagtttattaggcaaattgattaaaaaaatgctttatacaaaaatcatatcacaaaatatattgcacgcaaaatttttcgtgtttcacctactagccttagtctaaagagcttagattttgatcaggcatacctaacaattaatatcaagaacaaataaaaaatataaaaatatattttatatctttaaaaagcaaaattaaaatgaattactcacattatctatgacaacataattcttgtaaatcaggaatttataaactaatgcattgcacaagttgatcagatcactacttaaggatgatatgaagtgatcaaaatttttagcaccaagaggaattgaaaaaagaactttttggaaaaactttctaaatttttcatattttcattcgcattaacttgcttaactccgaaaaatcacatataaaattcaatattgagatgatcatccaatttaagaaaaaaatttttttttgaaaattaaatccagaaaatatgacccgcaaaagtcggtccgcaaatgtcgcactacgtttcgagttcgtcgccttttgtgtaggagaaaagagaagcatttttgggaggagggaaaagcgcagcagaaaatgccaacgacggaataattaagagaacaaatggaagaagaagaagaagaaacgcagacatagaaaatgggagaaaatgcgggggatatgatggagttgaagaatgacaaaatttcattaattcacaaaatccataattaatggacaaagtgcggcagcagcctttcattcccctccctttcatttttcacaattcataatggctactaattggcatggcaattaactaattagtacttgttaataaaattacgacaaaaaacaaaatggacagacaaaaagaagagattttgaaagaaaaattaagtggaaatgggaataaaaatcttcgccaactgtctggctaaaagtggacaaaaattttatattttcttttttaaaatcgcatcgaaatgttttgctaaaaagccaaaagcatcataatctgctgataaaattgttccattttcttttcttttcaacaaatgcaactttgttgtccatacttttcacaacaagctaaacgaccagcacaatttgtagcactgaaataaaatgatcaaaatgcttataatttgaattaccctgctgccaacaagcactcatcaaacccatcggcacgctttgccaccatttttgcaaattctaaacaatttgattcaaaattgtcggtacaaaaagaattattacctagatattattattttaaattttttttatttagcttaatcaccttgttcttgtatcggtgttccgacaactaaaaacccaattaattatatgtaatgactaggagggatgcgatttttaggttttaactaaatttttttctcacttgatttgaagaaaggagctcaaaaaacgcatttctgcgttaaaaattttcgattctgatgtcactatcggtcactagaaatcactattttggctacttcgtcactatttcttcaatattttggcatttttactcactattttagttaattattttgggatttttcgtcactaaaagtcgcatccctagtaatgaccctaaatttgactaaccatcagcgaagccaaagaaggcaaaaagaataaaaaatgacaaaattagcaatttaaacatttctagctgaaaattaatagagataaaaaccaatcacaaagcattattttcaaatttctaataattaaatttggaaaatgaatttcatctgaaccaataaggaattaattgccttttaaacaaataaaacaattttttctatattcatttagttttccaattagttctaaaaataacccaaaattttttttcatacaattaaaatgagtaaattttgtcaaactcatttataggccaaattatgagattttatataatacggattagtgtattaataaaaaatgccaaaaagtcataaggatacagcgaaaagtgcaaaaatgtgatatgaaaattanaattccactttatatttctcattgtttgatttataataatttacttttgtgaatggtaaatcatttttcaggngcccactccatgtttttttcttttgttggttttatttgtccatactntttgtataaaaaattactttt

SEQ ID NO: 14185 - DNA, 1479 bp, Heterodera glycines
  unsure (1)..(1479): unsure at all n locations
ttttcagttggcaacgctgagcatgaataaacaaaattgcatttttaaaatatttaaaaaaatagcatccatttttccgcattgtttgcaatgaagacgacaattgttttcaaactcaaagaggtcaattagccatattggcggctaatgcaaaaaaaaatttaacaaagaataagtattaatttaaatattactaataattttttgcactccaaatgtgcaattaagaaaatataaataataaaaaaaacaattttataaatttaatgatcagttttgcatgagcataaattaaaatttgaattgattgatttaattttactacctttagctgtgaacgaatccattagcaaaaaaagtatgaagaattttattcactaaaaattaatttaaaatatttaacagggtgattttaataagaaaatattgattagagcacaaatgcattataatttttggcaattggaaggccgaatggggagatgttgaattgcaaatacgatgagcaaaatgccgtgagtgaagctgacatttttattatttcagtgccatataaaaatttgcataatctctttggtaacaaattttgaaatataacaaacaaaaatttttttatttggtgtaagaatttaaaaatttattattaaaatttattaatttttttgcatttaataaaatttattctttagattcaaaattaatctttactcattgtttatcattgttctaggaatatttactttattgaaaaatttgtgttcaaaattttaatttactttttaaagtaagttttttggattaatatacgctattaatcgacacttttgatctataaaaatttttcatatttttaattaaatttttttagtaataatatcaaatttaattttttcaattagttataccaccaatttcatggcatttctttgtaccaatgctcagtgtccagtgcccgcatctttgtcttgccattcacacaaacggataaatttaaaatgaacagtcattaatttttttttggaaataaataataaaacccaaaataatgtttaaaaaagttaaatcatttcatttgtttattaattaatgaaaagatttaggaagcaacattattaagaaagtccacaaaacgacagaaataaattaaataacttattataaattttgtaaaaatatttagctaccaacttaacacaccaagtcaattttgagcctcacgtttttttcaacgaataaataaaaaataatgtcatattattctaaaatttttttgagtaaatttaaaaaacaaacaaaattgatcatccgataacattaatgaccgagtcttcatcattttcaccatccgaatgctccaaaaaattgtcgtcttctttttggtcttccagcctctaaaatgtttaaaattcaaatgatttctgggaaaaattaaaccctcccacgccactcaaaactgagtcgggngggcgtttggggccc

SEQ ID NO: 14186 - DNA, 1310 bp, Heterodera glycines
  unsure (1)..(1310): unsure at all n locations
cattgctgacaaatgtgctccattgtgtagatttgtcggcatcggcatgcattccaccatgctccagtcgcgcaaaacgagtgcagcgcctctccactaatgtttcgaaaatagagtcaataatatntattcaatctaaagagcatactggttgctttttaattcttccgtgtttcanaattgaatatttcttatttttatcatttattttattaatgtatttaattgatttatgtttcacaaattcagacgtaaaaacaatttaactttttattttatgagttgtgttattggtgcgatttttcataaatagaaatttatcaacgtttatatttattgtaaattctttatataatatttaaataacattttttcaacagagcgcttaaattttcaaagatatgaattagaacttatctaagcatccacgataatcttttagaaggtcttgacgatcagtacgcttgcaaattatattgaaagtttcattatcatgaaagaaatgagctttttggcaagggaatggaaaaaatgatagacgaaaaataactcgcgatgttaatataagattttaggaattagtctttttttgttttttatctattttatattttgggttaacctaaaatgtgttgttttatcataaaaaaaatgtcataattaaatgtttatgatgaaaatttttattttaaaattaatttactaatattattgatagttttttcaatctattaaaaaaatatggttgaattttattatttttattctttttcgttcttaaataattcaaatttttgtttgtgtgtttacaaagtaaaaattcaagtgtttcatttggtttattattagctcaaaaatatatttaactcagtggtagaacaattacattacacaatgaaatgaaaaaaattaaaagcaaatcactcacctaaattttttattgtttctttattttaaacttcacatgtgtatttccaatctgaattattttgtctaacattatttgtttgtttataaacttcagattttaaaattctatgatgtaaacagttaagttctgttttatttgcgttttaattaatttatataatcagtcaggacgaattttaggaccatgaattaaaaaaaattttatattggataaatggacggcatttttttgatttttacgctttgaactgngcgcattgattttttcacaacagttttaattgattttgcttcattttcgaaatattaatattntggattttttcttaaatataaatcctaatcatatatatcttaaatttttttgaatattttattta

SEQ ID NO: 14187 - DNA, 2192 bp, Heterodera glycines
aaaacgataaaaaaaggaaatgcctttataagtttattattattttcaatttaatgcttttaatttattttcgaatatacaaatctgcttgtttgggtaaatattatttctataacaaagatattttattatttcacaatttattatttttctttaaaattaaaaatattatacgttagatttaaaaaataattaattgcaatgaatgtacataaacaaaaaataaaaccaacaatacaactattcaattaataacaatattctttatttaaatacaaataataaacttaataaagtaaacattgtgacaaataacataaaactggaagaataaaactttatttataagaaatattttttaaatactttaaaacatgttaattcataacattccttattattaaaaagaatattttaatttaaacaaattttataattagcattgaattgaagagaatcgatcataatttgttgcggttttcacacatatcggacaaatttaatgccgaaaatctgttttttttctagcactgacgcaatttaggtttttaaaaagatgaataagttaaaaaagttttgagtattattagtgctgatgatgcctatcattatatatgtttattttgatatacattttttatgaacataaaattacatagtttttaattgaagttttaatgtgacataataataatttttacttcttgttcccgagcgctattaagtgcgctacttcgtgtaatgtattcttttttttttgtttcaaatgaaatgaaaatgttaaaatattttgaaagaagttttccaaaatgaagctgcttacgattatcattatatgtttggtttttaattattaaattttgcatattagttttttgttattattggcaaagatgaaaaaatttcgaatagtatctctcaaaaattttttattaagaagatgtaaagttctctgtgcccaaatccaagcttcattttaacatgctcgtacatttttccattttaatttcgcttattgattataatataattactgtgcatataattatgatgatttttaaaatgacacaagtattcataattttttttctattaaagcaatttatgttaaataatctgataaataaatctcacataattttttgcctaatttttataaatatggtcgttataaacataaaacgggtcaacctttaagaaagatagcttttaaataaaataaataatttttgtagaataaaagttttatttttcgacatgcttattgttccatacaatgaatggtttttaaatattttactgtaaaatatttccttaaattcacaatatccattctgcttaattttgttttcatatacacaaatttcttaggttttgtttatttattttaataattatgctttaaacttaatgaaaataatattgcatttttacataataattaaaagaacactaatgttttataaatcttataatcacattttactttttcatcttcacttttgcatttttgtgcataattataaatataacttttaaaatgactctgaattcataatttttctattaaataaatttattttaattaaaaaatgattcacatttttattttaaaaatggtcaacactcttttatttaaaaaaggtccactttattataattcagctatcattaatttttttcatgtaaaaaatatcaataaaaccaattgattcacaggaaagaatacatcggttgcttgcgtcagaaaaaaatagaaaattattaatttagatttaataataaacgaaaaaaattattaattaaaaaattataaaaatattattttgctttttcgagtaatttgtgaacttgttgaccggatatttgggatccctacttttggtgactcgacatttagtgataaaagaacatcatttaggcacctgacatttaggggccgaattataaacccgaattttttgggctcggcatttgggttttgaatggaattcttccttaatatttaagtattgagcgtctcactttttggcttaatacttaatattataattttttaattcaaaatccaaatgtcgggcccgtaaattcccagtaccaagatggcgttttgtccccaaatgtcgtgatcgctgaatgacgggttcccaaatgccggtttatctccaattatcgagtccccatgatgacag

SEQ ID NO: 14188 - DNA, 2830 bp, Heterodera glycines
taaagcacttctgaattataaagaaaaatttcattttttcaatggaataatggcaccatcaaaaattgtgacccatttttggcgccaaaagttcactgtgcgtagacaataaaaaattctaacaactaaactaagtgaagcaaaataatgaattcacctggagaatatggcataacatagttctttaaaataagcttgaaattggtgataattactttttctaaaatcagaaaaaaacatcaaaacgggagtgatcagaaatcgttgatttcaatgaaaaaaattgcgcactgagtcaaaattaaaatggattcatttatacaaatagcaaaaattaattatgattattcctttattagataagaaaagccaattttattcaaagtaaatgaaaaaaagttatgggtctatgaatgggctaaacacaaaaaaataaatgtattgtggtttgtccaacttaaatgtattatagtaaatatttattagtatttaaattattttaatttcctattatttaagtgaggcattttaactctggccaaagcagacaaattttttttctttttcattggggcgcaaatgtggaggcgcaaatgtggaggcgcaaatgtggaggcgcaaatgtagtaggcgcaaatgtagcaggcgcaagtgtggatgcgcaaatgtggcacaaccctttctaatgtttttttgttaataaaaaaatgtgttgaaaggtgccgagaagggaaaatcaccaaaatattccttaatttagtacactaaatgtttgaaatataaaataaaagtggccgagtgtatttgaattcgggtaatggaacggattattttgggagtgccattggtaaaggaaaatgccctcgagggattgaagccaatgggaaaagggggaaaggcctgatatccttactgcacgcaacttggaaaatattttttcgggcatcaattttctaaattaaaaattgtttatattatactaaaaccatataatatagccaacagaatctgctctttcagatgtgattaactgctattgaaaactatttttatttcacaagatttcgggcgatttacgaaattggtcaaatttcatagattttgagggctcaaggggtcaaatgcacaaaaatagttactcagctgaaattctttggcgtggcataaagcctcggtccaagtggtagctcatgccagataatggcctttttgaggaaatcaggaataatattttgatgattggaatttatgactggttcaggggcaattttttgggttttatccatgataaaatctgggccttttattttcttaaagagagcccgagaattatcttgtgtagtccatttaagtgaccagggtcttcgttaattctcatgcaaaaatggtttcttttcgttaaacctttctcaggaaaatgaccaaaacattgacccgggagttgcgtgccaactgtaaaaattttttggcacatttttgtctctatcttatgactctctaaagataggataaaacgattaagtaataattattccctaatctgttgtgcacattttgaatatattttagtcatttttggttgcggttgaaaaaagttacaacaaaaaataggtaggtggtgcaagacttatttgtcaccctgtactaaacaattgaattaaaatgaaggcacgtttatccgtacactgagagatccaattgcagagcaaataaagaagcgaaaagcataaaattggagtaacaataaataggcatttgtggtatgatcggaaggcaatttgccgtgaaaaaataattctcacataattcgtgaaaaaaaaagaattggaatggtttcaaagaggaaagacctttcccagtaataaattgtttttgtgcaaaatttatgtcacgttttttcggccgattttcctcctaataataatcggagtcgtacaaatcataatcaatgtcttcatcgtaatcattttcccaatcattgttggcatcgtaatacgaataatgaccgtcataggactgaagggagagcacatccgccagctcatccgaaccgtagctgacctcctggcccaacacctgaaacacgcatttgtgctccctccccttcgggtcgaccacctgaaaaaagaaaatcggttagactcgaaaagcatttggcaggaaagtcacaggcggacggaatttacaattagtcaaaaaaaaaacaaagcaaagaaaaaatgaacataattaaatgttatatttagggtgttgaattatatagaaatccatatttttttcctggactgtgggaggcctgaaacgcatgaaagacatatttttagcttggtctggagcttctaggatgggtttctatatccatattttccatatttcgcgatttttgtccatattttggcatttttccagaaaacctctattagaacggcccccaacagctaaattgacctttttgaccccaaggacaggaaaatttttccaaaaaatcaattttttttagaaaattttttttcgagaatttgaatacatttaaattttattaaaaattggtaaatttatgtcaaaaataaggaaaataaatttaccgtgtttttttcttctaaaatgattattaacaatgtatttagcaattttgaaggcttttactttacatttagcgaatttgaagaaattttgagaaagaacccctaattttgaaaaatttatgtatgtccatattatgccattctatgtccatattttgagatttttttgccattttatgtccatatttcgcgatttgttgtcaatattttatggccatatttagcgattttaaatccatataatt

SEQ ID NO: 14189 - DNA, 1669 bp, Heterodera glycines
gcaggtctccacaaattggggtgaccatttcagcaaaatggtgcacaatccctcgtgttcgcccggacgaaattcgaagaaaattttgacgtcaatggttttaatttgggggcacgaaatgagcaaagaatggagcaaattgtgccaattcatcgcttttgcatcggaagtgccaaggccatagtcgaaatgaccgaacagacaactgaacccaattgcgaatttctccacccgatcggctgtgctcgcactaaaatgggaaggaagacaattaaattgtggtgtgaaattagtgtaattttcatattctaaccaaattggcgattcgaaatcgggcgatttcatctcgtaaatttccacatcaatatcttttgcgtttaaattgagtagggattccaattttaagcctgaaagtgttttatcttataaacgaactccgctcaaacacccacccaatccgttggtcacaccacgaactttcagtttgtccaatgcaaaacgaactttcgctgcctcctcatcaggaaagtctattttaattgtaaagaattaattttttacgtatattaaaacctttgttgagaaacaatttggaaaaggtttgaatgggaaatttgcaattgttcaacttttggtttaagtctgtgccagaaacagatgcaaaatgttctgtgtaaactgaaagagttaacaaagacagccttcgcagttcgagcaaagtctgcacaagttctttcgtcaccaaataggggccgtaaaaggcattctgacaaaaggagaacgaaattcacaaagggcagagaatggcaaatgacaacccacgtctttgctgttctcccaaactcgcttggtgtctttgaacattttgatgttatcgttgaattcgatttccttcattttgacaaaatgcgcgagaaaaactttcattgttgacgagttgagtccctaaattttttataaaaaatacgaaaatgaataccttataatttaccatgaaatttgtgaaagaattgtcttcacgtaaatccacttggtggccaaaaaacttcttaaatggtttcgtgaaaagcatttgctcagagacggcatacaaaagatcctcagacaattttggagtggaaattgacattgattaattttacaataaaagcaaattgttgactaaatatagtagaaaaatgagttgcttttcacacatgcactcagtgtctctagtgatcggccagacaaatttcgatagacgtagccaggataagatagacctagcctggggaaatgggattgaacgaagcaatcttataggttcgaaacggccgttttaagactttgaagtgaccatttttccaaggaaaactaaaccaaaatatatttttattcgaatattgaaaagtagggctataaaggctagacttggactcaacctcaacaaaaaacacatgtcttttgggtacttgtacagtttagaccacatgaaaataaaaaataataatttttttttcttgtttttaatgataaaacgtgtttccaatggtattcggggtcgctgatcacgaatataacatccattttggtcaatttcgaaccccggttccgaattcgacaaaagtcgaaaattccttttcagcaaaatccatctttaatgtccaaaatggattcaaatgcatggaat

SEQ ID NO: 14190 - DNA, 451 bp, Heterodera glycines
tcatggtgcaagatcagcttttccaccaacgatttgtccgcttctttcgggaaaatgcactgctcgtccagcaatgccaaaatgccggtgggctaaattttaatatttttttggggagcttcatttttcgactaaaagggattttcggtttcggctaattatcagccgcatatccgattaaacagaatacactctgaaaattcagtccgtcatccgcaccacaccttttcaatgagttcaatggtcggctgcaagtcgtgtccaaagtcgatgaattgccactcaatgccctccttttggtactcctcctgttccagcacaaacattgtgttgttgaacaactgttgcagcttctcattggtgtaactgaagtggaaaaacaatcattttggaaatcgtagaaatattctcaaaatagtaattgccaagcgattgagcttttcgaaaaata

SEQ ID NO: 14191 - DNA, 3602 bp, Heterodera glycines
agcaaagtccgacttggagcgcatttcgggcaccacaaatttggcatgcttctcatggtgcaagatcagcttttccaccaacgatttgtccgtcgctttcgggaaaatgcactgctcgtccagcaatgccaaaatgccggtgggctaaattttaatatttttttggggggagcttcatttttcgactaaaagggattttcggtttcggctaattatccgccgcatatccgattaaacagaatacactctgaaaattcagtccgtcatccgcaccacaccttttcaatgagttcaatggtcggctgcaagtcgtgtccaaagtcgatgaattgccactcaatgccctccttttggtactcctcctgttccagcacaaacattgtgttgttgaacaactgttgcagcttctcattggtgtaactgaagtgaaaaaacaatcattttggaaatcgtagaaatattctcaaaatagtaattgccaagcgattgagattttcgaaaaatatttatattatttttcgcctgtcgttccgataaatgccatgggaaaaataagaaatttgatgcgatttgttagcaaatttgtcataaaagttgaattttgtttggtctacaaaaagagaaatgagatggcctctaaaaccctcaacattcgccaatttatttgatttgtttttggctctccgcaaaacagcgcccaaaaacacgcacttaatgcacaactgctcaaagctgttcagcttgaagatctcgaagccggcaatgtccaggatgccaatgaacgaagtgccggtgcgccgcgagcggtccaacgatttgttgagtcggctgaccaaccatttgaacatccgttcgtaacatgctttgctgattgcctccacagcgaactcggcctgctccttgttctgcgccttttgcatgtactcacggccaacctttgcggaaataaaaagtgtgacttttgagactacctttttagcttgacacctatgattcattaaaatttcagatggccaaaattcatgaaaaaagcaatccaggtcaatcggtacatggtcatctccagaaaatccctctaaaaaatttttcacaaataaattttcacaaaaaaaaattcaaagttccatacaccaaacttccaaaaatcccgggacaatgtttcccacatcccaattcatacgcatgtccatgaagtgagccaagtcagcccatgccgattcacacaccttgagcttgggcctcaggaacgccttgctgaactcggccaccggcagcccgagcaaatggcaaatcttctgcgagactgcaaaatttgggtttgaaaaaattggaccaggacactggtaataatgatggcactcaccagtgtcgtcaggaagcgtggcctggtccgtgttcttctcctgcttgaactcaatgttgccgaacaacaacaccgcgctgaccatgcgaagaacggctgaaaaaaaggaaaatttaatttttaatgttttttggaattaaaaattttacaattaatttcctcgtcatggaagcccataatcttcattgagcgaacagtgttgtgaaattcggccgaatcgtccacattcggcaacgaaatgtaattgttgttcaaaaaggcgtaccggctgacgtcctccagcaaaaaattggctgaatttaattttatttcaaattagccaaattaaaattttttaaatttaatactaaaatgtttaaatttgcatgtttgtaaaaatcccaacaaaatcacacttttctcctcgggcgatgtgccgcgcaaaaattggtaaaaaatgtgaaaagagcgttcatccgtcgcctggcgacaagtgcgcgacttctccagcaaatagaattcaatgtttgcaccggaaatgtagccggacatgtcgaaattgatccgaatgaatttgccctgaaaatgtgaatggtaaaataataaatagacaatgaaaaaatgaatgcggtgaattcgtacaaatcgtgacgagttgtcattcttcactgttttgctgttcccaaatgcctccaggatggggttggcctgcagcaattgctgctccagctcgcccaccatgttgatgtggtcagccgaggaatgactctgaaattgacataaattaatggccgttgacattgatcaaagctcaatgattaaacccattaaattacgaccaaaatatgaattaaaaaggtatgacaaattcaggcatggcactttaatggtcgctttagcggaataaaaaaataaaaataaaattaagaataaccctggccggtgaagacaccgaatgtgtggaggacgagttgattttggcgttgcctgcgtgccgagtggcgcccgccacgtgcgcgaggtattgaatgacctttttggtgttctccgttttgcccgcgcccgactcgccggtgcacagaatggactggtcctcgtggtctaacaacatgaacacattgagaaatttgcaatatttgtttttgaattttgagactagcaaaaacattgaaaattggcggtgttaaaggaagaaaattttaataaattagctaatgtaagaaatttacgcataaaccaaatccccagaagtacgcaaacactcaaaaaaaagtaaaaatttcttaaaaaaatgaggaaaaggctttagatttttccattgggtaccccgaaattcttaagtttagggccgtcgttgcctttcccccgcctctcattggttaaggtaactaacattgttgagattgtattgtttgtattacaacaatttgtctcaaaaatgattaccctgcagcatcgaacggtatgcacagtcggcaatggcgaacacgtggggcggacgctcgtgccgcttcttgcccttgtacgcctcgatcagtgtttcggagtaaatgggcagtttcttgtacgggttgaccaccacacagaacagacccgaatatgtctaaaaaacaaacaaattttttatggcatttttctgcaatgaaattgcactttggcatcaatcaccgatttgaaactaattaacgcacataaatgagatcagagtaatagcgctgcttcaaattgtccaacacggaaggctcgttcagccatgtcaagtcggccatgtcctccacctgaaaaggcatttaaaattaatcccaaaaatgaattttctaaaaatgggtgtccaaaaaaggagtaccttgtcaaattttggcggattcatcttctcgcagtcgtccttgctcagcttggtctgttggccgttctcacacaactccaccgtgtacgtctcgctgtcgtcacgcaaaatgctggccttttggtgaaaaaaattttaattttggtgtcataaaaaataattataccttgacgaagccctctgtttcgtgaggcacccaaatcagccgtttgctggcccattcagcctaaaaacagcgttatgttaaaattcaaatattttttttggagatctgtttttccggtgtcaatttccgattaaaatgacagatgagtggaaatgtgactaacatgtaatgcggggtcggtgattgatgtgcgtttgaccattgaaaagctggaggtctgccggcgaagatgactgttgtgagaaagg

SEQ ID NO: 14192 - DNA, 954 bp, Heterodera glycines
caataaaactaaaaatatttatttttaaattggacaaaattatttatgcttttttttccctcgttaagcgagtgtaccgaatgcaggaattttattttgtaagctgtatattttcatatggagttatttaatcattttattattgaggtctatttatatccaaaatactataataaatattttttaataaattatttaaaagattttttatttttcttttatttcctttatagtcgtgaaacatttgagagtgtcccaaaattcggcaaaacggattatattttatgcataaacttgtgtaggaatgaaaggtctttaataattaaacaattaattattttgattttatccatttttattacttttttgtcttaactaaatattattattttcatttgatacaaaacttttttgattttttataatcatatttaaaattttgccatgttatgtgaaatatttttttatttgatatgacttttttcaatatatgcaataagcattcaaaaatgctatcagtttctcgaaaaataattcgttcaaatgagcatacaaattaataaggtgttagtataggataaatttttacaaaaaaaaagattaaatatgtaatatatttattaattatttttatataaaaaaatttaaattgaaattatattgttttaatataagtaaaaattaataccaattaattattcaaatattttttgttaagtctctttaattttttaagttttaattaatattgaggagcgattacttgtttaaatatcagccagaattggcacaaatgaaacatttaattcgaaagatcaacagacactcatagtgcctttggtttaatattttattcagtaatttaatttgtgaattcattcgttattgttgttattagcagttgtatagatgctcatgtagtcggtgcagttacttaatgttactgtttttgac

SEQ ID NO: 14193 - DNA, 2707 bp, Heterodera glycines
taatttttaaatttatctcattttatggaaaattccttacttttttggtaaactaaaatttataccaaacagggacctacctaaaatattaataaatgctttagcaaaaaatatattcttttttattttattttccgttaggtgttccttatttacgagaaggttttacttattcaaaattcagcctggattggcctaaatgaagcttttataaaagcatttatttgtttgtcttaaatatcattatttgcacaattaatttttaatagtaaaaaattatgaattccatattcaggcatactgtaaattttcgctaccaagttatttaccaattgtattggtggcacgtgtacttcgttcgagctctgcattatgattaaaaaaataattttcggttaattaatgtaattaatttcagaaatatataagcttttttacaaatattataataaaaagaaaaagattaaccttgttgttttattaaaatttttctttaatagataatggacaccacaattttgaaacatatttatgatggaataaaaaaagtgcattatttttattttttagtatcaatatatttttatttaaatctaaaatttgacaaaaaataaattttataatattatttagtattcgataaattttcttttatgtcattgaattcaaattattatttttttgcttttatattctattattttttattaaacgagagggccaccagagtccgccataacgtatgctgcattgaattcattcataaaattcataaattatcaaagtacaatgcacccattgcattaaaattacgtcatgcttttaaaatatttagtaatttaaataattaaataatttttataaatataatttttacgtagtatttattgttttatatactttactatttatcacttagattatgagaatagttttgttgagaatccattttaataattattttatttgtcttttggaatttttgtattttaataatttatttctgataattatttgtattatattacctagaaactgtattcgtgctgtaattcgaaagctattgtatttttgcgttttgtttaaataatttttttttcattttgaatttcttgttaaaaatattatatttttcactttgtctccatacttttattgatataaaatagttttttgtttttgttttttttgtttttaaatttgttattcaattgaagagtgggtcaaataattatttgaccatatacaaaaacactgttttaatactttatttattatatgattatatcaataaaaaataaataactttattttaaataaaataagtttataatttattatatttgaattacatttttatagttaataaatcagttctactcaagaattggttttaaagaataaatttttttattattgactttatctaaacgtatttgattattattgaaaacttatgttcgggtgatgaccccgagagagacattcaactcttttccccttccccacttctccacacaatcagtctctgtcccgactgcgaatcgggaagaggcggtccatccaattgtataatactcttgaataaatgattgttaacaacgccgctaccaaattgggaatgttaatggacccgcctggacccacaatattcaaaggcaagcaatggaagaagtttgggagtaaacggaaataaagagaactgcgacatatacgagaacgcaatttgctggcaatatttcgattgaactgatgaaaaaagagagaaaagtgataaattctttctaaaattgagtgttccaatatataaaattcatgttttcataagtaaaaaatatgctaatttaatttatgcttgtcatcttttcctctctttttggattttaaattcaaaacatttattttcgaatttttcaataaatattatgaagcttttggatagcatttccgttcagttaataattaatttattatcaaattcatggtgatttgtttattattgtgattctttttattcttttgcaattaaatttatttcatatttttttatacaattaaattaatttaattataattctcaagtctcgtgccaaaatacgaggtaggagagatgagaacaagacggtctaaaaacacaagattacgtgacacgagaacgagcaatatccctgctcacacgcaaaagataaacgaaaaacattaaattcgtatataattttaaaactgttttcaattatacttttttaaataaaaatttagtttatataaaaaaatccttaatttcatctatatttgttttgttgtcagaaatctagtcccttttcataaatattgtaagattgtagtaaaaacaacatttgaccaatttctaacgcttaaaatgtaaaattaaacagaattaactataataaatattttttcttattaaatatcaaatagtattatattatatacttcatatccaagaaatttttcactgaattaattatcttttgaacaatgaaaatataaacaatagcttatttaaattaaaaaatttcaagtttgaagaaacaaatttttcatcttttactgaaatatgattttttgataacgtaccgaaaaattaaaaaaaagatatcaaaataattttttaattaaacatatttaaataatttttatggcattaatacatgtttcactctttatgaagatattttttcaagaa

SEQ ID NO: 14194 - DNA, 2662 bp, Heterodera glycines
aggaaatcgacgaattcgacttaaaatgggtataattggctttgcaacggtgcccaaatggggaagcggcgatggtgccagcaattaaatggaagacagcgtaaatccgagtgccaatttgaacagtgtcacttttgatctgtgagtttcgataaatccattgggtgagcagcagcaatagcatttgattttgccgaaaaataaaatatttaattcattttaggccattgtcgccaccagcggaagaagaaaaagaagaagataaagcggatcaaagcaacggaaatgtcgtctgattaagtgtgcggaaatgaataattaattatatttgagaaatgatcgatctcaatttgttgtgcttattttctctcagaaatgcttttgttaattgtttcgttccaattatataaaaatatgcttttttgttgagcaatttattaataattagggtttgtaatagagaccggataagagggtcggtcgaacggtttcggttaaaaaaccgaaaaaaccgaagaaaaattttcggtataccgtttcggtttcggtttttttgaatttttttatcaactaatatatttttctagaatcttgcaggctattagagaacacttagacctattttgcggcgccaaaatgtcccgcgccaaagtgaccccgacccaaaaaattttggtagaaaaaaaataaaaacatgccgatgcacggtgggggtcggtttagtctggccggtttagtctggccgttttagtctggccgttttagtctggccggtttagtcagagggtcggtttagtcagagggtcgttttagtctggccgttttagtctggccggtttagtcagagggtcgttttagtctggcaagctgtttttgtcctacattgatccaattctgatttgtttctcgaaaattctttaaaattaacaccataacagattatcaatgtgttaacaacaaaaaaataacaaaacattgaaaaatgaatacgggcatatttaacaacgagaaaattgatgatattatcaggattaacattggcatggtaattttgatcattttggtgagcagggttaatgttgttgatggtattgtaaccctgtaagagtcgaagaattcgtatcaacggcacgatattttcgcgttttttgaggagggacttcaccagcgatgcatcgtgcgatgtctgcatcaattgacttttctcatatcgaattgtgttgatgaagcggaaaacagttggatataaacaagcaaaagcccgttgaatgaaaaaaaaattagggtttactttgcctgaagctataaaaaggcggtgccaaactgaaggtttcgctttgtttttattttctaattgggatattcatttatattgtagctaaacatagatattttaagtttttccttatttataattgacaaaaaacatttgtaagaattatgggcgaaaacggcttgccagactaaaacgaccctctgactaaaccggccagactaaaacggccagactaaaccggccagactaaactgacccagtccgagagaaaagcaaaaaaaaatatcgttgtgtcttacttcccaatttaacacactattttttcaattttatttctctgcccacgacatttagtgaatataaaaggacagagagtaatttttaattgcaaatttcgcttatttaagtcggaattttatgcgacttccattcattctgtgcttttaaaaattccgtcattttatcctcgttttgacgttcctttattaaatcttgtttttatatatattttttcttcttttacaagccaaatccatccaaagtttttgccggatctttgacaaaatattcccattgttctgtgtggcctaagaatggtgtgctttggaccgaaggtgtgaatccattaaacattttaattatattgtgcgaaatgtttatgtaccttataggcaactccaatcgtcgcagtgatcggctttgtgctcgacattgctattgcaattttcttagtctattatcaggagttaatccccgccttggtaaaagtgatcattcatcaatttacataaatttaagtgacccattgttactaatttagccttttttgatcatcgcttttggctatttggtggtcgtttttggacacattgagcgcaactgttcactgttcctgccttttctcgccttaaaagtgggcttaccgaagcgaaaaaacacatcgaaaagccttaattttaatttcattttagcctcttggtctgatcgttggtgttttgctgtttattatgtctctgtgcttgattatctttataaacatggcgaagaacatcgaaaagcaaccgttctcgccccgcgaatcgccgttccttacttaccttattgatcgcggtagtaatttttatctgatcatctccattacatatttgtttttttatcagtgccttatgtgattatcttcgtgattgtgatggggctcagcactgcgttgcacgcctggttctactccatcattttccgtgcttacgttttggtcaaggagaagtcggctcaggacaatgccaattcggagggttacgacgatgttgctgctggtcccacctgttgctgcgggccgttccgtgcaagaattgagacggtgtttaatgctttcatcaatttttatta

SEQ ID NO: 14195 - DNA, 957 bp, Heterodera glycines
catcgaggaccaattgagtgcactgtcttggtgcacgtctcagcgcgcaggccaaccctatttaccaagacgtgctccggacagacgtttggatggacattttcccatcgtttgaccatgcccaactcggcctcaaattggcacttctttcgccacgtttcaatgcgttggtggacaaacatttcaacggcaaaagcgaattgacaatttggaaaacaatcgaaattcgcaaggacaaaggaccagaaccgaaactttatgtaaagatggatgacaaatttgtgccatttccattgccagacgatcgtccgttgcccagcaaaatccgttttaagcgccttcagattgagtaattcaaattcagagagctatgacaataaaagcattcattccatttttaggtacatcgatcactcagtcattgcttttcttcgttccaatcagcaaattttcgacaaaagagacaccaatttagacttgtggattccatcaccacacaccacggatggccagccaatttgggatgtttttgttcgtgaaatttggcccattttttcgacaaacattcaccatttgggcttttcccatgatgatcatttggaccatttgcttcgtcgcacttcgccgacaattttcactgatctcaatcagttggtttcaatcaattccgttgatttgttgtctgatgcatctgaattccatctccaaaaatttggaaaatcggaattctgtgccatctctctggcgtggtcccacattttcgtcaaatcactttttgtttagcattttcttcgtgccaatgccatttcttacgtcagttacgaaattcatttttatgttcatgggctgtcaacgcaaattgtgccatttgaattggtgaacgaatggacaaatgaaaagctgacattggccaaagccaagaaaacggacgattggataatgaaacgatgcaaaatt

SEQ ID NO: 14196 - DNA, 824 bp, Heterodera glycines
gcagtgatgacttttagttcattttccgtgttcttaaacaaatttgagcaaaagagtgcaattggaaaaatttgaattttcgatgtttggttcgaattcgggtccggggttcggaattgggcgaatcggatactggattcgtgatcagcgacctcgaaaacccccccagcaccagctttactattaccgttttttctcttagggctatcgagtgataccaataatttttaataagaaaaagctatggtgcattaaagttgcaaaaaaaagcttatggtcgtgtgaaccgcaatagagtccaattttttgccatttttatgcgtccgatttatttaccgaaattgagaggtttttcttcataaaatgcacttgatcactgatgaattatgatcggtcggtcattcttaattaatacatttcttctgcggttgatcactgtttttgttgttttgtccatcactcattttgtcagcagaaaacggcccttttgtgatgctttgtcccgtttcttctgccggtggcggagacaatggccttaattaagcgcaatttgaattatctaagcacttttttttaattgctcacccaatgcaattattggcgctattataaagccaaatgaacacagtgttacaattgttgtcccaatttccgtctttccaatgaaccgctgccgtctccccaattttgcatcgtttcattatccacctgttgtcctcaaatccgtttttgattgctttggtcaatgtcagcttttcctttgtccattcgtttaccaattcaaacggcaccatttgcattgacgacacatgaacataaaaatg

SEQ ID NO: 14197 - DNA, 985 bp, Heterodera glycines
  unsure (1)..(985): unsure at all n locations
ctctccaataaaacattccaagcaaaatttgatgattttcttctaaggtaaacccccagcaaaatcacaggccgtagagccaaagaatgaaattttgagggcgacggggaggaatctccagcagaagagaggaggaggaggaggagagaccggttctgtttatttatggctttgttggacacttttcaaacagagcaaaaaaatttcaaagaaacttttttcgaacattttttccaaaaggataaataaaaaatggaagaaaaattaattaaaaaacaatttgttaaaaccaatccctggctttgaatgcctctacgaaaattcagaaccctaaattaataaattcattcatttatgtttgttactttaaggaatttttgggcattaaaacaccctccaaatatgtcggcatttttaggattttataatttataaaaaaatattattttattcgcttgccaaccctaatgcattaaagtcccatttatttttcttaattatttattttttgaaggtcattgcgatatttcgcgactttttatctaaggaatttttcactgttcgaaagaaaaagagatggaaatatatttttaataaattaattataattaattaattattcccaattttgacaaaagccaaatttccttctgatggactgcccttttgaaggtcgttgctaattgaagaatcatatttatttaattgatcacgggtttggcgatttttgacaaaaacgacaaaacaaagcaataatattaattgttattattatatcgccgcacttaataattaacgctttaattggactggtttaaacgtcaaatgcccacaacatcaacagacgcctgtcaacaacggttatttgcatctcgaattattcgacaaaatttaatttctgtcaataataacaataattataattatgataatggacgggacgacgcccactcngcaaaaaagtttgttggtgccaaaataaact

SEQ ID NO: 14198 - DNA, 1446 bp, Heterodera glycines
  unsure (1)..(1446): unsure at all n locations
gaaggagattaccactcgtggaactcctttcaaacgtgccttgccataaacatacgcaacattttttcatggtaaatattttaatcaacagaatgcaattgcaattaaaaacctgaaacaagtgtcatagtatcattttcgttgaattgtttcaacttaggctactgcattttttaaaactttggttgcagtatactgtattcctttttctttttttgttactgtatttttagtttacaaaggggctacagaaagagtccgtcgccccctcggaacatcgtttttcaatacgtcggcacaactgaggtaacatttaaacgtttttaattgcttatttttgtgtaaaaaaaatatttttgttccgccccattttcttccgctgaaggtcgaactttcgtgggtcgagccaaaatttaatgcgcatttggtggaccattatttgatttatttgtacgagacgacaaacaatgggcacattgaccgcgagacgaaaattcgaattggggcgatgggcaaaagtgcacggctgaccttgttggagccgggaacaagtccatcaatcatttttaataacaaaactgttaaataagatcaaatggcggaggagcaagggatgaaattaaacaccaaaaaatggacaaattcgttgctggcatatgccgcttaacattttgtgtcaatattcaatttaaagccttcttttacacaatacggagatagatcgtctgaatgaattttctgcacaatattaattttaaaaaattactataattctttttgaatacattaaaggcaaaaataagtttatcccccccccccaaattggtcttttttgtaattaaaagtactctctgtaacttcgaggatcaaccacttgcagtgttcgttcactttagggtatgccgcacgaatcatagcactcgctgaatcggacgatgatgaggacagcgaagacggagaaagcggggcacggtcacttcccacggaagcgcattttaaagtgataaagttaattggcaacaatgattgagtggattagttaatagaaaacagcataaagaaaaataaataaaatatgctaatgagagtaaataggcaatttaagagtctgaagataacttctcagttttagttccaaaccttggtttccaactctcgaatatctaatctcggtaaattcaagaacaaaattcagaccaatggaatgccaccgcaaacgacggcgtacaaagagcaagtgcaagtgccgccaggcgcacattcagttttaatcgcttgcacaattcgaattangtataccaaattagntatatcgcaatcaaaaagcttggttaaatttaaaagcgcgtgcctcccggactgaggaaaccgcaattcgggtgggagcacaaaacngnacgaaatgggggggacgattttatgcaaaaacaaaaaaaccnaggcaaa

SEQ ID NO: 14199 - DNA, 2017 bp, Heterodera glycines
caaaaatatgaacataaaatggcaaaaatatggacataaaatgcaaaaatatggacataaaatggcaaaaatatggacataaaattttcaaattgagggtgtaatttctcaaaatttcttcaaattcgctaaatgtaaggtaaaaatttcaaaaatggccaaatatggtattaaaaatcatttagatgaaaaaaacaatgatagagctaaaatttactcatatttagacgaaaaatcaacccaaaagccaaattttcgcttttttgcttatttttgacataaattaaccatttttaagaaaatttaaatttattcaatattttcaagaaaattttgctaaaaaatgattttttgggaatttttccaatctttaggggtcaaaaaggtcaatttaactgatggggcggttctaatagaggttttctggaaaaatgccaaaatatggacataaaatatggataaaaatgccaaaatatggacataaaatatggatcataatgccaaaatatggacataaatcgcgaaatatggaaaaatatggaaaatatggatatagaaatccatcctagaagcttcaaaccaaactaaaacatgtttttcatgcgtttcaggccccccacagtccaggaaaaaaatatggatttccatataattggaagccctgcttatcacatcttttttgaaatttattttttatttttgaaaaaattcataaagacgtgcatctaggggttttcggagtcgttgatcacgaatttgaccctcatttcgtgcaattccgaatcccggacccaaaatcgaacaaaaactcgaacgttgaaattttcgaatttttcttttttcgtctaaaaatgggaattttcggaaaaattcttaacaaaaatgaaacttacacccctaagaatcgacccaaaaatttttcagaaaatacacccctaagaattgaaaaaatttccacaaaaattgatccccaaaattcaattatttttcttaataaaaatttttggtttaaaaaatgtcattattcgacaaaactttaaaacaattgaaatataagcacaattaagttttttgattaaatttttacgtgctttgctacattaaaaagcgtttaataaagttcggggatttttgtgtctttttaggtgcctatttcgcgattttttgtgcctaaaaatggaagccctattaattaaatttaaagaagttgtttataaaaaaaaaaatttaaattaatttttcttttttctttttcatcgtccgctgacatcgaataaataaaaattagaaaaataaaatacatttttttctttgcgaatttacatatgtatttattggagttattaacgtgtcatttcccgaagaaattacatgacgcctgaacaaaatcaatagaattttaatgtaaaatttttttttttcgttttgattatgaataaaattattattattagtagggattccatttttatgtaaatacatatttttttcctggattctccatagcttaattagtaggaaaaacactttcttttttgtgttgcgaacaaaaattgggacttttatttacatatttcggggtttttctacatattacatatgtacatatttttatacatattttggactttttgaggttttttgaggaaaatttttagatgccccaaaaaaaagtccaaaattttgcaatttttttttgatattttgaaaatttagaaaaacatcttctaaaaaacaaaaaaaatattttttttgaaagtgtactccaaaaatcggttttttcccaaaaatgagatatcaaaaattaatttttaaaatgctaaaaggtgattctaagacaattttggtcatttttatggcattttgtgcctatttcactttttacgaagaattttttccaaaaaataaccatataaaaaattttatttacatattttagtacatattttggggtttttgtacatatttcatacatattttagcattttttatacatattttatttacatatttcgcg

SEQ ID NO: 14200 - DNA, 1553 bp, Heterodera glycines
aaaaaccctaaaacggctgaagagagtattaaaagactgtattaaaagaaaaaaaagtgaaataagctaaattactattaatttttctcgaaaacaacctaaaaaatgagcaagatatttgaatttcggcgacccaaaacagaagatattttctaaaaatcccttccattcttcagctttccaattacaattttatttcttcaaaatgtctttctcacatggcgcttgcggaaactgtggcgaacatggccaccggcgtgcggaatgcccgcaagcagtttgtgagtgctgtggccaggccggccactgggtgcagcagtgcaaaatcgaggctgcagccaaatgttgcgttgcatgttctgtccgccagcacaaggcggcggaatgttgggtattggaatcttggggtaattattaatcccgcttaaacaaagcccattgctataattattttttttagtccgctcgcggatccgagaaccagactgctgtttgttggaaaattttgtggtgcggcgcgctgctgagactgcagacggattttgcgtcctttgtttccaggtttttttcgctttaaaatgttcatttgccaaaagatactttatcttttaatgaatcattaatttaagaacgaacacgtggccgaaaaatgcccgcaaaaagattcgctggggccgctctacgctcaaatttgcgggtcgcacaaaaactcggcggttttgcgagaatggggtgagttggaaattgtttaaaaataccgtaaaacctcaattacaaccccatggggctctattgtttatatttaacccttttgtaattcgtctgtgggcacgagaagaagaactgcagtcagcaccgtctcagactgcagttcgagcagattcgggccctcttcggcaacttgcaacgccggacaaacgccaaaacgacggattcgacggcaagccctttttgggcgtcgtggtcggggcggcgtagtgacgacatccgtcgccaccgctacatgcctatcgggaaggaaaacaggtttttttttttgcataaaagtattagaaaaatccaatggtttacagagggagcaagacgaaggcggaggctgcagcagaaggcgattttggacagaatgctgcgaaaacgcgggggccacaaaagttagtggtttttggtcggttccaacgcgggtgggtggggagcaggaaaaaacgtcgccgccgaggtactaattcggccgatataatgctgagggttcggaaaatcacaatgtctttcatgttcgggtggaggattgatgggtgtgcctccaggcacagattggacaggcacgatggaatgccacactaacttatgcccaactcaacagcaccaccgaagatcagaagaaacgcttcagaatttggcatttttctacaaaatgctgagagaaaaaaagtaattaaaattaattattattaaaaatatttaatggaaattaaagacaaaatggaaatatacaatacgaagataactactggaggtccaaaatagcgcaaaaaaagcttagcgcggaaaagtaa

SEQ ID NO: 14201 - DNA, 3407 bp, Heterodera glycines
  unsure (1)..(3407): unsure at all n locations
aatcccgaacccaaattccaaactaaattaggaaaaaataccgccctttcgatctttttttgcatcccaaattagggttcatcttcgatccaatgcggggaattacgaaggtcgtctctattagaaatttggttatgttttctcgaattttataaaaatccctgacgaggctaatgcttctccccgacattttttttaaatttctccagccatccctgacacaacattttgtctgggatttcctctccgacccccgacttttctctccccgagttcggggaccaaccctaatcccaatatggagtgtgatttggtcaaatgtattcaattcatggtcacgatcacgaaacccnncggtttttatctgatattataatcangcatttctttcatggctattggtgctgtcggacacattacacctgatcactatgtggntggtagcagcatttatagtgatggatcaaagcataaatttatatttttttgccnttcactgaaaattttctttaaagaatttaaaaattttgaaaattcccaattccttaattggaacgggaaaatcgcccccaaatcagtgggaaaaacccccgtggaattttaaaaatttaaacccaaattttaaaaaaattttaaaaattttttagaaaatttgggaaaaaatttaaaaatttcggttttttttgaatttaaaaaaaaaaaattttttaaaatcccctttttttaaatttttaaaaaaaaaataaaaattttttaaaaaaaaagagaaaaaaatttaaatttaggggggttttccccgttttttccttttttttttggggttttgtgggcccaaaatttttttttttttattatttgttgggggggggaaaaaaaatggggggagaaaaatttttttttttttttttttttaaaaaaaaaaaaaaaaaaaaaaaaaatttttttaaaatattttttttttttttttattttttccaaaaaacccgggtgtttgaaaaccccccatttttttttttttaaatatttttaaaggcccctttcccaccctttttattttccccccccaaaaaaggaaaaatttaaaaatttcgggcaaaaattcattggatttttttgtttttaaacttatttatggttttttcaccccccatctccaccgccaagtttgtccaaagatccggcacttagcaattgccctcaaattttttggcaattttgtttgttttaatattccattccaacaagaagcagttttttgtacatcctcataaaattgttccccaaactgtccaatttatgttcaacaggatctcgaaagcctacaggtgggtggtggacaaattattatttgttaaacttaatgactcagccgatcaatggatttctacattttcaaaatgctttactcgactgatggtgaggaaggaaaggtattcggacaatcgctcagtggtcaatccgtcggtaaaaatttttttcagacaattgataaaaatattttagaatgacattataaggaaatactttattaaaaaaatcttccaaggattttttcatcttttttagctactcaatacttttttatttaaatatttcttaagatttaccagacaaaataattattgcgctgagagatttaccattgatggattgtccgggagccaaggaaatttaagaggggggggggggggtcaaactgctccctcccgacgttgattcccctgtgttgcacaccttttttgcttgtcgaattgcttcttcgaattgctttttctgttccttgttcagaaatccaatggaaaagcgatcggcgctttgttcggccaaattgagtatttccgccacttcctcttcttcaacgaccaattgtggcattaaattgccaatttgttgcagcagattttgtgcttgtttctgtttgctccgcaattccaattcgcttgtcagtgctccgccgttttgaacgcgtaatttggtgatttgtttaatggtgtcacttaattttgtgccatattcttgcacatctgcttcggttgcggcactaatgtcaagaattgtgggcaatttgagacgacgaagcacacgacgagcggctggcaacggatgctccaccgttgggtcgtcactttcgccatcactttcatcttcatcgaaagaacaattgtttctgttgtccctgccattgtcctccccatgttgttgttcaacttcgtcgggatttgggatttgttgttggatggccaatacttggagaattgcttcgcccatttgtgcgcaaagccggccaactttctcaacttcattgtgatgatgagcaagcaacatttggcaaatatcggtgatttgtctgttaaagatttccatctcagattgatcttcgtcgtcatcgtcgtttttgtcgccctggccttcgtttctgcaattttaaagaaataatgcaatttttgagtcactcaattaaattcatcaatttttaaaggagatttttgtcatttcatttaagaagtggttatttgaaaaaattttgttttaataccattagggggcgctgtctttaaatattactggcgactaaaaaaaggttaaaaaaaactatgggtaattaattttaaagaaacaatcggatggtatcgggaacagaacacaggtacaaataataataatgataataataataataaattaataatattaatatcacttggcctgtgagttagttgagttggtcagtttgtagtacagaagatatgcgcttttgctctgaaaaagataaacaaaatcttcaaaatgattccctaatgaatggggagaaattctcactgtgggcgacggggcggcacacggaatgcatgactcatcgttaaatctcagccattgctgatcagtgcttgtcagattaaccacaaccgatgtgtaatggcctctgtccaaactgccgctatgcttcttaaaggcattaaagcaattagcgtaattaggacatttttagccatttgatcaccgtcatggcatagagagtaaatgccgtgttgggaagcagagacttttcgtgaatatatggcgacaaatccaactcattcatatcgaaagtcacttgagcctattttacaataaaatttaaatcgcaaaatgcgacgcccgacggaaagcgacctcatttttgacaaagttgccatcattatgcgaaaatctcttcaaatggacgatcagaatttcggggatcttccaaatttttgtgctccgagtcgccggctgtttgcttttgcaatttgggcaatcccatttatcatcgagattataaaagggaaaataaattagcataattaggaacctttgcaaaattcagctgcttactgtagatgaaaaatatgcctcgagacagtctttgagcttcaggcagtcaaaat

SEQ ID NO: 14202 - DNA, 1062 bp, Heterodera glycines
gaaagcttggggttgaattgcattgaaattgccaagacaaaatatgatcaatcagagcggagaatgatccgctaatggttcccttcgttccatgcggaattgtttgtgcaaaaagcaaaacgatttttattgtaattcgtaattaattgccccgacttacctattaacgaatggctgagcactcttttgccgaaacagttgagaaaagccaggcgtatggaaaagcggctgaagaatggcattgataaagcacgtgttgcccaagttgatgagaccggtctgaccaagtggctaaaatatgaaattgaagcctaagaaattttctcaacaagatgccccaaaaatgtacccttttcttccgcttcgattcgttgccaattctctgcgcagtcttttcgtacgcactgaggaagtaattgccggtgccattgtcagtcctaaaagagttgaacaaatgacgcattgttaaacatcaaaaattgtgccaataacagacagatgatgggctgctgcttgtcggcatgggacaaatggcgacggcatcgtcggctcttccgtctcgttcgacctttgcaaaatgaattacaaaaaaaagttgttgtaaagaatataagaattgtattctcagtataattgtgttaaattctgtagtttaaaaattatttcggccaaaaagaacttttgttatgatttaaaattaaagatgactcgttattagcagggcattaattaccgttcgaagccttgcccgactctgtttgttccgtcaaactcagcttctttttccgtgacgccatttccatgctaatttgaaacggatttttttattttgataaatcaaatttttttgtgattttttctactttaaggaacatattccattattgtcaatttaccggctttgaagcagcggtcaggaattgcgttggaccgtccgccttttgtacggtttcttgcattacggtaacattttgcttgaacaaattgaatttaagcattggataagaattattcaaaaatatagatgagcgcaacaacagcttctcatatattggcaaagaa

SEQ ID NO: 14203 - DNA, 1133 bp, Heterodera glycines
  unsure (1)..(1133): unsure at all n locations
ttggccagcaaacaaatcattttcacgaagaacggcgtcagattgaagagtgggccaaacataattaacagaaaattcaatttgaaaaaagtggaatggtaagccaaaaatttccgtatgcaatattaattaggtaaaattggtttttgtgttttccatagtttataaactaattgtacacaaaaatattaaaattaaatttagctgaatccactcattacgtccattcaactgatgatgacctctacccggcggtgtccttgttcaaccctggcgacgaaatagaggcaaattttgggccatttttccaatttaacattttcgaggaattatctcaatgaatttgttttgcttttggtttataatctgattatacaatatttcaaatcagggaaaatacaatataaaaggaggaagaaattaattttttttaaaacttttatagttgctagtagaaaaatttctaattaattacattattaggtatccattgaaatctagaagtctgtagatttttatacaattaaattctgggcgaaagataacatataaaaaattgttcttaaatatactctaaagtcattgattggacgcgtaaactgcagcagtagagctgttgctttattctctaaccaatctctcaagaatcgcaaaatactcccattttcgccattaatccatttgctcatcatttatcccattcatttgaccaatgaccttcttattaatatcaactctattagaatatttctcattctgatattctcacttgtgttgaaaggaaataaaacgagaaagaatattcctttttaaaatgccttataaatagagtgttcagtttttagcacaaaaaatcacctattaagcagtgtaaaaagcaccaaattttctcaaaaaaagcgtgaaaaaagcaccaaaatgtcaaatcagcacaaaaatcatgaaaaaattggacttagaagcctcaaaccaagtttanatgcgtttttcatgcttattatcacacccaaagttagcaaaagatttcagcatatgcagcaaaatgaacactctacttataaatttataagatataatttatatcattctatatcgatactgctcttcatgtcatttggggggggggggggggg

SEQ ID NO: 14204 - DNA, 2489 bp, Heterodera glycines
gaaacgcaaaaagaccacagaggcagttacataatgattgatctaatttttccccaagatatttcatacgaaattccaaaatctgatacttttctcgcatggaaataaaattggattgcaataaagcaaatttttaaattaaatttaagcaaaataaatgaaatgaatttctacaaactggcatttatttttatatttttttcaggaataaaattgccatcaaaaacctttgctgcgcatgttaatggcacgttctttgactttcgcttttctatgaatgttaaatgtgacataaatatctaatttatatggctaatatttttagttttttgcctatttttttcctgactcctttggtctgaacgacaaaaacattttttttttgttaagctacttttcgagttattagcactattttctggttttttatttttagcacctaaaacttaaaattattttcaactattttggagttttgcccaaatttgttaacaaaaatgcaaaaaaacgaaagataatgaatttctcaaaaattcatctcctgatttatttatttattttcttgaaaagatttttggttttaaaaattatacacctcaatactaatttggcttatgtttgttactttttgaataaaattttacgtttttaaccctaaatttgaacgtttttagcaactttttcctatttttagcaaaatatttttgggggtttttagaacctaaaaactaacaattttggcagtttttagcaactataaataaagtagagaccggcaggctccacttcgtttaggtgctggcgtttgggcgctcgcgtttcggcgccagcatgtttttggctattgttctttgtcatccaaatccaacattgttgaaaacattcgaaagcttaacatgtttagaagctttttctaagctattgcttcacgattagacaagatttatcaatcggttatttttggtcttgtatcgaaaaaacgatcgaaccccttatctgatctctactaagtacgccgtcgtatttccaaaaaacgcctctataatgtcaaaaaatttgtaactatgaaatctaaaataaacaattttattgaaaatttaatttttttttttttttgctttggcatttagcctaaactgcagggcttaacagacatatttcctctacttttccagaaacaaaccttttaactgctgaaactgaattgcatgggaaaatggatgaaattggtggaagaaaaacgaatgaatttcttaggaaaattagccaattccgtgacgtaatgaataaaatgaatggaacaacaaaggatataattcgtgggagtgttgcattatatttacttagtagcttagtacgtttttttatttttattaatttagtaatttaaaattttcgctaaaaattctgcagacaaagaccaaattggctcagcgaatagtggacggaccgacgagttttacgaaaagccaaatggttatgcaaagatacgagagtctcgactcatcggtttaaaaggcccaaatttggcgatgtttcattttcaggctgtacaaatgcgcgtgcaaaatctatcggattgtaagaatgaactcatatttttcatgccaatggatctaattgttgttttggacggagaggaaaaaggtgtaaaaaagaaaagattttggaaaaggaacacaggaccaaatttttgtattaaaaataggaaaaataaaaaataaataaaataaaatttagatatataattgagcattattttcatcataaaataaataccaatttttttaggttttcgcattgttcgaatttgttttgtaattcctccagataatctcggagttacatattttgaagtgaaaattatcaaattacaaagagaaaatgggtgagttaacagttactaagaataatatattattaatagggcgaggatttctagttttttaactatttttttctgcggctttattttgatgagaaatgcacgaaaaacacattctttttcaaaaaattttcgtttttagtgccactattcatcattaaaaaaaattattttggaagttggccactaaaataattatttgtcactattggcgtttcgtcattatttttgccactattttggcattttttggaaaatttcccaaaaaatgcaataaagacgaaaaattcacccctaagaatctacctaaaaattttcaaaaatacacccctaagaattggaaaattttcacaaaaattcttcccccaaatttttttttcttgttcatgctaagaaaatattttgtaactgcaatcagtgaaaaagttgtttgccttaattttaaattattttcaaattaaaaaacagctatttaaaaaattacacccctaaatttggaactttttcgcctccatttttgtcactattttgccatttttttgtcactatttagttaattatttaggggttttttgccactaaaaatcctcgccctagccataac

SEQ ID NO: 14205 - DNA, 2002 bp, Heterodera glycines
aattcaggacatagaacactaaaatccctcacaagagctcaaaattcagattattgcaaaacaaggggtctgcagccaattttccaattttgcgaaggggtctccggccatgtaaattaatgtaaatcaatgacctttttttgctttcaacaccgctttttacgcggcacgttttttccaagacttttgggggacaaggagggccggcggtgccgataggcgccgccgggaaaaattttgtaatttttaatgcgatttgttaacaggatttgtaaaaaaaatgaccaattgattaagttttgggtttttaggatgcttaacatgaaagaaaaaagttggaatattttttaaaattaaaattttaattaaaataatggtaaagaaaatgtgaggaatattctatccaagtggggaattgaacccaggcgaaaaattatgaaaggtagaaagtttaaccactacaccacatgtgcatgtgtgtaatcccatgactaaatgaaataaaatttaattttttctcaaaaatttctccttcttcaccaatttcctactcttttctcgaccagacccccattcttaccagtgcaaatttttaccggcggtaccggtactagacaaaccggtaacggtaatttaatttttgaaaaaaccggtaccggtaccggtaccaaaaaaaccggtaattaccggccagtaccggtaccggtaccgctcaaccctaaaaataatccccccttctccattttccccccgtatctaataagccccccgtttctgaggaggttgaaaaataatccccccggggggataaaaagagcaaatgcggtatgtattatcttcattttttatgagtaaattttataggtaaaaaacatttacttcactctacaaaactttttttccgccttaagataattacgtgattttaaacttcgtttaccgcgttttgccccttccttctgaaattcgccgtctctaatacacatttatttgtgcatttgatgatgaccaacaattcatcagctccctataactattcttacatcttcaagtacattatcatcggtgatatgggcgtaggaaagtgcgtgtgatcttaaacttgttactccaacttcgtcccattttcagatcatgtctcctgcaccaattcactgagaagaaatgtttgttttagtcgttgatatttgtttgtaattttttataaaatgcaatgagtccctttgtttcatcgcttctccgcccattttccctctaagtcatggccgattgccctcacacaattggcgtcgagttcggaacgcgcattattgaagtaaacggccagaaagtcaaactgcaaatttggtgcgagtaaaccccagcgtacaatgaatgcgaaattgcatttcagggacacagccggacaggaaagatttcgcgcggtcacacgttcgtactaccgcggcgctgctggggctctgatggttgactaaatacaaatgaatgcgttttgtaatcattcaacaacaaataggtctacgacataacgagacggtccacctacatccatttgagcagttggctaagcgacgccaaaactctgaccaacccaaatacggtaagagaatgagcagtgacacaatgggccaataaaatagccgaaactctcacaaattaccatccgtttctgtttaggttatttttctgattggaaataagtccgacatggacgcgcagagagacgtcacttacgaagaggcgaaagcatttgcagaagagaacggactcactttcttagaatgttccgcgaaaacgtaaattttgatgcgttaatttaacagaagtctgctatggtttatggtccattgtacctgtatatgaattttttcggaaaattcatttttctaaaatactttttaaatccaaactatacggtgaggagctttagtcattggctcattagagaaaaaatagaaattgtaatttaataaaacgtgtttctataagcaataatttttgt

SEQ ID NO: 14206 - DNA, 1778 bp, Heterodera glycines
  unsure (1)..(1778): unsure at all n locations
ttagaggcgaaaatgttgaggacgcctttttggaaacggcgagacgaatttaccaaaacattatggacggaaggttgcctcattttcccagtttggagtatacggaatatttctgtcttaacagtttggatctgaattctgctgacagcggcgttcagtcgaaaggcgcagtgacaggcggcagagggacgcaccaaccgaacgcgggggaggggcgcgagacgaagaaatgtctgagctgttgaggggggacggaggggcggccaccgaacgacaaacgcacaaaagagggacggacgcactttcgcctaccaatcccatttggtcaatttttattggatcaatgcatattcttacaaagacaaaagtccacctgtaatataccataagtgtgcaaagggttcatggacaacattttcggaaaatgaaaaacactcaaagctttaagaaatcggcaaatttaattcaaaaattgtccagtgccttttacacagctggggacacccactctcattttcatgttcgttgtgttacctttttctaatcattctaaattcaaatatcttttttttaaattttgtacctaaatttcttaataaatttatttaaaaaacctatggattttccttggtggtgcttgtcgaatttcctaagaattttaccactaattaaaggccagaagatgacctcttcaaagcacactgacaatctacattgtctaatatttacattattattaaagcattctaaaaataaataaattttccaaaattattgcttcctttcgacggattgtaaaatgattccattccggtcaattaagcggttagtgaattttcccggggatttcgttaattcggaatatgtcgctgtgtttctctctgaatttgtccttttgttggtgcttgttaattctgtccattccttcacagaatctttatttactatatttatcagttaattattggaattgtaattccttttttccttggcctaacaaaagtaaggagcatttggcctgggagaaagacactattaactattagcacttatgttatcgcctctatcaattaattatcctaaatcattttgtaacgtttgcattgttaaaacaaatgtattttattacttatcattgtattcctcgtttattaacacaaatagcaaagcattcgattgataaaaattgggccatcagataaataaaatttaaattgatttaaataaaattcattgaaaagttaattggaaagaaaaattacctaaaaatgtttttaaaacggtaataacttctcgacgtttctctattggctcataatttgtacaacattttctattattccactcccaaataagcaattcgttattatgtccaatattcgttcaatttcgacgccaaatgcgcccgcggcgattgggccttacaggttggccaaatgggggaggggagggcgaggcctttgttgttttgtttgctcagtcaagccgtgctcgcccataacacattgtatgtgagtggccaacttgggcttgtgccggggaagtccgaattggtggcgggaggggtcgaaaacgaagcgcgacaggcgatgaccaatttgggtgccattctaagcgctgccggcacatcatttggcaacggttggcacttttagaagccaagagaaaggcacacccgattcagtggtcaaagtcaacgttttgctggccaacatcgacgacttccaaacggtcaggggaggtgtacaaatcctttttcagncggggacactttcccc

SEQ ID NO: 14207 - DNA, 3004 bp, Heterodera glycines
tgtccgatatattagttaagaattttgtcagtaatgtcttatttaattgttctcctaacgatagtcggtcaactcagtggagaaagggttactattctttctgatacacaactttttgacgacaagtatctcactatgacaaagagttcggtcaatgaaagacagttcggattcgatcgctcgagattatgtacgataaataggaatctgatttcagggtggagcctatcaatccaagaaattaattcaatagaaaagagcggaccagctaatgttaagcgttaccaggattttcgacaattaaagccccgagcgtgtttttattacaacgatcatagttatttaattttccaaaacgaaaatacaaatgaaacttcgataacaagagggagtcaagaaaaggttgttaggaattttcccggtggggaccttagatttgatcatattgatggtcgactttttgtaatcagagacgatcgaatagacgagattgacattagatcaatcgagaatttatggacacatcataatggcaccgaaattattactaaaccgatcggatctatgccatcatcatttaccgatttcctaataattgagggacaaatttatctgattaaggaaaagaaaatatacaaagatcgatttgactcaaacgagatacttcccaaatatgtggcagacacaaatagtgaattctttaattttgtcatgttcaaagaatttgagaaaattaaagtttcaaatcctaatatttgggtatattttttgtcaattgtcgatttggtagtggtcatcatctgtatttcagttctcagaattttaaaaataaagagaaagggtaaaaattcatcatacggcggtgaggtaacggtatataaggatttgcaacgaatatgaaaatgcctactggtgctcaaaatgaattctctcattgaaattctatgcgattttaacgaatgcgaacctcacgaattatcagaaattctacgacagcggaagaaacaaaatttgaaatttttgagaagacacgccctaataacgagacaccttaggcacaatcagtttatctcaccggatgacatcgcatttagaggttccaataggctttttgcctaccgaggtttcctcggggttactgtcgaacagcatctctactcgagacaccgtgtcaagctacaattccctcaactcccatgtataactatgtaccagaataacggtcatagatgctattttccccttgaacttttggattttttataaaaatattacggctaacagcagtgggccttcacgttagaccgttccacccccgctagtcctaatatcatttaatttttattcaactttatttaacaaaaaacaaaaataaaatacaaaattaacaaaatccaaatggcatcacattaagctcctcatcgatgatacccttctgacagaccggcctgtacattttatgcttctccctcgtcaccactttcgaatcccttgtcggcctaaatattgatttattaatgaagcaaataatttttaaaaactcacccaaaatcattcttatagacgaagaatgccgggtccacctcccctttcccataattcaaaaccatctccctgaatgtatcgtagtgcaatgttttcctgttgtccacatcgaacgtaattcctctaattttcataacgtattcagtctcccccgtctgcttgcttctcatcttcagtgcgtactgcttcgcccctccacagcaatattcttcaatctcatagccgccgtattcctcgctcatctctcccaaatatttccccgtcgtgatcggctccacatcccgatcgtgcaaaacaaaaatactgtcagtgtccgtatacaaaatttcccctccgttgctttcagcctccctcataaattccaataattttaacctcgccatactcgtcgtcctaaaaattaggttatatacaaatttataattttttgaactcaccataagctaatgactatgttgctcgacttgtgctccatcacaaagtcctccttgtccctgtatatcaatctaatcgcctcatccgaatactcaacaatatcacataattcaattttatgatcacacgcaattttataaaactccgacgccctatcaattaccgcattcttgttcaaacaatttctcatcgaaaactttccctgaaagtgaaaattacctatcgtaaatttattttcaattttcttacccataaactatttagcatcaacttgcttatgtaccgcaaccccggattcttcttcactttagccaattcaatttcaattccatatttttccttatattcttctctccacatatccttctgctcccccgtctcaacccccttcgggaaaccgctcgcctcctccttcaacttcaaaaataatcgcacgtatcccttgaataaatcattcgcctcctcttcgtagtgccacgctctataaaatctgtccacagtataaccgcattccaacgcctttgcctgaaaatgtcaaattttcttaaaagttttctctatccccccccccccccccgcccttcagaattttgaaaaaaaaataaaataataggagactcagaattttgaaaattttttataaaaactgatgacaagctaatgtgataaaacaggttaattcttttcctttcagtatccctgcaaagtttggggcgcttctgataagtttctgaaaaaaaagttaagcctaaactttttggcctgtttaaaaaggaattaaaaatttttaaaaatttattcatctccctttttgatagaaaaagcatcagagtgcctaaactagcatgtaaataaaatttggtgcgtttcagagcattttctgaaaaaaatatttatgaattaattatgcaaaaataaataaaaatttctaaaaatttgatcgtccagaaataatttgtaattgatcaggggctcaccaaactttgaagggatacgtatcggaacactacaaatgcttactaat

SEQ ID NO: 14208 - DNA, 1108 bp, Heterodera glycines
aaatttaaatatgctaatttccccccaaaatataaattaattagtaataaatgaaaattttgctctttaaatgcattataaacaatcggaccagatcaatgatgttcgaaagctgatgcattgcgaagcgcacttgcggcttcacaccgatcgcgatcacgaggatgccctggggcagttcggtgatcagaaaaacggcgacaataatctaaaaaattcaaaaaaacttttttttttttttttgaaattctaaccgttaacattgccgtcgtgcgttcggcctgcgcttttgagcacgaagaaccaccacctgtgatatattattggtgaatgaattttagtttcggcatttttttaaaattattttttaaattaaaattttatttaattttttttaaaatttattacaataaaaatttaattaattaaaaatatttttaattgaatgtgtttgcatgggaattggactaaaaataaacaaaaatacaattgtaatcaaaaaaattggatttcttataacaatttctcgcaaattcccgagaaaataaaataaaaaattttaaaatatttaattaaatattaaataaaaatatttaaattaatttaaatgtaattagaaagaatcttcttcttcatttgtttaccggcagttctctccgcttggcaaacacttcgcgaagattcgttttgtgatgctgccggtggtggcgcttgttttgcgatcagtcgtgatctgttgaataaacaaataaataaataaaatttaattctaaatttttaaaaattattttttaaagagcaaaaaattaatttaaatcgcattaattaaataattaaaattttcaccttctctcgcgagcctcgacctaaaaaagaacaaaatttaaaattattttttagtgaaaattcgataaaattgttattacaagcattcggacgagcaatgtcatgaaaatggtcagcaacaaacatggcacaagtttgagcaaaacgcctgaaaaattaattactttttcggataataaataattatttttgatatttaaaaaggaaataatggggcatttaataaataaattttgaaaaataattgccaattgataatttt

SEQ ID NO: 14209 - DNA, 4106 bp, Heterodera glycines
  unsure (1)..(4106): unsure at all n locations
aaaatgtattttaatcgaatatatatatttttttcttttctaaatatttcttatttttctttattttctcgtttcattgaaatcctattgtagatgaaggaagtataatttaatattaatgcttgtctgaggtacaaaatttgtaaaaaatgattgatattttttccattcaataaatcataaatatcacatgtactttgacacagaaggaaatttgagatttaattattagatggtaattttattctttgaatgagatttgccatttcagcgccaacctcgtatctgagcatgctcggcgctgaaccgaccgcggcgagcaggacggcggccgccacagcgccgcaagcggctttgtacgagccctagcgaggcaccgccgggaggaggaggaacccgacttgagcaccaaatacctgcaaattttcaaaaaatttatgccaattataaattagccattaaaaaaataattttaaaatttaagaaaatctaagaaaattttaaataaattttgaaatgccctcgaaaaaaaatacaaaaaataatttaatgcatttaattttaaattagattttcaaagagtaaaaaatactaaaatttaaaaattcataaagttactaaaatttgacagtaccctcgaaaaaatacaaaaaataattaaatgtattttaattagaaattttcaaaaatttataattttaaagaatccatgaagaaaataacttttcaaaattttaggaaaattttacattgccataattgaaaaattcaactaataatttaaatgcgaaatttaaaaattttacaaaaatccaatccctaaaaaagggtttaaataaaaatgcaagccttagcaaattaaatttgtttttttttccaatttttctacctcagcacggccatgttgacggtcagccacaatgaggcggaatggacgaacacggacagcacggcgtacccgtaggtgtacacaatccagaaaaatgtgaaataccagggatggcacatctccacctgaatgaattaaaataaatgaaaagtgaaaaatgccaaaaaaaatgtggcaacaaaaattaaattaaacgatttttaaatatttcttggcttataatttcgatcagattatttcatcactgatagaaggcattaaattgaattaatcagttcaagctgtccggacagtccgtcagtaataattacaatttaaattacgttaattaatccattaattatgcgtttgggataaatgccaaatgagacaaaaaaacaaaacaaaatccaacagtttcgtaattctttttaaaatttcttgttttgtaatttcgatcagattatgtccccactgaacagaaggcagtaagtcgaatatacagttcaatgctatccggataatacgtcagattacatattaaaggtacattaattaatccattaattacgtgtttgggataaatgccaaattttatttaaattttactgacggattatccacgggaagccattcaaaaaacggatgatgaccacaataaaacaataattttcatatttaaactaatttttacttgtttataaataaaatatgaggccattaggctcatgtcacagattgcgatgacaatcaaaaacaaattgaacggatttttgcgcattgttggccttgaaatcaaatcaaataaaattaaatatttatttaaaatgcttttaaatttaatttaaaataattaatttttattaatttttaccttaaaagtacgacaacaaaacaaatgttagcgatgacaccgatgatgcacaaaaattggtagatgaaccaatgaaaattgttgtaacgttcagagagtccgttgagaagctgacaaatgaaaatgatttaaatggaaaattaatttaaaatttttaaaatttattttttatggtaataattacctcataataatataatttggcctgtgcaatggtctcgggatcgagttctaaattttggacaagaattaattattgctttttatttggttattaaagaaattaaactaatttactttataatacataattaaataaatataagtttaattaatccaaaatatatttataatccatgaaatattatacaaataattttaattaaatttaaaaataataattatccaattaattaccttcacatagtccagacattgtttccaattcgaagaacaataatttattacaataattaggatagaacttctcttaaaaggaaatttaatccatttgattttttgccaattattttgaaatttgaatgccattgtcagtggcaaaaaatgaaaatgccaaaaaaaaaagttaaaataactctaaaatgaggctttcttcgcagagaagggcaaaaaagttgaaaaattaaaaaaaaaatcaaatttaattgaattgaaactatcacgtcatttttaattattttacggttgtaagtaaaataattcttaagtgacattttgaaaaatgaaatttttgggatttcttaggttttttttaaaattctaagtcttgttcaattgtttggcattttgtgccaaacaataatttaaatttctttctttaaatttgttgttcactttacaaaatgaggaggatagaagaactcgcaatttggcataatgaaatttggccaaaaaatgggaagcaaaaacaaaatctgcgaggcattggcccatcgttgtttcaaattcggtgccggaaaagccactcttccgcgccataaagcgtgtgccgtagtgatacgctccatgggaccgaaactgaacggggacggcacggcacaatgtgccaaattgggccacaaattggattgggttgaacaagggcacaccacattttgcgggaagagagagtgggatatttttgtaagcctcccaaaaagctggggactaaattaggaaggccgcggatgagattttctcaagatggtgagtcacattttaaatttaattttttttaaattgccgaaaaaaataatattaataaaattctgaataatttagaaagcctgggctgagatttaatttaagacggtgaaccattttaaaaattattttttttttaattgacaaaaaaaattaattcgtaaaaaattttttggcaagaagggtaaaaagcagaagcattaatcagtaaattaggcattttttccttttttatgggaccaatataatctccaccattaccagtaaattatagaaagaaacaaattaaaatgaaaaattttcaaatttgtgaatttttataaatgccaaaaaattccaaacaaataaaaacagagaaaagaaacactgaaatctaagcagcaaaatctggtagttaattgaaaattattttaaaaagatatttattaaaataatttttccgtttttattagaaattaatattttttgtttgactacagtatgccgaaggtgccaaattttcattttaaattgaaatgatatgtgcccaatttcatggcattttgtttattttagcacattgtgagccaacatttttcattgcctataattaaacaaaataggcgtgaccaaatggcacaaaatgtgtggacggcaaaatgccgtattttgtgctcttgccggaccggagtttggcacacgaattgttgcctcgggcaaaagctggaaaaattgtgcctcaggcgacaatttgacgacggaaataatgggaaaatgaaaatgctaattgagagccaagggggggcaattagcgacaattaattatgccggaaacgccggcggcgtcaggggaatagccctggagcgatgccaagggatgaatatattttgtaaactgaaagttgggaaattcctgggaaacatattgtttgtttgctgatttgaaaagcatgtacttaaagggggaggtgggtatctgaccgatcattagggactcatttgaaaaattacaatttcaaaaaatgaaatttgatcagaagccaaaaacggcacaaattggacaaattagtgcggcacatggatatgagaatgtaaatgnaaaaactataaaataatataaattgaattaagcatgggaaagggtcacacattcttattattgaattngaaattggcgctttt

SEQ ID NO: 14210 - DNA, 2623 bp, Heterodera glycines
  unsure (1)..(2623): unsure at all n locations
aatgttcttttatcaacaattaaattntgtttaaaaaatgtccgattagaaattaaaaaattctcataaaaaataaataaaatttttaattacctcctaacaatgggcatgaacaatcgtcaatgcttatgcatgagtaacattcagagatgagtgaaagcggcttttgagctaacttttctgcttctgtcggtattcgatagattggcagtcctatttttggcaatttttaatacattatattaaaatattaattaatttgacagggacaatttatattgtagcataaaattacagaatgtaatgttttattttttgtttatttgtgtcatatttttggaagtgttcatctattaccgggtgaagaagatgctggaggtatttcataccatcgaataaggcttccagcacgttcagcctttaataaataaataaattgaataattaatttttattaattttgaaattaaaagtgggttgaaattattaattatataattaaaagtgggttgaaattattaattacaaattaaataatatccatttcttcctctgccagttaacccggctaaaaagaaattataagtatttaaaaaaaaccatttacgttaattttttggaaattttcccaaaattttcgattttaggacgtatttaattgataattcaaatgcattaaaaaattgaaataatgatttaaatatcggaaaaatgcataataagaaaattagtaaacatataattaattatttttttcgtcctcaatcagtttcttctccgttttttcacttttcaactttctttccgctctaaaattttaaattattaaaattaaaatgtttttaattctataaaaatgccattacatccaattcttatgccgaacaagcagtccttttgttcacatggcttctcatcaatggtttttgcttaattaattaaaaatatttgacgctaaaattgttcatattgtaatgtaccaattaatttgttccgagaaactcaaaaaagttttggccaaatgttcaaatgccatccttttttccgaaactcccgcattggatcggtaaaaaccccaattttttttacatgacatcattttgatgcttttatcgaccaacacccatccgtgtccattaattgcttacatccacggatgtccaagccgaacaagtgttgttttacggtagttgtcggagtcgtcgtggtactgggagttgtcgtcgtggttgtactggtcgaagttgtcgtggttgtggttgtcggagtcgtcgtgctagtgggagttgtcgtagtttcctccgaactgtccgtcatttcgtctgtcgccgaaatgtcagtagtttcgtttgtcgccaaaatgtccgtagtttcgtttgtcgccaaaatgtccgtagtttcgtttatagccgaaatgtccgtattttcgtctgtcgccgaaatgtccgtattttcgtctgtcggagtcggagcctccggagttggaataggtgttgttgtagtcgttgttgttgtggtggtggtggttgacttaaaagaatcgaggcttaagaaaaattgacaccgaaattaaaaaacaaattctttataaaaataataaaaattttgtaagaaaagtggggccaaattaaaaaaaacaattattttattgagacatttttttgtatattctggtataaaatttagaaaatatttaattgtaataattaatattatgctgattatattttatgtaataaataaaattattattaaatttaaatttaaatagttatttattaaatctaaatttaaaaaattattataattaactaattatatttaagtaataaatattattattaaattttaataatattattattacatttaatttaaataatcatttattaaatttatatttaaaaaattattgtaattaactaattatatttataaaattattataaatcctggcaaaaattatgtgcaaactgaatggaaagcccattgttgaaagatgcgaggggccaaattaaaagcaaaataattatttaattgattataataacaatgtgtatttttttaattattcgctaaataattcttttataaaataattattatattcagacatttttttgtatacatattttggtataaaatttagaaaaaatatttaattataataattaatatgaatgaatgataaaatattactgtttatatgatcattgacaataaaaattttaattattttaaagtaataattagggttcgaatttctagggttaaaattttttgatttggtgaagcatttttcaggcatatttcagtgcatatttggcattctttaatacattcaacttccaaccctagtaatagcaattttattattaaaattcaatttaattaattattatctttttaatgagggaccaaatttaaaaaatttcgatttaccgcttttgtataaagcaattcggcattgcaattgtcttgtccgcacatttcacattgcacaacatagtcctttgccgggaaagcattcttttgaagggccgcgcaaaatgtttgcaacgaatctctgcgatgggaatgagagagtgagtcaactcagtccccggccagctcagtcccgtaa

SEQ ID NO: 14211 - DNA, 1592 bp, Heterodera glycines
  unsure (1)..(1592): unsure at all n locations
ttggcaccatcactcgatttaggtgcagcaaaacaaattctgttggttttccccaacctcatgtgcccagcgatcacattccgatcatgtcgcaatatgccgtcattccaccaaacttccagagatctttgccgcccattcaccattacggaggctccgcacattccggttccttctatgatttattggcagaataaaacattacattttcaggtggttttggtgcgatcggacggtaacgacggcaattttacaacacatgtgacagttttcatttttaaacgttgtcaattatgtaaattcatctcttatcactcataaaccaaaagacatgttttatgtatgtttgttgatgatgctcttccacacagactaatggtattgacacgttttgtgtacatactttttcttcttttctcgattctttctcctcaacagaataatatatataaaacagttaattaggagatgggttgggatttattgtaactccgagaaatttttgccatctcaaaagaatcagtttttcttatcccctcctcatcttcttctgctgctgatcgtactcaaagtccattcacctcatatgtgttccattcgtttgtgcttttccatgtaaaaaacggatgataatttcgtgtaattgtggtctatgtgtgaattttttaaaattcctttccgttgtacctaacaatatggtttttattttttcgttccggattttcctgccgtcaaaattttttttatgtacttatattaacatgggcattttgttttttgatatttcacatttggcccataattttaattttcttgcttttgattaatgcttttctttcgaaggataaattttacaactgttcggcatttgactgttcaaatttggccgttttgtttctgccttgggttatatcgaacgtttattcttcagttttcataattttgttttagtttttatgccttcttcccccgcacaacaacagcagaagtcgtccgttggtcggcctctctgccgttactttgccagtaacatttgcatgaagggcgacgcttgtgccttttcgcatgagcacaacgcccgtccggaaatgacttgtcgctattacctcgcgggcaattgcacttacgggaataattgccggtcagtggagaatggacgggcatttaattgggaaaaagcgtggtttttgtcacttttagttgcttaaaattcataaaaaattggtttatttttattcggggggtgacaaaaattatttaaaaaaacgcaattatagtaattactttatctagtagtaaatttaacttttgtcgtgacataacaacaaactttttaaatgcccattaattaggtacgaccacattcgccttcaaagaaacgaagggcctttaggcggtggcggcgcaaaagttacgatgaacagcgcagcgcgaccagttacagaattatcataagttacgcaatttgaattcataaattcagtttgttcctgcacaacaaattccaaagattcccgaaaagaaattgngttttcctctcgaacctccggcaaccaatccgtggaaacatcacccgttgggaaacttccatc

SEQ ID NO: 14212 - DNA, 1753 bp, Heterodera glycines
tacttatcccaaatgacttttcaatttattttaactgtttgcatttgcctttagactcatcgtctcgaccatcacagggagtgtttagcggagcacgaaaaacaaatggaagaagcatttgcgaaggcgcggtcagaggagaaacagtgcggcatttgtatggagcaaattgtggagaagggactgcgctttggcattctgcagaactgcacgcactgcttctgcttggattgcatccgaaagtggcgccgtcaaacggatgaggaaatcaaaacgaaaacagtgcggttagttggcaaattgggaatatttaacaaatgaatgaataaagaaactttaagtgggtatatatgaaatttactgaccatgagtaattttttgtgaaaattaggctattcccaaaatctctccaggtcgtgtcccgaatgtcgtgtccattccgattacgtcatcccgtccaaagtttggattgacctcaagtcagacaaggacaaattggtttcagtcttcaagggtaacacgaaaaaggtggttgtggtaaaacgattctgttttcctttaccatttttttaagattgcttgcaaatacgtcgtcaatggcgacgtggacaaatgcccattcggtccgttcattcgtgaagcatttcattaaaattttgtttttttttaattttaaattgatccttttcaggtaacaaatgcttctacaaacaccaattgcccgacggttccatcgtcgaaggcaaatcgccgacgcaattgcgcaagaaccgtcgcaacgatgccatcatgttcagtctgtacgactttttgccctccgattcggattgggaggacgactttttcaacgataacagcgatttgtacgattgattcgcctgctttttgtgttatttaaataatttgattgtgtaatgtaagcagagtttcgacataacaattaatacatcagtctttccggacataaaactttgtacgagtaaatggtccagattttcatgttatttgacaaagcatattttagcattaataaaaaataattaatgaaaatttggatcataaaccttcgtatttttaaactttaagctggcaatttatgttcatacaaagacaaatattaattacttgcttcgttttgtttaataatcgaaaagttttctgacaaataaataaataacactgattttgaattggcatttcaaaaagtcgggaaacggtcgtgtttgctgccgaggaatattgccttagaaacaaacattcaaaaatttcggtcacaaatacagtatttgatgatgcgttttcttggcaccactttaaaaattgttggtggcctttgtgtccctctcactttcttcgacttcatcgcttatccaacctctgtcattggctcttcgatggaggtgggcaaatgttttcatttggcatgacatattccgctaattgcccttttccggtactaattgcgctaaattggcctatttagcccacccttttgcccggtgacttcgttttggtcaatcgcctttccgtcggttcgccgtccgtcggcgacattttttgcttttggtgtgattaaataaaaatgtggatggaattccttgttttaaactttcacattttttcgtcagctctccttttgacccgaaaacaacgcatattaaaagagtggcggctttggggggtcaaacggcggagaacaaaagggagcagcagatggtcgtgccattgaaccacgtttgggtccacgcggaca

SEQ ID NO: 14213 - DNA, 1504 bp, Heterodera glycines
cccccccccccccccctcacccacgaccaacacattgttatcatctgggcttagcttggccaacccattgcacgtatataatgtagggaatgattgatttttcgaaacaaaaaaaaatgaatttagaattaaaattttgccgatcactgctacggtggtgatcaacgccaaaacccaaacaatgcaatcaatgctcaccgctttgcggcaatttcctgctgttgaaatgtgccaagcgttttcaatgcttcattgacaattgccgaattttgcaacaaagtggcgtccgccagtgtgaacagtgaagcggatgatgactgctgctgctgctgatgttgaactgtgtagcagctgctggcacttaaaatttgctgttgaagatggtgctgtaaaatttaaaaaaacaattaaactaattaattaattaatatttttagtaaccaaccactgaatttgattgactacccgcgttaggtggaggaggaggacgtttttgaccttaaaataagttttgtaagtttgaattcaaatttataatttttatttaaaatatattttattacgcaaattttacccgggttaaaagtggccgtgctgctcgttattggagacgtgttgctaataaaatgattgaaaaaaagctaaggcctttatggaagcctcaattaaaaagaaatcattcgatgctggaaatttgcttttaaataaaaaattaatttaaaaattggaatggttttttatttgaaattttatattcaagatactgcacccatcacaattactgtacatagttgttattgtatataaaaacttgtttcatggcctactagtcatacaaattttagaccaatgaatgataatttgaaaatcggacagagtaatctaaatgtttaaaaaacgggaccattgattgaaaagggatcgttgggacaacaattttgtgagttctcgggactttcggtaccgaactagttaatcacttaaaaatctcgacaaactgccaccagtccgtttgatcaccataattaataataataattaataataaattatattattttttaaaaatatcagcttaaaatccaatggggcgctgctgctgtccatcccatcttatccatttttacatagtgcagatatttcagaatttttttttgaaaacctctaaataaaacaaacccatcaaatacataatgtaagcgcatgcatttatttgtgcagcggtagcagcagccgcggaacagccacagcccccgtaaatgggatgtgtatttgtggtggtggtggtcggctgctcccgcactctcgactctcgacatgtacgtgtaaatggcgagaaaatataatgttgattaaagaggacgcgcttgtggggggagggaggggcgggggaagaggggggagttgttgcgctcatcatgcgccgggaatggaggggactctcgtctgtccttacataggtgccgggggtcgggaatgggacccgtctgctgccgcccttcat

SEQ ID NO: 14214 - DNA, 1202 bp, Heterodera glycines
  unsure (1)..(1202): unsure at all n locations
atgccgcatccgccgctgcgccactgcactgctgacagccgggcggaggacagcggcggctgctggccataaccgctagcaggcagcgccccgccaccaccgtcagcagtacacacataacatatttttgtggttgcgaggagtggtggaaaagtggagtgggaagcggggacatggcggggggggggcgggaatgggactttaattaaatggggcacccgccggaggggagagggtgaagtaaatgagacgtcgacgacgacgacggcggcgcggcgaccctccagcagaggtagaaagggggggggcggcaatgataggggaaaaagccgatgaagccacctatttatatggggcaaattcccgtggcttcacacaccacacacacatttccgtgcgctgcgccacatgggagggtatagccacaattcgccgacgacgacgccaacgacggaaatcgggggcgaggggagcgggagcggagggcaaagcttttcgcgctttaattgggttgaaatggcacgggaagggtgagccaaaaatgtgcccttaggggaagacagaaaattatgtggttagagctttaaaaagtaaggcctgaataaaaaaaatcagcgagaattaattaacaccttaaataggggacaacaacagtctctctttcactttaaaacgaagaaaattagtgggtatttttctgttcatgtgctgtgatagaaaatatataaaaatttgaataaatgcaaatgaaaatgtctcaaaaattaaaattatatatatatttatgtatataggtaaggggtttcgctgtcctaaatctcgggaaagggaaccgggagcgggctgaaacttggttacataattataataaaaaagaaaactctgagattgaagtttttaaataatttgccccattcctctggccttgctggtcttgctcaaaatgccaggttaagcgtccgggtgatgacaaggtttgtacaatagtagctttgctcgtcagacattggttcaagctcattgaatttttaaaaattgcgatttccaatagaatttcaaaggaaaatggaaaatttttgtgaggagaggaatgattaaaaaaccggaatttcttctctaattanatgaagaaaattcctgtcactgtcaatgaccgaagaaaaaaaaatggtcgatggagctgggatgttggttggatgatg

SEQ ID NO: 14215 - DNA, 4237 bp, Heterodera glycines
  unsure (1)..(4237): unsure at all n locations
tgcaggtctaancaggtgttaantttgtctacaatttttaattaatttttcattattttattttaaaatatttaaatttaaaataaaaatatttatttttaaaattaatattttaagcactgaatatcgccaagtgttcaaaaaagaattccgttcattgtttggtcgtctcagaaaaaataatggtaacatttttaaaaattaaaaattaatcttttttcattttatttttaatttaattaaattttttaccgtaatcttttttagttgttcaaacaattggtatggcacaaatgtgcaatgtcaacccaagcaacatcaacaacaacaaagttaaccgttcaagtcaaatgacaattataagaaatgtgaataccatcatccaaatccgtcattaattttattaattcatttttagtgaaaaataataaaaataattttgaaaaatatcattttttgatgtccctaactcaaaatggcctaaaaatgatcgtaatcgatttaaaacggcccaaatgatgagaaaaacgcaaattttcctacatttttggttgtggataactgagtccctgttaaaagtggacacttcagtacccaattttttacacgaaaaaatggctagcaagcctcttattctgaattttacaatcactttgggccagttttaaatcgattcggaccgtttttgggcaatttcgagtttgggacctcaaaccaatgtttagcaattattttcattaattgattaaattaaattcaccgattagcaaaaaaatcaatactaactttttatttcatatttaatttaaaacttaaattgtatgctaaaagtggaaaaacaaaggatgaatggctttcggaaaatgtgtcaatggaaaatgcgtcagtaatattatatttctgaaataaagtactatatcattaagtattgtattacaaacggccaaaattgcttaaaaactcgttctgcgttttttcaattaagttttctaaggattcaagaaatttgaaatttccggtcacgcaataaataaaagtaatggaaaactggtgcgacaaaagttcccgcactcttttaaaagattatcttaaattgcatttttgacaaaataaacgtggcaattaatcaggtaactaggcgatactatttccacaaatttcaagactgtgggcctcattgctaattgccataagcaaaatagaattttcataaattttcaagacccggtttcaagccatctaaatgcgatcactagctccgagaggcgatggcgtgcgtataacgtcgttgcctcgtgccaaattgtcgattgaagttttgtaccattttctcgtctcatttcgagggttgcgaaggcggcagtttcagcaaatttagagtggttcgcgttttgcaaccaagagcatttcaaccggggagtttaggtttgggagcaaatcactgggtgtggtcagaaaagtgaccaggaacgtttcaatatcctgtgaagccctccccttttagctttcgaaaagccttcttaatgctccacttgtccattagacattgtatgtatgatgctgaaaataattgtgtaattccgtttgccgttgtaaatttggcaaaatcattgattgtcagttttggtaaattattccatttctgagtacaattttggtgaatatacatgttgtcgggccaacttctgctgactgatttttggaatcacgattctgtcgcgatacattaggcatcctttaataatagacaggtcatcttttcttcgtctgagcagttggacagtctcagtttcctgcttcacttttatgccaatttgatctgacgaactttatcgccgtttgaattgatacgtcctgtttaggcaatgcgtcaaattgacaaatttgataggcaacttttccaaaattaaattaaaaatggatgtcagagtactttcaacaaagacgatcacttttttctcttcgcattcattctttttgcgatgatttctacaaaaatgcttgctgtttctgcaagaaggtgcacaaattcagggcgatggcgaatttgtagttttatgtaataaaaggaataattatcttcagtttaaacacactaaaatttaacaaattgccacaaaatttgaccataaaatgtcctcaattaacaccagctcagacaatgcggtaaaacaacaaaaaataataatgaaaatattaaccaaatatttaagtgaataaaaaaatcccataaatttattataattaggtatttgaaaataaaaatttactttttcagctttatttggcctaccgttctgtgggtccatccgtcgatttgattgtgccggccgttgcgctgtatttggttgcgttaattggcattgtgatgaacggcacagctttggtggtcactgccaaatcgaggcaaatgccattggcattttttattttaattatcataattgaatttaatttcaatttcaatttaaatttcccatttttcagttccctccgcggctccgccaattttctgatggctctgatttgtctttgtgaattggtccaccaaattgggcacacttttttactggttgttgtcatttcgggcacaaattttgtcagtttgcacactgctgacttaattatagcggtaaattttaaatataaatttaaaattttcaaatttaattttgaaacttcaaaatttaagccttctgtttttgcgttaaattgcggcttaatggcaatgttttgtgctgcggttgaccgtctctttgctgtattaatgccttttaagtgagaaaatttaaatctaatttaatatttcttacgaaaatttattaattactttttttcatttttttaaaattttatataattatttttaaatgatggcttttataatttagacatttctccatttgtgcaaagtataaattaccatatttgtttggccatctgctcatttgcataatttatggtacttttatacagtatcatgtgctcgcatcggcattcgaaaatgcgggaatgtaattaaaatgcattaattaacattttaaatttaattagtcaatttcattatcttttttaggccgaccaatggtttattagccgatgcttttcaggatgatatttatcaatttttcatcggtggagtttacagcatttcatttggttgcatttgctgttatgtgaccatttttttgattgtcaggcttaaaaaaagtggtaaattcattggcatttgtcttaaagtgcctaatttaaatacactatacatttgttacagtaacccagcaaacaaatacccgactgttacgttctttggtcatcattttgtccataaacattggcggctatttgggcactttgatcatgagtcagcttattggaaccattggccaagtgtatttgtgagtttttttttctttttttccaaaatttaaacccccaaaggtccccaatccaagcttggcaatttactttttgtgcttacattcttttaaatgttgttgccggatcaaatgctattgttctttttttaaacaggtccaaatttaatttattaaaatatttaatttgctgatttaatttaatttaaaaaatttattttttcattttaaatttttttaagcactgaataccgtcattgtttaaaaaagaattacgtgcaattaaagatcgtttctttaaaaagaatggtaaaaatatagttaaatttctttaatttttaaaataatatttaatactttttaattgaattgcttttttagctgttcaacctatttgtacaatcaaagtcaaaccgaaaacataattcgattacatcacatcaaataattgtttttctcatgaaaattcattttgaactctttttcattatagaattcattggtttattctatgtattgtttttaatttatgtaaaatggcttaataataataataatagttaaatacatttttattattaattcctttaaaaaaaatttttcaatctctatgtatattaaagaatttggtttataatttcttttttcatttatagcctttttctattaatgtgctcatatttactttccaaaaaatgggggaaagaatggcgcgcaatttaattaattgatgaaaataaattttattcatacacttaattgaatttgcttaaataaatagtaccaaaatttagctaaatatttaattatttattggaaaataagcgatcaaaaaaatttatttaaaaaattcgaagaag

SEQ ID NO: 14216 - DNA, 1519 bp, Heterodera glycines
  unsure (1)..(1519): unsure at all n locations
tgtatacgatactgaagaatggcgtacggtcgttaaaagcgttggctgtgacntcagtcaatttacgaatgttcggcatgaaaaattggcacaattttacggccaaaatggcttatacacattaagcaaaagcaaaatgtttttgaagaaaaaggcatgaaaattaaaaaaggttaataaaatatttatttaaatttgttttccgttagatgatattttggtgtttgtctccggttgtgttaattacccatttaatgagaggcagctaattgatgtgcaaattgtccaaagtcattcaagtccgaattgttgctgttttaggaacagacaaaaggagaaaactcaaatgtaaatttgggaaagcaaattaaatataaaaaaatattaaaaataaaataaaatttaatttcatgtgcaagaataaacaaaatacagagtaatgatgctcatttaaaaaaagacaattcatctttaggtcaaaatcattcatcaatggcactgaaaatgcaattgcttttttggtcactgccaaattttctcgtccaaaatgctttttcataaaaagcgaaggtttttttaattcaattcaaaaataatttttcattttaaatgtcttttaattgcttttccagaatcttttttcggctatttaactttcaaatggcgcaattcatctgttgagactctgcgacaatttaaatttccagaaattaattttgacaaaattggcaatcgctttgttgaatttcttgcactcgaagagatcaatttaaacgagaaaaaaccttggaaagtgccaaaattccatgtatgtaataaaatgatttaattgaatttataaaaaaataggggcaaaataattaaataatattttattaaatatatttaagcaataccgtggattgcccataatcttagcatggaacaagcagtttttctaccctcaccaatgggatttttggccatcatctttgtcatatggcgaggacccaaattcgaattgtcctttccaatgcatttacacaacggaacgaaaggcgtaatttattatttttttaaattcaaaaatttttgaattataatttttaaatcaattttttcttagcgagagctctgcctcagtgctgcttttccatattttttggtcaaatccaatcggtttttggcctttttggagctggcctcagcatcgtagtcaagaacaactgtaattttttgttatatatattttatttttatatttttttaaaataataattattatataagcctaaaaaattaatttaaaatcagaacccagatgaaaaatttttatcttcatttgggacccaaaaagcccttttttaatatttacagtttgctcagtcggcaaaaatttgaaccaaaactttttttttagaaaattataaaaaatcaattctaaaagtaatattaaaatttagcacattcaacaaaacaaaaaaagcaaacgctccaaatctggaaataaaacggttaactcttttattacgccttcttc

SEQ ID NO: 14217 - DNA, 2251 bp, Heterodera glycines
  unsure (1)..(2251): unsure at all n locations
attcatctgttgagactctgcgacaaattaanttcccangaaattaatttgacaaaagtggcaaatcgcttgttngaatttcttgcactcaaagagatcaatttaaacgagaaaaaaccttggaaagtgccaaaattccatgtatgtaataaaatgatttaattgaatttataaaaaaaaaaggggcaaaataattaaataatattttattaaatatatttaagcaataccgtggattgcccataatcttagcatggaacaagcagtttttctaccctcaccaatgggatttttggccatcatctttgtcatatggcgaggacccaaattccaattgtcctttccaatgcatttacacaacggaacgaaaggcgtaaattatttttttttaatttaaaaattttagaattaaaacttgataaatcgatttttttttagcgagagttctgcctcagtgctgcttttccatattttttggtcaaatccgatcggtttttggcctttttggagctggcctcaacatcgtagtcaagagcaactgtaaatttttgttatatatttttattttaaatttttttaaaataataattattatataagcctaaaaaattaatttaaaatcagaacccagatgaaaaatttttatcttcatttgggacccaaaaagcccttttttaatatttacagtttgctcagtcggcaaaaatttgaaccaaaactttttttttagaaaattataaaaaatcaattctaaaagtaatattaaaatttagcacattcaacaaaacaaaaaaagcaaacgctcaaatctgggaattaaaacggtttaactcttttagttacaccttcttcactcaagagtcgccgtattatgcgggaagagttttcgataatttgcccaatgattggttcaatttgtccatgacttatcacggcaacagcaccatatgcaccaaatatgatgaactacatgagcatcgaagtggcgaaatcacgcaaattgaggatgaccaattttggaacgagcaaaaagtgagagggtgcaggggactcaaatgacaaacataaagtgccaacggacgagtggccgattcagcgcaaaaattaccgagcgattggctggggacagtggtgccaaccgagtcccgaatccaggcctttttctcatcccgaatcccaacccaaaaattttcgccattcggcccgaattccatccaattttttctcgtcccgcggggattgctggcggagacagaatgggcgggcagcggcgtagaagcgaatagtgcctaattgcgtcaaattgaagatcaaagcgcttgttggccagaagagcaaatttgcgctgcaaattgtgtccaaatgtggcgcatcctccgcaagggatattctcactgcgcaattgggccaactggtccctgtcgatgtgtttggggcatgcagtgggaacgaatgtgacgaacaatgctatgggcaacaaatgagtgctaaccaaaccaattaattaattaattccaccatttaattggatgatcaagcaaaatgatgagttaaaaattcctatttgaatttccttcagagtcccatttcttttatttggcatttgaaaattcggtgtgctccgaatatgtgacggaaaagttttggaacgcgcttcgcgcactgacagtgccggtggtgctgcaccgcactgtgctccgtggggtgggcgtgccggacgacgcttacattgcagccgacgacttttgcagtgtgcaagaattggcacaacatttactggcactccgacgcgacactgacaaatacattcagtgaatttattaaaacatacaaaactcattctaggggttactacaaaaaaaaaattatgtaattctacgactcggctttttggatgtgaaaaaatataaagttttgattagttcaattagcagcataatgagaaaaaaagagagggggcggctgtgaacaaacgaaaactttgcgaaaggcgtcaattaatatgtaaaaatcttttgtttttttctttgaacaacacattttgtgaatggtttttcattaaaaaaaattagggttgtgggttaggcgccgccgggcaaaaaatctaggaattttaatgaaaattgctgataattttcgtcgaatagtttttctcgaaattaatttataaaaactgcgagatttttttgcacttccgttcttttacatatcttatgttttgtctcaanttaatacagtttattaattttaa

SEQ ID NO: 14218 - DNA, 505 bp, Heterodera glycines
ctacttgttttgtttggatcggccaaacccacccccccccccccccggacatcgggagatcacacccttacatgaaaaatttttttatttaataaatttttcttttttccgggcagtggcatatcagcaccctaagcctccccctactgatcaccccctttcacacagtgtttcacatatatttctttttatttgaaaacacaataaaattgttgaatatttaaaattcaaataaattttaacaatctcaagtcgtgtaatccgaaccgaccgtttttggttttcggtcaattcaaagatttgtttctgaattaagcattattaattggaattaagaaatgaattttcgttttaccattttcaaaaataataattaaaattgaaatatttacaataatttgagagaattaactttcgtttattaaaagcaaataattttgaataaaaacaaagattttacgaattttttggtcgaaattcaaaaatgttaagggaaaaatcctga

SEQ ID NO: 14219 - DNA, 1231 bp, Heterodera glycines
  unsure (1)..(1231): unsure at all n locations
ctgctccgcttggcccatttcttgctgcaccatctcggcttctcattcctcgtcgtcaatttgttgctattggattgctgaaatcatataaatatatttttgggactaaaatttctttgaaactcacttttcttggctcatcggccgccttgtctcgccctctccgtctgcgcttttctctcctctcgccttttgtttgcctcctccgcgcctcttttgccgtgaactttaggtaataattttatttttgccatctaaaatttaaaaacgccaattttttctataattataattatcattaaaaaataatttttggcaattttttttcttttttttgccgtccatgtagggaagacaaagataaataaacgccaacaaattattgcaaaaatctttgaataacaaatttttaatgaaatgataattgaacacaaaaaaatagagagaaaaacatacaaatgaatataatcctttgggaaaacaatgcgcagattgattaatattatttaggcaatttaattaaaaattaataataaagtaacaaaatgaatactgtagcataattacagtaaaaaaacactgcttttgccggatgcttttgtgagcaaagttcactcactttatctcgtcgtcaatctactgggaaagtacgcgacgcttgttgacattatcaataatacaataaatacggtaattcgggtctaattttagagaatgcgataaacaaaatgatcatccacttttttgcaacaaagcccagatccaattcatttgattaaaccatggtaaatttcaattaaatgaattcacaaatcataattattacatttaatcaaaaattttattggcagatatttaaatgttttttattatctatttatatgaattgtcaaatattatgggtttgattttttcgttattttttgaatttctgatcaaaaattgcctatttaaaaaaattgaaatttctaaaaaagtatttttaatttactttttaatttaaaaaacaattactaatttaaatcttttatgatttattaattcgcaatacgtttataaggtattctttttttattaagaaaaaccgcgacgtatgtaaataaaatatatatatataaaaaaagctaaaatatgtatgaaaaaatgtacaaaaacccagaaatttgtacgaaaatatataaatanattcttttaatagttatttttggaaaaaaaattctttcgtaagggc

SEQ ID NO: 14220 - DNA, 1288 bp, Heterodera glycines
ctgctaggaacaggcacaccttcaccctcaaggccagcgagtgaagggcccccgtccacaccagaccggctatctggctgggcttaaacatcgctgtgactgacacccggcgggctatgacggaaacatggtttcggtcataaaagggtttagtaccgagtaaaccaacaaaatggggagagaaaggacagcacaaagtacttttaatcaatgaaaaaacaagaaaagtcgaaaaaaagataaaatttgggaaaaaatgaaaaaaggagaaaaagagtggaaaaaatatttaaatttaaaagaaaatagccaaaatttgaaatagtttgaaattataatttttaaattggacaaacacaatgccagtagaagaaataaattttaaaattagagaacatcagaatgccaagatttgaaataatttttaaattttataaaacagaatgccaagaattgaaataatttttaaatttgataaaaacagaatgccaagaattggaataaatttaaatttgaaaaaaacagaatgccaagaattgaaataaattttaactatgaaaaagcacaatgccaagaattgaaatgaattttaaatttgaaaaacagaatgccaagaattgaaaaaagggtgaacaaatgccaaagaaggaaatgttgtggcaaaataaatgataatggattattgattggtttttccatccgtaaagtgaattaaatgaaatgaaaatgaccaaatggacaaaaaatcaattaaaaattgtttattgtctgaaggtgtcaaatttcataataagcgtgtgggagggatggcggcaccacaaagtacgcgacaaattaaaaaaagcgaattaatttttattgtccattgccaatgtggccgagtggttagtgcgtcagtctggccgccccctctggggttcgggtccgcttttgcggggaatttttgatgaattttaaatgaatttaaattcatcatttttgatctttaagatgtttaaaaattaaataaaattaagtaaaataatttgaataaagtcgcgcagcaaaaaaagtcgcgcacccttgcaataggtttgggtttgcatgaaaaaagtcgtgcaataggtttgggtttggaaaaaaaatcgcgcaataggttttggcttcagtactaaaaattttggcgctcagatggccggcgctcacttggcggcgatcaaatggcttgcgctcagttggcctgcagccctcccataggcatggggggctaccataatccggtgaaaatggagtgggtaactactaagat

SEQ ID NO: 14221 - DNA, 3675 bp, Heterodera glycines
  unsure (1)..(3675): unsure at all n locations
ctaattttaaatgaaaaatgaacattaatgaaaaaactttctcgaaaattttagattttttttactctgttggttcgtttcttaaaaactagggttagacaggtccgagtattaagcaaaaactgggtccggtattgccgggtctacaaaagccgggtccgggtccaggttgtccaggttttgcaaagtcccggtatcgggtccaaccgggtcctgaattaatatttttcaaaaactaaatgaatatttcacgaaagaatttgtaatttttcatttaaaaaaataaaaatattttctttagattcggtagcaaatcaaataagttatttttgaaaaaattcaataaatggcaaaaacactattttttgataaatggttcttcaagtgtcttaatgaaactgctgattggcttaataacaaaagttaaccgttacctgattttatacataatttagtttagaatttgttatactgatctgttcatgtaattgtcgaacacattaatgaacagttaaagaccatgggtttctaattgtttttacactttaaataatcgctttttttcttagcgcctttgctaaataatttaaagtgagtttttaatttgtgcattatttaccctgatcaattggtgcgtctgttcgtcgtcattttccaacccccaaaggccaacgaatgtttgccgaattgcctccaccatttcccggtctttcggttcgggcatataccgttcgattatcccaggcagggccaacaacttcaaacaaaatgttggacatttataaggatgcaaaaagcaaattggaaaacagattgaacaaccacctgttgcacccgtttagaactgctcaaagcgctaaacattgtcgaagttttctaaaaagaaaaaaatctattaaaataatattgctaattaacttgaatttccaatcactttttttttgtcaaattgggtatattactaatgggtgttacatattttcgagcagggatataaaaactgagctcaacccctgctcgtcacgccctccccgtagaaatgtgaaaatcaaaatttcaaatgttttcttcataaaccgatccagattcttctacaatttaatcagctgcgcctttcttcattgtcggacttgcaaattcttcattttctcaaaactagtgaatttttggctatttttgactcaaaaagaaataacaaaaaaagaagacccaaactaaaacttataaggctttgcaccaatttgaactagagaccggacgtgcgtgggatctcgcgggattaaattacgggatccctacctcgaggtccgtcctgagccttaacagagactgggaagaaggtttccaaaaatatatataatttaaaaatgctttgttctttttccttacaatcgccgtcgaccgttcaattctcttccgtgcctcccactcctcctccgtccactccggcaaaggtccactgcgcgagtaaacgaccgcaaccgcgcccatcggcggtcaaacgcaaagtgaagtcgttagggtcaagctgcaacctgtgaagtggcacagcggaattcgggcaaaaagcaaaagcatttccccaaaaaaattgtacaattttcattattgaagaaaatttaaaatggtttctctaattagggctaaaaagcgaattggtgttgagaactttcagggccaattgcgttagaaatcatgtggatgtatcttcgaaaatggctgataaattttccgaaattgaatttatttttcaagaaaaagggctgtgaattttttaatatgggtaaaaacccggcgccggccacttcccctggatgttaccgggatcaccgttaaatgccaactgtcaaaggcgccggatttatcgtagatcgaaaccaactcactttgaataggcctctttcgacgataagcgcacaactttcacttgccaatcagaaattcgctgcagctcatattcgacggcgcgctcatcgaaacggtgcattgacccttggaaaacggcaaaaacgaccacggcattcggatcgccgaatcggagccttaaaaataaatgctttttaaatctgtgtaataaattataagagaaaaaaaaatcgccctggacttttctcttagcaaaggggtcaattaaatagggttttaaacttagaaaaatcaagtgaaaataattaatttctgggcggagtggacatgatcacggatcaagcgaatcacaacgtttttggttgtccgtgatcagggattgtctgtgatgaaatgcagttacgttcagcttgtgttaattaggattattttttccatcatgcatgattgatttgaatctttggattttaagtaagtttctgaatatttgatgggtcggaagattggcaccaacgaagaaaaaattgtatcgattttaatgaaaattctaagaaatttctataaaagtgacacttttctgtgctctcttttgcacttaccaggcttggaaaagtccccgtgccagtgtattaaatgctcgattttccggcacattcgacgcgtccatgcgcatcctttgcagcattcgacggtgcatttcggctgtccgagggcccatcgccgagcccaccacactgccaatgttcatctcaacctttgagaatttaaaaaaatttatactctcattgttataggttatttcattaaattatttttcagcttttatcggggaactgatttaaaaggttcccggaaaaagcgtaagtgtaaaaagcgtcagtagaaaatgcatcagtaatacagaatttataaaataaagtactgtttcattaagtattgtattacaaaaggtcagaatgtagaaaaatttcgttctaattttttcaattaagtttttaaaggttcactaataacatgaaattatactctaatggattgttgtaagcttgcttaaataccaatcaacgcttatgctttcaggtaataatactaaagtactcgtttttgaataaatcctgattcactgacgcattttccatcaaaatgtcaccttgtatatgtttttttgcttttttccgtaaatatgtagtagggttataaattatattgaataaacatattttttctgcgcatatgctatgaagaaaggggatcaaaaatatcatttttacgttaaaattttttgatttggtgaaggtttttagtccatataaatccatattttgggggtttcgggaataagtccatatttcggccatttttagcaaattttcacatgaaaatggaaaaaaagtgaaaaaatacacccctaaggatcgactttttggaaatttcttaaaagtaaacccccaaaaaaatgaatttttttagaaattttggcaaattttttaggcattttgttcgcttccgaaaattttcgctgacaacaaaatgaaattattgcccaaaattttgggatgtattttttgcaattgttgtgaagatagaatttgagaaaatttggcttttttttaatttaaatccattaattaataatttagtgtttttatctctgtttaagcaaaattgaataaatacacattttttggagtttttgagggttaaagcttatatttttggagtttttagtccatattttgatccatatttggccatttttgagcattttagtaaagatttcgagctttttaagtccantattttatgtcc

SEQ ID NO: 14222 - DNA, 1715 bp, Heterodera glycines
  unsure (1)..(1715): unsure at all n locations
attttggcagtttttagtccatattttgatccatatttggccatttttgagcattttagtgcatatttcgagctttttaagtccatattttatgtccctatttggtggtttttaatccatataatttataaccctagtaatgagtcctcctcccttccccgtcaaatgcattcattaatcaaatgaatgctttgcaattatttacctgctttatgccaaagcgctgctgcccatccctttcttcaattgtgctgtccaccatataatccttaaatcacatggcaaatttattgataattcttttaattataaaatatttttattatttaataaaatattgcaatgaccgatcgtgtcaaaaacaaagtgtacggctgccgttggccttctcgatgaattccttcatcatttcgatcattcgaccatacaaattattcgacttgcccactccttctgtcgctttaaccaaaaagtcgaagtcacaagaaacgagaaagtacaatttttgcatcccctaaaacaaattggtgcatcatcgtagagttagcattccatggcattgaattacaatagaaaacgtatggttttaaaaaatcatagttagatagaaacaataataggctaaccaaaaataattttgaataaaaaacttttggaaaagttaatgaaaatccaaaatttgcacaaaattttttctcattccctcacaaaaatgcaattcttagggttgtacgactcggggtgacggttcgaggtcgggctagtcgggggtgcagagagtcacggtttcgtttgggtcagggccccatcctggattcggctaataggaattttcaggacgaatcccagaccctgaattttacttgtacccaattttgaaaaacgacaaattttcaatgctttgcaaattattgtgaaaaaagcgtacggtgtgcacatccatcgcctgttggtaagccgaacgtgggaatggggacgggaagagactgatcggctgaatggaagccacatcgctgttccttcttaaacagatttgacttggagttgtgcatcaatcaaattaagcgcccaaagtggcatcgatttcgttaaaatgggcaaaaatgttcggcactgagtgggaagcgaacccacgccctaaacagctgtccttgcgccgttctatcacatgcgcaccgtttccgcgagtcgtcgtccgacaagcgtttgatcagtccaacttcgtgggccacatcgacggcggcttgcaccagcgtggccaattggtcgctgctcctcaccgcttcaaccgctggattgctgattgatactgcaaattggtgggaaattttagagtttcacataattagaggtgccaattgtaagaaaatcataaaatatgtaaaaaaattccgaataatttttttcattacgatttatttttataaaaaattccctaaaaatctcaaaatatgaaataaaaaagaaaagagtataaaaaagaaaaatttaaaaagccagaaagaatccatcggtttttaggtttttacacatttttgaattgcgacaaacctagttaacaccctaagtagaaaaatatgtacatttgttttatgtaaaaaaaaacttagactacctatacaatgtatttaatgtgttctttttcaaaattttaaaacactccgtcagattagagaatattttaacganaatattaattaagaaagaaaattcat

SEQ ID NO: 14223 - DNA, 5096 bp, Heterodera glycines
  unsure (1)..(5096): unsure at all n locations
atctctaagttttaatgttttgcaaatgagaactttcttataagataagttcaaatccgaaaaatttcggagattttctttactcaattttcttcaaaataaaaattttagctttaatttatattttctcataaaatgatttttcatgccatcattagccattttcgagaatttaacgaatttggagaaaattacgctcacttttggaaaattttatgcccatatttttcgctttttacgtatatattttgcatatttgtacaatttcgcgaaataggatatttatgccagaaagtccaaaaatgtaaattattccgtttttaactcaattttttcaaaattaataaaaattcgcttaatatttttcatattattttcttagctattttcgaggtttaggtttaaattttttggaatttaatttaatttaaaaaaatttattgcatttgctgctaaaatttttcgattttatgtgtcctaatggtcactctctgacatttcttactcggcatcgtccgctgcgcgagttggcacgaaaatcagcagcatcaaagcccagcttatcatagttgatgatcacgtagctcaaccttcccggctgatcagtcaaccaaatggcctggtaagtggctaattgtcctccgtccaaatccgatcgacccgacacggctgagcccgtgttgtaccatgtgaccacctataggcatcataataaaatcaataatttactaggcagtaacacaaaaaatcgatattttgaataaaaatggaaaaactcaaaaagtttggttatagagtgaaaaaaaacttttttaagcttttttcaagccaaatttcaaaaaaaataatcgcagagttgacagattaagatgcgaactcttgcattgccaaaaccgattaaagcattttttttctcgtcagtttgaaaaaccattcaaaaaattttagtgtcagtgaggacatatgagggttttaaaataacacaaaaagatttttctgcaattaaactttttgagatttttacacttcattatcgaaaagttatgttacttagtaaatattttttcatttttgcttaattttaataatgtaatacttagtcgatcatttaattccactaaataatttgaataagtaattctaaaaatttttcaatgaaaacaataaaaaaaataaataccagagcggcatctgcacgaaatgccgaagcaccagcgacaccctctaaaataaaaaaatttcaaaaataaaaaaaacatttgattaccctgaagccatcgcatcatttcgtccaaaaaatagtcactgttcgcatcacatcgtacataagagcctgctgtgcttggacaagcctgtaaaatttttttttaaaaataacaaaaattaaatggttttgctgatttgccggttgtccaaagaaagcggattgcataattgtgccatccgcgttcaaatttgtgccaacaccacggccaaacaaactttggcgcatcatcagacgaaagaaaacgccggcacgaaggccaggaattgcgtcctgagtgatctgaacgggggccaaaaaaggatacaatttagataccagaactcgattttttttggtttttattcaaattttaatcgacaaaaaacgatttagaaaattaaagtttttcggttttttgatttattttgtcaaccgaaccactttttgctttctaaaaaattcaatagtgttttaatgttgcttgactcatcattaagggaagcctcttgattggtgcctaattaccctgataatggctctaatttaaagcattaggttcgatacttaattaattattaccctaatttgtgacctgctgtttgcataaatatggagcaatcattgctgggtcttgtacccgtggccaatccgtgctgtccgggccaacattgatggttgggccctggtccaacacagtggcaaagcccaaatatccattcacagaaatctgagcattatttatatcgttatattttaataattttaaaaaattaaaaaatatattttacactaaaaataaacatatttgaatttttgaaaaataaatttcaaaattaaatgtttagagcattaatataaaaaaatgcaaaaaataaaattaatatttgcttaaaaataaatatgaaattaggtaattacaaaaataaattatataataataatcttattcttactgttgtgtagttgtaaaggcccccgtaaaatgggaagaacagatgaaggtcaatggtctgaccggacgtcaggaaccctggtgacacttcaaggtcgccattttcgggtccaaaaggcaccaaatttactacaaaatgtatttttcaaattaattattgtcaatgaaaccattatattttaatttttggtatcattcaaaagcctaatattttctatttgtctacaaaattaaaaaaaaattttcagaaaacttatgtcaataatatttctatctaatagaaaatacttagagctacgaaagatatcaagtattaaaaatttggttattcttaagaaaaatagaataatttttcgtcaaaaatttccttttggtgttttttcagtaacgactaggcaccaataatcagccattttcagaataaaattcacaaaattaactaagaaaaatttgaatatgattaattacagtaaattttttacttttattttagatatttcctgaatatttttttcacagtcaattttcaattattattgaaaataaaatgataattaccatagtccaatcatttggcaaaaaacactgacagtaatatcgtatacttctgttaaaaattgtccaattacctccataatacatgttggtccctgtgccggtgaatagcattccgggcccgcccggtcccaccgcttgtccttgaggagccggttgttgtggcggcggtggtggcggaggcggtggctgttgtccgcccaaaatttgtgccaaaatcaacagtttttcgtcgattaggacgacgagaaggacaacaattaaacaaaatgacggcaaatggcattggatttggcattttttattgcataatgccattttaaaatagactgatcgtgcaaataaaaatgtacatttatgaatgaattattttaattcccattaaaaaaatatttaaataagtaaaataaaaaattattgtttaagaataacagttgatatgtataattgattgtatcgttactcaaaacaaccaaaaagtgcgttactttaaaaaattaaaaaaaaaaattggttttcgattaaaactggttgtttttaaatggtcaaaaaatttatttcaaatcagaaatcaaagagaccgcaaattccaaaaaaaaattaaaaaaaaaattaaatttaattttttttaatataaaaactaattgcacttataccaggatgcataaaaaataaaatgaatagttaaaaacattcaattgcagataaaataaaaaataaaagaaattaactttgtaataaaacaataaagaaattaacaataatttcacatttacaacaaacactacattagctgacaattagtaaccgaaaagttcattagcagctgtcccatcaaaattagagagggagggggcgacgaggcatcggcgtggtgcgtaaaattttgcgcgtccgcggcggtgggtggcggcgcgttatttaagtgtgttgtgatgtgcgcgactggctggcccttaacggcgggcgggagtaggtcatttatttgcaaatattccaagcagttggtcagtccgtccgcggccactcactcactctcgaccctcattctcgacctccccccccccgccctataatgaccggcaactgcccgtccgtcagtcggaggttcgtcttttgcccccgcgtttcccgcgttttccattgtttacagacagttgccaatgtgacccccccaggcgggcagttggggccaaatcagcagcacacacacgcggaagtgttgtcgtagacaaaattttgccggctctgtccatcacaaaatgaagcttatagtcccccaaaatcgttcataatgtttgccctctgtactgcttctgctttggccactacagcaaaatttctttgtttgcttaatggacataattattttggaaatgaataagccgggccgggggcatagacggattttatgtggacaattcaaatatatttaatattataaatttataaaagtaataaattggtcgactggcggtaaagatagttattgctttattaaattggtaatttttgatgaaaatttttaaatattttgcccccaaatcagtatcgagtaatttctatcaaaaattcccaataagtgcttgttaatcctataatttcgacctattttgtgaattcattttttatgcatttttaaaatacttctttgtttaaaggcaaattttttaaaatttaaataaaagcaatataaagaaatcgatcaatatttaatgaaaaacaaaaaaatatgtaaaatgatacataattttttgtgatctattgactacacctgggatcggtctacctcagttgggcgttcacgtttaggcgcgtacggttgggcgccagcatgtttttccagtataactttctataattttttttctttgtcatccaaatccaacattattggagtcattcgaaaacttaatatgtttagaagctttttctaagccattacttcgcgattagacaattaccaaaaaaaggtatacacgaaaatcgaaaaaaagttcaaaaattttgaaattttttcataaaaacttttttatatgcacgaaagttgtttgttttataagtataatagagcatgttaaaagcttttcaatgataccaagatttttggatttggacaacaaaaaaaagctatagtggatcttacatatccattttattttaaatatcatgaaaattttattgacaataatattttattgttaacattcaaaaatgtgattagccaaattaaacctgaaaaaataaagcaagaaaaaagttttgataaaaatatttggccaaagatgaaacgatggaaaagaagaaaatctttgccaaattggtcaaataattcnnatggag

SEQ ID NO: 14224 - DNA, 5181 bp, Heterodera glycines
  unsure (1)..(5181): unsure at all n locations
gggggcaaaaagtcagcaaattattggaaaaataggggggctccccaaaaactgttcaatttgtgatccagcaacattatgatgttgttgatggccaaagaaaaggccagctaattatgccttaaaaagttgaaaatagatcaaagcgggtagagggggggggaggggattgggatcacttccattattttggccaggcaggggtttcccttcatctgtagtgaatgtgaccgggggttggtatgctaccatcccggtaactatcgtaaacccatcctctgtttacactccagtattaacaacctaaccgagtttttgagggagggcaagactgaaacgacatgtccaaccgagacaacagaaacgaccagcagcacaatcatctgtcctccgcctccaccaacgacaactcacagcattctactgttgttcatcacttctctcctccttttggtctttttcgcgcaggtccacccccctcccccgtctaatcattaattattttttaatcctttttcaatttacaggctttcaaaatgggcattgtggcgcggcgtctgctaaaaaaccgggccattcaaaagcagttggaccgtcgacaaaaaagtcggttgaattatgtggaaaaattttaaaagaaattttttttttttcaagatatgaaaacacttcgccgtcagcaggcggcagctggtcggtcgcccattgttgtgcattcggcgggcattggtttgccaaggaccgagccggttcatcaagtaaaaagttttcacatttttttttgtttactgaaaacacttttttttttttttttttttttagcgccaggaaatctgcacagtgcccgcccatgaagtcatctacgacgtgccttttgatggaaaaagagaggaagacgaggactcattctgatggacgattaaatttaactcgataatcatttaactcattttttcatttcctttttaaatttaactccataatcatttaactcatttttcatttgccttttaattacatacttatatggaaaataaaaaggataaattgaaggagagtttaaaataaattaaactgtacactgacaatggtaacaaattaggcgaaatgttaggcttgggttttacaaaaatttgaattcgtcatgcatatttaattaagagaaatatttgatcatacaaattaggccagatgttaggaccaatatttgaattcgttgtccaattattgcatatttaattcgtatgaatattcaatcattcgaattaggtcaaattcgcggcttggatttgtcaaaatttaaattcagcgaccgatttgtacatatttaatttcaattgtgtggcttgggctgatctaaatctgaattcgtcgtccgatcggtgcatagataattagggaatttttaattttgcatatacatcaaaattttgtcggtattaagtaaagcaaaaattcaaatttaccgacaacacaaaacaattaaaatgggtcaagaataacaaatttgtttgtgattaattagattttttgaatataaaaggtgcagtacgaaggtttaccgttcataaaccaaattcataattcccttcatatattgtttttatgcaaaaataaaatatattttaaattgactcattcgcctcccaccctgctcttttcgtttcttaaaatttttcacatttactgtttacattttaccatattgcattattccaataaatttaaaaataaaattttgtttagcatttatccataaactaacttttatttattccaaattttaaaaatgtctacatcggaatcaaaaaatggtaaaaaatctcaattcctcccttaacattaacaatctttcacctacagcaccggacaaaggcgactgcgaaatgcccgatgaacgtgttctacacctcgagtgctttgagagcggtgattatgatgtaaataattgttgaaaattccatttttttccctcaattttaatccatttcagatgatggaattgtacgggccggaccgtgctaaagagatgctgatcgaattgcgcgactatgctgaggcgcacggaatgccatgtcagtatgtgaagatgctgctgtacaaactggacaaaggactgatcaaatggaagggaaccaagccatgaaatggatgatgagtgatcagatattttggtgacaggacgaaggggggatgattgaactcattggtgatgaatgtgattttaaaaaaaaataaataaaatttgagaagaaatatttggaaatgaaataattgttcactgtttggtcatccctgatcggtcacacggggttcatttatgagcgcccatctcgccaaaattatcgttataaaatgggcgtggcacctggcccgacttttttgcgtataaatacgggctcaccgggtggcatttttcatttggcgtcccttttcaaattcacaattcctatggcgatcaatatctccgacaaaaaatcgttgttcaaccaaatcctcggccaaacggacctcaccgtgacctcgagtggtataaccatcagcggtccccgcctctcgacacctcgcttcatcccatttgatgaagccggtcgttgtagatgctgtaagggaactgagtccgaaattgacactgtgattacgaaagaaggcatcacgctttggtgcacgcgcatagagaaggcccaattcattccgttcgatgtggtgtacgatttgccgggtcattgctttttccgtttgaaaaataagtctcgagtgttcaacataccctacggcgacataccctcttctgacacgcacaccactaaacggccccgcaccaatgactatcatcaacatgagctgaagcgcaaagcaaaggtagctcttgacttagtggaggccggactaatggccgatgccatgcaggacggcgcacgctggaagaaggcgaaaacagcaatcaatgtgctcggcaacctccttttggcggaatcgctggacaccacctccgctactccgctgaaaaatgatgtcgcggacatcaaaaaagaagaagaagcaactgtggcggaagaacacaaagaagatgatgatgaccaacaaaaagaggacctcggagacattgacaaaacgcttgacgatttcttcaacagtattaaagcatccacagcaaacatgtagaccctcattttgtgtaaaaaatgttaaacagccaagcattcagcgataaagacatttgctttaaattaccatttggtctaatcatttcggggccttcgtcgtcgggaaaaactcaatttctgctaaaattcattgccgaatcggaccaattaatcacaccaaagcctgtgtccatgctctattgttttggtgaaatgaatgcggcggtgcctgtgcttcaaaaggcaggagttgatgtgtacgcgggagtcccatccgaggaattgattaagcgcctccctaagcctcttttgctcgtccttgacgacttgatgctgtccgttgatgagcgatacttgtccgatttgttcactaaaaaggctcaccaccatcagtttgcagtggtgtttgtcactcaaaatttgtttgagcgaaagataaaagtggcccgcctgtccgctcagtacttggtactgatgcgggccccaaattcactgctgtccatccgcaacattggcgtgcagctctttccgcgtcagcttgacttttttcttgacgcctaccgtaaggcgaccgcccggccctatggttatctgttgatcgacatgcatgcagcatcggacccatcgctgcggcttcgcacaaatatatttaaggatgagcaggaggaagatgaagggacagttgtgttcattcctaaaaatggagcggcataagcaacaacaagcagtggttggccaactgataaaagaaaatgcgcagtggctctgtgcactggccagaacgaaatccgccaaaaaatgtaaaaagctgattcgaatggcaagcaccgaacagctgctctcacttgttgaaatttgtttgaatctcgtcgcttcgcgcttccgacttacaacccgacagaaaaagcgattaatgccccatgtgaacactgtacgccggatgagcagagcgagaagtgagcggggcgccaggcgcgtgctggtccagaaaggcgcaggatttggcggattgttcgctgctcttttaacacccgttttggttgaattggcaaagaatgttgtgagcaaaaatgcataaatacccccctcatcattgttgtaattttcatgcaccaatcattcattattcatggcaaataaatttctacttgttcctcaagaaatttaccggggtctcaccactgcgacggacacgggcgatttaaacttggatgctgttcgacacgatttgaatcgtgcccgggccgaacgagcacatccctctcgaaaaaatgtcaactacaaccagcagcttaggcgatatttaaaaatgcggcgagagctagcagacagaccggccaaagttgagctcaccaaagggataagcgtgctgttgaggagaggtgctgaagatgaagagggtgaagttgtggacactccatcccgtcctcccccaccaccaccacctccacctggaggacgccctcggctcccaccaagtcctccgggtcgcgctccgtccccaccagggagtcctccgcctcgcccacaacgtcctcccagaccgactagggcttctcggagagacgatcgcctggagcagtgggagaaaaggcgacacgatatacaaagacggcgaccggttgtgcgggaccttcttgcggaagcagctgctgcccccttaccggaaagttatacagatgatgagtacatgttggagagtgggttagcgctgccaacaccatcccaatactatggggacttgcctgtggtgccataccaacatcaaattgagcagatggacactgctgctgctcagcacaggattgccatcagaagaaaattaaaaaaggacgaagcatatgatgattcggaccgcaaaaaatacagggtttattatcctccttcacctccccggctcccgctcccgcctcgtgcgaaagcaaaaattgaaccaacaccgcgtcctaccgccaagagagagcctcagaagccaacaaagttggaactaanaccatcaaaatttgagcccgatttacgaacaaaagtcgcaccg

SEQ ID NO: 14225 - DNA, 765 bp, Heterodera glycines
agttcctttcaatttcaataaatattctatattataaatttctaactttatttttaataagtaaaaggatttttttaatttgataaatttataatacatccaataatacaattttcttatttatttcattttaaaccatgattgtacctcttctaatcatttttttaactcttctaatctctgttgtacctcttctaatcattgtttgtacctattctaatcacttgtacctcttttaatcactgttgtacctcttctaatcactgttgtacctcttctaatcaaagttgtacctcttctgatcacagttgtaacgggcgcgaggcgcccgtccgatctcaacaaatttaaaaaacgggcgcgaagcgcccgtcagaggccgcgaagcggccgaaaaggcccaactaaatttaaaaacgggcgcgaagcgcccgtctgagcttaacaaatttaaaaaacgggcgcgaagcgcccgtcaaagcaaaacaaaatatgaaaaacgggcgcgaagcgcccgtcaaagcaaaacaaaatatgaaaaacgggcgcgaagcgcccgtcaaagcaaaacaaatttaaaaaacgggcgcgaagcgcccgtcagagcaaaacaaatttaaaaaacgggcgcgaagcgcccgtcagagcaaaacaaatttaaaaaacgggcgcgaagcgcccgtcatagcaaaacaaatttaaaaaacgggcgccaagcgcccgtcagagcaaaacaaatttaagaaacgggcgcgaagcgcccgt

SEQ ID NO: 14226 - DNA, 1147 bp, Heterodera glycines
ccgtcagaggacgacaaaattttaaaaacgggcgcaaagcgcccgtttgaggccgcaaagcggcctaaaaatcgctaaaattttaaaaaattccaaatctcttcaccacccaatatttaaaaacgggcgcgaagcgcgttacttctttttatcacagatgtacctctatttatcacttttatacctcttctaatcaccgttgtaacgggcgcgaatcgcccgttcgaggccgcgaagcggcctaaaaatccctgaaaaaaccgtagttgtacctcttctgatcagaattgtaccttcccacccgtggttgtacctcttcccccgtaacagcctaggtagcgaagctccgaaagcgcgaagcgctttttcccagctaaatagccgacggttcacgcacccgctagttatatatatgttatattgacaaggcaactcatcctcaaaaaggatatctcaagaccgggaatagctagggggctgaaattttgcaccaaggggtaactcgagacggcgcatctgggaaaactataggttttttggtccgaggcccaactgagtaccaggggccgatttcccgtttttgctcgcagttcaaggcccgtaactttttttctgaaactctaatcgaaaaatgtccgctggtaggaaactaagttgaagtgttgactaaaaaacaaaaaaaaatccaggcctctacctataataggaagggctgcagaaaaatggagaaattcagtaccaactttgaccagttcagtcccgggtgaataacacgtcagggtttgaattgatcaagggggtgccagcgggactattgtagagctttaaaagcccgatttttccagtttttaaaatttcgaaaattttcaaaattttccgagttaggcctaaaagtaggttttggggtttttgaattttatgattttttaacgatttttcccagacaaacggagaccactttcaagcaaccgtttttgatgctctatcgattggtaatttttttgaaaaaatttcggttttttcccggaaatagaaaaaaatttgggcctgagcgggacatttgagtcccgggcccataactcgtcaggggttgcttttagccgggaagtggccttagagcaaaattgtagagctttttaaactctat

SEQ ID NO: 14227 - DNA, 3824 bp, Heterodera glycines
  unsure (1)..(3824): unsure at all n locations
attaaaaatgcttttatccaattcagcaatttaccccgtataccaatttttgtgttaaatattaattatactttgttctcattttaaattattttatttggcgttttgttttctcaattttcttcccatttttacttctttggattttttgattattcgtctccggtctccaaaaatcttctgcatttttgatattttgattgtgcttaaaaataagtcttctctcgcctctgacgtttgtttggattgttattttgttgttccgagctttattctaatttgttgttttgtttctcaattaaagtgattagcctaattgtgtgtctgatttggcgaattcggttgcagcagagcgaagaaaaaatattcggttgtgcattacgtggcgctcctggcagtctcgggtaagctcactgcgtttaaagtttttctatcttcgggtgaaatcgaagcgtccttgggctttttggcgttgttgaccccgaagaccgggaataacgctgcttgcagactgctcaaagactgagactgcagataaaacaaaatttgtcgaaattcgaagttgctcaaagactgaggcttgctcaccattcaactgtattatctcaaagactgagaaacgttgtgaaatttggaaatacattattgattgtaaaatgaaccaagacggttaaaagaatgattacgagatcacccccattaacacgacagcgagctctaaaccttggaattgaactagacaatggcggaaagcaaattttggaaagagtgaatccgaattcgaaccagaatccctctctaagtctagaattggggaatggtcacagagaaatggttgatgatggtggtggtttaggacaaagccgacttttgaacgaacaacaactgcgaaatcgtttgctgacagtgaccatgctcgacaacaacaatccagtcgtacatgtaccaaatgaaaatgtgcagaaccaacgcattgcaatgaatgctccgcttgtcaattcgggtatttttggctcaaataacgggaatgtgggtgactattctgaagagttaggaggtacacgaattttgcaaaatcgaccaaacagtaattcgggtgcaatcaatttgaataatgcggaaatgatcccaacatatccaccagcactcgcatcaacccctgttgaaaattttggcaatttggcacgaaattcggaaaatgaaaattttgcgttcatcgagcataacgaagtgcgcgcacaatacacgcagcctcggagtactgaaaacattaggcctatttttgtgcgccaaacagctattcattcgcatctaagtgctatgcgtttaccacccatccaacagccggttgtggcaatagatttccctgagcagtttgtccagagaaatacccaaactaacatgccgcaaccacctttctatggcaatcaacgccaaaatgaaaatttgcaccaaaatttacaacgagttgctggcaacgaagtacaacaaagaggagtgcatataaacccaggaaattttccggaaagggttaatgctccaaatgccgatgcttttcatatgcgacgggaaatgcatgatttagttctgacacaagcaattaaaagcttggataatttctcttattcaatgacgttgaattcactcccagagctgaaagggaatacaggctcagatgcggttcgagcatttttccgtcattttgatgttgcaactgaagaatggccagaggctaagcgccttagcgcacttaggtcaaagtgttcaggccgtgctgaacgcgctttcaatgtcgccgtctcgaacaatccatttcggtacgagaatgttaaaaggtctatggtgcaacaactggaagagacggatgcgagacaaatgtccgcatttgacgagcttatgtcagggatttctcgccgaaataatgaaaggattgacgatttggcagatcgggtctcttccctagtcagaaaggcttaccctggcttgttggagcatctttatgatgattactcaatccgtcattttatcagagcacttcagaaccccgaacttgcactcactcttaaattagcccgtagaccatcaatgatttttgatgagtttgtagcattagctgctcgggccgaagcaactcaaaaggcgtcaaagatttcattgcaaaaacaacgaaatataccaaatttccaagaccataatcagtctgttcactacaatccccggccaatgcaacagactttccgcaatgaaaattttccgcggatcagtcagagtcaaaaccgacaaaattgttacaattgtggtcgtttcgggcattttgcccgacaatgcaattacccgcggcaagttagaactgaaaatgctaacattggtactccagcgactggtgccaacaaaacatcagtcgaagtgcctaaagacacgtcacagccacaatacaacaaaccgctaccgttttcaagaaattatctccgtcaaaattttcttgttgaacaacaagaaaatcctccaccgacgtcacaaaattttttgattggaggaatttcaatgagtaatgatgaattggagaaactttttgaaagagacaaaagcgttgaagccggaaatagtcgagcaaagttgttgaatgtctctgttggtaaaatcatggtcattaaagtttttgtttgtgatttatcagccacggccatgttggacggaggagcacaagtttcacttgtgtcctttgcttttttctcgaaaattatgactgagaaaaacatcgataaaattctactttgtccgacccgcgaaagcactcaagttgttgacataaacgggaaaacagtagagtatgttggagttgtgtcattaccaattgtcagaaaaaatactaaagtttggatcagatttcatgtgacaaatgcgtcatttggttatgagtttctttttggcaccaatgcattggcgcgtctggttttaagctttatgacggcctgaacaacgaaatgatcaattttactgaagttgataatgaggagaaaaatccggtgcatgttatttaccggacgactttgttgcctcgtgccacaaccttgattgagatgtcaggaccaatgagtttggaaggaaagaatgtggcaatttttccaaatttggaaactgaaaaagaaatccgaattgaaccaacaattactgtttcggaaaacggaaaatttgttgcacctgtaaccaatttttcttcacttccaatgattatggaaatgaatgaatgtgttggaaatgccgaagttgttgaggaatttgccgaagtggaagatttccttctctcaccattggttgctcatgtcagtgctgggcatcaaaatgaagaaaaattaccaaaatttgagtcaataagggaggtttggttgccaagggtcaaagaccttcaagaaagtcaaattgaaaatttggatcagttgatcaatcagtttaaaaatgttttcgctttgcacgaccatgaattaactcagacgagtttggttgaacatgtcattgataccggagatgcgacgccaataaggagcagaatgcggccagttccgtatgcttatcgagaaaaagtttctgaaatgttgagggactatttgggtcgaggactcattcggccatctaattcaccgtgggcaagtccaattgtgcttgtgccaaaacgagatggaactttacgattttgtatcgattacagagcaattaactcagtaactaaaaaggacgcctttccacttccaaacatcgattacattttaatggcgttaggcggaaaacgctatttttcaactcttgattttatgtccgngttattg

SEQ ID NO: 14228 - DNA, 2018 bp, Heterodera glycines
  unsure (1)..(2018): unsure at all n locations
tttttaagggttagtgaatatagaaacccaacttaaaaagatagccccaggcaattccccctggggggttctttccgtaatcaaaaagtttagcgtcgctatcagacttaattaagcaccgccaatcacctgccaatgatctgagctttaccctcagcttctcctcctcgttgttcatttccttcagttcctcatatcctccacccttcgtaataaattctctcctccgattggccaattggccaaaaataatttaatttatttaattattttttaaggcttagtgaatatagaaacccaactaaaagatagccccaggcaattccccctggggggttctttccgtaatcaaaaagtttagcgtcgctatcagacttaattaagcaccgccaatcacctgccaatgatctgagctttaccctcagcttctcctcctcgttgttcatttccttcagttcctcatatcctccacccttcgtaataaattctctcctccgattggccaattggccaatttcgttggccattttcgctgacaatgcgtcactttgttcgtaatttattcgttcttcggttttaaaaatttcttcttggggtgcgaaggtggtgagtccaatgtcaaaagcaacgaaagtgttcggactgatttcgaatttgaactcaattagcggcatccacgcgtccggcgtccgattgagcttcgccacttttgccacctaaacgatgggcgcggaattttaattttgcccaagcactagcacttttgtaataaccgtaatttcacattgaatttgatcaatatgtattttctgaaactcgaaaaagtttgttgcaattcttaatgcttcgcggtttttgaatcaatttaaaaaattaaaaatcaattttggggtgccgataggcgccaccggggaaagttttcgaaattttgttctaatttgttacaaattttctgcaattttgaaaaatagaaaaaagtgtcattcttctttcttgagcccataatttgaacttcgaatattttaacgaagctcgaagttcgatgcccaaaaaatcgattgggctttaaagtacgaagcccaaagtttcgcccgtcactgatctcagcagaagtattttttaagtttaaaccccaattttttgacactcaccaaacagagatggcagaagagtgaattgtcggcgcattttctgtcgccgttcgactgaatttcacattttgcactcccaaaaaactgtgccgcttcccatgagggcaattctggcacaacacaaatggcatcgatgtccgactttttggtgagtgcgcccaattggtaggcgcccgtgacgataagtttcgacatggaattcttaaatttgagaagcgttttcttttcttcttaattaccttacccatttccttataatttgttcaagttcgctaattgcctcttcaattttgagtttctgttcgttttctatgagcccaaagccattttttgaaatgaatgaatccaactaaacgttaatattttaaattattttggctttttaatgctttttcagcttccgatttaccgaggcttcgatatcattggccattaattgtccattttgtccaacaaaatgcttttttatctcctgcaaatgcaatgaaattccgaaaatttgagcaaattcaaattcttgtcgcaaatattttgacaattccatgtgcaatttttgatctaaataattcgatttgtaaattaataaaatttatttattttttatttgcttaccctgctcaatttgctcaatcattagagaaaatcggttgaaaaatgggcaaaataaatccaattccgtgccaaccaatggcttttcctcgcttttatcacgcttttcatactttttcttatggcattttttccaagtgaattcaattagcgtttgtgcaaaattttcttttggcgtttgacccaatttnngaattcgttttttcgttctgctaaactcaanatgatttttgtccgctanaagtgccaatgccattt

SEQ ID NO: 14229 - DNA, 3047 bp, Heterodera glycines
cctttttctgtgctattattattattattattagttttatcttggtctatttttgtatttttattctgctgtttatgtttctcccttctgtttttacttttttttgtttcttttttcttttgtgttattttttcctttttctctttttctttttctctcattgtttctccttcgcttccattgtctttttcgttttctttttgtgttatttcaaagtttgtgccatcatttttatgtgtttttggcattaattttgcataagattctttctcaacaaattgtccatccttttcgcttaaattactttctgatggaattctgtcagctgacactttgacttttttcaactttttttcttccattccattcattggcattttgtcttcgttttgattttcttcctccgattttgtgccaatttctgatggcattttgtttggctttggctttttctttcccttttttttctttttatcttttccctcattattctcctccgaattcacatatttcagtgcttcgtccacatcaaaaacttttgttttgtcggcttcttcttcatcttttcccaatttatttccattttttctttctttttcatccgagtaattttcttcatttttttcattgaaattttcattttgatttttgacattttcttcgaaatttgcaaatttttctttgcatttttcggccaggtcgaaaatttcgctgacattttctacttcgcccacaaatgtatcaattcgcatcacattgtacgctgctccttaatcagcaattttattgtaaacaattgatgttaatcaaaacttaattacatcattatctgtcgttaatttttttttattgttacattttttatttggcaaattattgaatatgatggcctaacatttcccctatttaagatgttcaatgtgataacgttctttattccgtaggggtaaatgattacatggtgaaatacccgaaacgtaacgggaggggggagtttggtcgggatccggcggatcagggctgggcgaaacttcggcttcggcttcgaaaacttcgggttttttgagcttcgaacttcgtgcttcggcttcggctattttacccgaagtttcgggaaaaatacacctctaaagattgagttttcaatgtgaaaatgcaccactagtgattgacttttggtaaacttaaaattaatatatatttaaactatttgcttatttgtgctttttcgcatgcttggtcgagtggtaattctctcggctcttttcattatgtttcctttgggtcagttcccatcaaagtagttgcttttcttctaattttcaaaaatattcatttttttcgacagaaatttaataaaatttaacaattaaaatcgcaaaatttttttcatttttggactaaatctgttaacaatgcactaaaaatttcaaaattttcaccggcggcgcctatcggcaccgccggagctccaaaatttcctttattttttaaatcgactcaaaaactgtgaatattctaagaagtataaaaatttacaaaatacattgctaaaaaaattcattatatttatttatcgaaaagggttggttgggctctagaaactgcgtcaattgattaaatttgatatttaaccgaaattatgtgatgaaaaaaattttagaattaaaaaaaattttgaaaaaacttcggcttcgaaaacttcgggttttttgggcttcgagcttcggcttcggcttcgaataaaaattgggcttcgccttcggcttcgagtgctaagccgagcttcgcccagccctggtggggagagatattaatttgtaaaaaaagaattagaatttttgtgtaacttgtgctgcaaatgtctgttctgctgcaagtcaatcgaattacatacaaattacagtagtgattataccacctacaaccgcgcctttcatcactcatttgttcagttaacaagatgagagtgtgtgatcagattttacattaatatgtgagtgatcagtgtgatcagagtgatcaatccattcgtgagtcgatcaaagggtcgtcaatggcactgtgggcgtgtgcgctcgatgccgtgccgacatcatcgactgcgcggacggtgacagctcctccagcgtggccaactggacaaccacctgcaaagaaaatgcgaaaaaattaacacaatgccaatttcaaaaaatttaaaaaaaaccataaaaaaattccatgaaaatcctgacgagattttccgatttaaaatagtgtggaatttccactaaaaatgccatgaatttcggcacttccccccacctgtgaactgctcgagtgacgatgcaatgatcggcgcttgaactgctgcgtgtaggcaacccgcattgattccacctgcgcgagaatgtgtgaaaaatgtgcaaatgccattggttgagcaaaaaaaaaatgggccaaattttcttaccaagaaatttgtgagcgttatccaggccctgaatgcttcgcgctttccgcgcacggattccgtctaaatacacacataaaaattgtacaatcagcctttttttcatcggcatatgtagattaagccctttccaaaattgtttattaaaatttggtttatttatagaacataaaaggtaactcgtccggtgggattcgaacacacggcttttacataccgtggaatgctcgaaccgactgagctatggaggccgctcccttttgacccatgtccttctttatcccactttctcctataatccgtgcttcctctggcatcaccaattataactttttaattggcctaatattttttaattttctcttagaaattggcccatcagcattatgtaaatttgccatttttgtccacatattttaaatactttgtgtattttttaatagggtcgagatcgttttcgtatgagacgcaagtttttggctagaactttttcctttgccaaccaaatccaacaatcttggttcattcgatagtcctaggtgtcctctattagcctccaaaatttcgaaaagtttcgttaagggtcaaaaaa

SEQ ID NO: 14230 - DNA, 1654 bp, Heterodera glycines
tgcatattttattttttatcacttttttacccattgaatcggtgcgtcgggtcgaaaatgagcaagaaatgattaaagtaagtcatttaaatttttgaaaattaatcacttataaatacttttgatctaatgtaaggcaaaaatctttttcattttgcaattaggataagccaaacgaatatttagatttgctgcaaaaaataggcagcgattatttcttattttccaaaaattccaatttttgtcactgatgaattgagttatcccatttctaattatttaatttacaaaaaatttatttctaattatatatggttcaataaattatagtttaaaaacaacggcgaactcaaagtggcacagatttacccactttcaatcaatcaactcattgatcaggagataacagtggaacaaattgccacaaaaatccgaggaaaaagcaacgatttgtgggaggggcaagtggccaaatgggcaaaaaaatgggtgggaacgaaggacaaaatcagcgagaagaaaaaggcaaagggcaataatgggaaaagcgcgtacttctccaaattctatgacagtctgagaatggaccgtctcgtgctgttggccaacaacattcgtgaagcatcgataaataaggtgggggccgggtcactttggcgcgggatattttggcgccgcaaagtttaaagtgttcattctcttttctatgaaacgaagaaatggcattcggcgccaaaacggccagaaaatttgaattttttgaggtttttggccataactttttttgtgtctaactaaattttttgaaattttgcaggtggttaggggacctggatacccggtttttcaatatccggaccatgttttttgaaaatccaatatctggtacccgacccggtaggtccgggtctaaaagtacactgataagaatgggggtctggtcaaattgttaagcaaagttggaggagaaacatacaactgtatttaaattataattttatttgacctcgcaataacatgaatataaaaataaactttatttgtagaaatttactgatagtactgatgtgatcgaaatccttgtcacgacaaccaatcaggaaaaggacaagacggggattagtgagacattttgtcacaaattagcccaagaaaacgaagtgtccggcaattataaacacattttgataccgttatgcatgaacaggcgcaacgaagtgttcagagaagatgaagaagtgatcaaccaaacagacgaaaaggcaattttactgagaaattatgattagggtcaaattttagtcatgtaaaaaaaacgagaaaagtcacgaaaacgacaaaacatttttaaacaattttaagtagcaaaaagcctaaagggtggatttttctgtttcaattatagaagaaacaaatccaacttcgaattttttgaaattaagcaaaaattcaaaaagaatatttgataaagaaaacaattttaggagaagcattatggaaaatatactttgtcacgaaaaataatgtcttagaaatctttaaatcaagttaaaatgtcgttatgtgcatattaggccaaccaaagtcagtagataaaaagtcaattagtggtgagccgaagtgacaaaaatatcaatgtttatattatttaaat

SEQ ID NO: 14231 - DNA, 1283 bp, Heterodera glycines
  unsure (1)..(1283): unsure at all n locations
gaccataaaaatatataacctataattccttcatacttttttcagaaacatccaattntaatntaatttatataattagatagcccaaagattaatgaattntaaaaagttagggtcaaaattgttgagtctaaatttttgattaagctaagttatgctttatcattaagcaaataaaaataataaattaaatattacaaacattgaaaatacttttgtcacttcgtcctagcaccaagtcaattgacggaaaaactggcctaataataaagttgatttttttttgtaaaatttttaggttattgaacgattaaacgaaatcgtcaaagatcctcataacttcgcagaattgaccgaaaatgaccttttggtgaatgcgctagtcacttttagttttcccaaattgcgtcacattttcaaaaaatacgaagaaaaatatggggaaaaaattgaagagcaggtggacaacgcttacatcaaagaattcaaacatttatcaaaaaaccgaataatgaatctacttaaactggaccttcatgtcgagcaacatttttgggtaattattttttgtgttaaattttttgatagatgcattatgtatttgtttagcaaagttaattaattaaaagagattttagaaggaaagaatttttaaaaaatgtgaaattgctcacaattttttgaaagattcatcatgcatttgtttagcaatttttcaaaattttattcctttcgctttttagctttttctcaaaaacttttttctgaattcggaaaaattttcacattgcaaaaaatccttgagtctgacccggacgaaataattaaatttagcaaacattgaacgcaatcttaacggacattcaaggtcgcccatatttttttgcacaattattgaaagaaaagcttgacaaattgcgaggaaacgaaaagtgggcctcagcggacgcgctgaaagacgtgacgcgaattttgctcactcgcgcacccatcgatttggccgacattgaccaggaatttcagggattgagtggcagcttgaccataagaatttcgatttcggcttacatcgagcaaattatcggattcgaaaaagagaaaaagcaaaaaaagggaaatgtttttcgaagcttttccatacgttcaaaatcgcacgaagacattggcaccgccgttagtagcgaatccaatacggcagcagcagaaggaaagccatcgcagaaaattgaactttgaaggcattcaaagaaattgtcgattgggcaacggaacaccgaaggctg

SEQ ID NO: 14232 - DNA, 2487 bp, Heterodera glycines
ctattttttgttagtttgaccacttcccatgaaccgatcgagttgaaattttaaggcaattgtgaaaatattaagattctaacagtgacaagacgaaatgacaacggaaaaaaaattttacgaatttttttccaaaattggggtgttaaataaatataaggacacttgtgaaaaacggacaaaatctcaacaactaacaaaaagaaactgataaaacaagttaaataagaaagaactaatctttttacacatttctgtttattttactgacagaaatatgtcttttagggagagttatgttgaattttctaagttttccgtagaaattaagggccaaaaggcttaaatcgcctctaacatttgaccaaccgaataaaactgactgcaaacaactctaaaataatgtacagacatcctataaacattttctattcactttatgtcagaaaaaagtcattaaacacaaaatttttgagggcgaaaaaatgcgtaaatctgggtaaattcgtaaaaaatttcttatatacatatttcgggatttttttacatattacatatgtacatattttggaatttttagtacgtattttgcaattttttctttttattttttttttgcatattttgggaatttttgagaatttataaaaaatttcataagaaaaattcgctgacccacaaattgtccaagccacgaattgtccaagccacgaattgtccaagccacgaattgtccaagccacgaattgtccaagccacgaattgtccaagccacgaattgtccaagccacgaattgtccaagccacgaattgtccaagccacgaattgtccaagccacgttttgtccaagccacgaattgtccaaaagagtaaaaacccacgaattgtccaaaagtctaaaaagctcataaaaagccggaaaacgggtctgttttaggcttttcggggtcgctgaatacgaatacgacatttatatagccccttgcctaaccctaaacacaaatataaccatgaaataggaaaaaattttaatttctaagcgaccaaaattcgaacaaatttttaatgctcctattgtgatccgaattctctctatagacacaccctcagcttcacatattgaaaaaaataattttattaaacattcaataaaatcatcacggaacatggacaattgaatcatcgtaatttttaaaatctctcaattttcccgcatatccttcaacttggagaccaagcgccgacatcagatcactaatttcaccattgctgttgtacgacgcgtccgccaaaattcgcataatgacagcatcctggaggatgtatcgtttgtgtcgcttgtgaatgaaatggcgagcagatcgggcagcgtccacctgtctgtcgatgcttttattaaccccacaaatgaagtccgagagggcggggtggtgacagaggcctttctaaatgtttcttttcaatttgtttttaataaattaaagaccataaaatgaagatgagttgcctccagtccgttgtttgtacgagcgagggcagatgttgcctgtgagtgcatgttccaaagcggaattggaaaatgtggcgcacgaacgatttcgtcctcccacgctggaactgaatttttttattaaatttaaacggatgattgattaaagattttgcctgaaggagctgtcaaagtcggtagcgggctcaacgaatattgaacaagctgctcccgtggactcacagtggttggccacgtaagagttgatggtgccgatgccgaactgtattggggtagccgcatagctgtgttccgaattgatggtcgaaattgttgtcccgagtgcagctaaaaattaaatttttggaaataaaatgcataaatttaaacaaacaatgattgccaatgggtgaaaaattgagtggattatctccaaatgcgttaacaccatccaacaactggcgctgtgtcaagccgatgtatgttcgagagaagtaaaggaagaacactggcattccaggaggagaagacgccacgataattgagaaatcccagcaactttttcttctcacgccgcatcatttcagtcaacgcattgttggagctcatggcaacaatggcttcatccgttgctgatcgcctcactttagccaaaagtcgtctgacagataacgcttcttccgacttttttgtagactttcaagtttattacgaatcatttgttcaattaatgaaaagaaaaatctgaagtaaaaaaagagcacatattttagacaaatgagattttttcttatccgagtggatctagggttaggcaaggggctatataaatgtcgtattcgtattcagcgaccccgaaaagcctaaaacagacccgttttccggctttttagacttttggacaattcgtgggtttttactcttttggacaattcgtggcttggacaattcgtggcttggacaattcgtggcttggacactttgtgggggcgccata

SEQ ID NO: 14233 - DNA, 1206 bp, Heterodera glycines
  unsure (1)..(1206): unsure at all n locations
aaaaactataaaaatcttgtcacatgcaaaatngtaagaaaatgtgnaaatataatacaaaaattgaaaaactaagggacataaaactgatacaagctcaaatgaatttgtaaattttttaaattaaccaaaaaatttaattataattggaaatctttaaaaaaagaaatgttcgaattgtagcaaattcctttttcaatcttctcattgttgcacttccaattctcaattccttgccaattatttttattgagtgaaaaagccgaataataaaactattttaaatcacataatggtaaaattcgggacccgtagtgccccgggggtgataggtcgtttcttaaatccgcaaaggggtaggaaaacataaaagaatcacacctataaattcataacttggctcaatttcaattaaatttatatatttgttggtatccattcaatagagctctaagtgttctctttcagaatataattttcaaaaattaaaaaagtttaaaaaaaagttatggttataaaatttcaaatacttaagtcaggattttttgtccataacttttttcaaactctttgatttttattaaaactttaaaatttatagattatacaaaagtgtattaaattattaaaagaaaatttaatataattgcatcagaaaaataaaacttataaagcattaaatattctatgctttttgacatggtcatgcaaatatattataaccgtttaataattttaaataattccagaattgagccaaattaattttatattcaatagccgagtttcaaaaaaattcattgagtttcaaaaaattatggacaaaaaattcttacttagacttaatgaaattttataatcataattttttttttttatattcgtttaaaaaatttttaaaatttatgttctgaaagagaacacctaaagcaattgagtgatacgaagaagtattaatttggttgaaattggggtaagaaaaacgaattggcccaaaatacaattagggtttttagtccacacaaaataataggaattatccaaatcaaaattcggaaattgaagcaaatttccttttccattttctcagtgtcatatacgaaaatcccaatttcttagcaattatttcctcgctaatttttgagttcgcttctttaatttcaaaatattgcttcatcttttctaatttctcctcattggtatatg

SEQ ID NO: 14234 - DNA, 1826 bp, Heterodera glycines
  unsure (1)..(1826): unsure at all n locations
ttttgttcaattttaatcaaactttcttcactttcatttttgtcccatccgttgccaaaaatttcttcaaaatttgctctgagtttgccggattcatttacataaattatgaaaaatataataaatattaaattccacaaattcatttttactattcgtgaaatgtttgtgtagaaaatatttttatatggaatgcattttattgaaattatattgcttaatttcaacttaataatcaatattaaatggttagtgacttttattatatttaacaatctaatcaattcaccaaatcattttataattatttggaaaaaattatactgacttattttttgcaaagtaattttttttttaaataatacccaaaagaaccccaaaaagtcagagttttcaaatatttgtgaaaattttcagaatgagaattgtttaataattatttcataatttattttattgcctcgttaaaaacatctttaggaatataattatcccactaattattgccttctttttgcttttcgccaccatttttctttgtctaaaattgattgataattatttgcctcctcgtctccccttaaaaaaagtggtcgtccgcgtgcactcttcgtcatttatcatcaaattaatctgtgactgaccgaaatgaaatatttttatttcttttcttaattaaatggttgatgtaatccaccaatgattttcgtacatatttaatacataattttctttaacttttctatatttattaatatctaattttgtaataaaatattgactttaatgcttttctaaatatcacaccttacctttttagtatttgacaaacaaaaattgtcataattttttaataaattcgctatttaaatataaaataacatttttataatatttaatgtattaaatttaatattaatatttttggaaatagacaaaatttaaatgtgaattttaaatttttggtgacgtcattaaacaattatttttccaataaaaacatcaacaaaacaatacttttctgtgtggaaaattgtttttggcatcggcatgaaataatttatgcctgaataagcccttccttntaagccactcaaaagcnctcttattgagttccctccccaatgagaaggagcacttgtcaaacaaacgaaaaatgcccaattttcaaatatttcattattttcagtctaaaatatttaaaatttaattaagactattttaaataatttttaataaacaattgtttttttttgattttttaaataaaattctgactacaaagctagttttttaaattaatttccccttaattaattcttcccattttaagtgtccgacaatttaaaaaaaatccaaaatgattcaaaataacattactaatgacaacaacaataacaataataataatgccccgaataatggcaataatggcattttcaaccacattcatcaccagcagcccacaactgatgaagcaaaacaactccgtgccaccaatattgggctagccgagtgcttgaagggtggtgtgattatggatgtgatgaatgcggaacaggcaaagattgcgcaggaagcgggtgccgttgcggtgatggcattggaacgcattccggcactgatccgacaggtggtgtagataaaaactgagaaaaaaaagaaaattttgtgctaaatttttataaatcattttttttattataggaatattaaattatttaaaattaagatatttatatttttctcgttcgaattaaaaatatttttcggttgagtattttcaacgtggaatgccacagttttttttttttgaaaatccaaag

SEQ ID NO: 14235 - DNA, 1183 bp, Heterodera glycines
  unsure (1)..(1183): unsure at all n locations
cggtcccggtttgcccaagattccgggtcccgctcaactctagttaattcattttgtgagcaatatgaaagttaataattaataaaattaaaaagtatatattaatttaaaatcgattttttaaaataaataatgaacattccaaaattaaaaataaaaatgtttaggcagaaattcggaatctcacaaagatgaatgaagaggaactgatgagctgggctcgtttgaacagtgcaccaattgaattggtttttcaaactgcacgcgaaggtgggcaattaaagataaattaattatttaatttttaattcatttttattatattttctttaattggccattttttgtggctttttgcaaaaattataattatttttcaattttttaagggagtttgccggtgccaaactttgctgcaggcggtgttgccacgccagcagatgcggcattgctgatgcagttgggtgccgaagcggtgttcgtcggttccggcatttttgtatgttggcataaaatgtcatcatcgaaatttttgttcaaaaactttatgataatgtactaacaaataagaaaaattcttaattttttcagtaacttaaaaattaataaaaaaaaatcccaacagaattttaaataattattactataaaaaaccgaaaatttccttttattttttacgtaattttcgtttgtttaaggattttctatgaattgaagttttgttttttttaaatttattctaaaatttttattggctttctgatttttgttgcattttgctgccaaagacaaaaaaatgccagaaaaaatatcaaaattttttttaaacatctcggaggggtgagtaataaataaaaaaacgataaattttaaaaaccatttaaattcctaatagatgagcgacaatccggcaaaacgtgccgccgccattgtgcaagcggtcacccattttgacaagcccaatgtgttggcaaaagtgtcacgcggcttaggcattgcgatgaagggtatggaccgtgttggtgccggaaaaacggtcacattggaacaataaaaaagaagagtgactaattaactgttaatgagttatttgtgtgtttatgtattaattaaataatggttttttaaattttattctcttagataaatttgcaatggagccaagantttaatatttattatt

SEQ ID NO: 14236 - DNA, 3176 bp, Heterodera glycines
atgcgtttttgagctcttttctttaaaacaaatgagaaaaaaaaagtttttcactaaaagttgcttccctactaattatttccccgggggattattgttcactttcctcaaaacgcgtggaataattgaagacggggtgattaatggagacggggggataattagagataatacggtatattaacatttcgagttaagatggatcgggcacacgagaaaacaaatcattttgaaatttaatttaattccttttttctgctaatttaaatattgacaatagcattgggatcggggacggcgaataattcatcaaaaaatgtatttattatatttccaggctttccacgtgtacccaatatcacatcagtcggggtaagtattaattacaattaccgtatacttcgcatatttactattcattttctgatcattttttctttgtcaatttgccaaaattcgtaaacaaactttttggaccaacattcttgaacaaaaagagaaatgttcaaaagatcataaatagggcttccttttttaggcaaatgcctaaaattttgcgcacttgatacgcaaagataagcacgaaaaacgcgttttccgcttggtttggggtgtctacgatgacttttataatgcctatttcgtggtttttgtgcctaaagtgcctattttaggctttttgaaaaaatccataagaaaaatgcaataaaaacgaaaaaaccacccctaagaaatgaccctaaaaaatttcagaaaatacacccttaagaattgagaaaattttcaaaaaaatgatcccaaaaatttaatatattttttcttaataaaaatttttggtttaaaattttgtccttatttaataatttcatttacaattgaaatatttaagtttttacttgttttaataccaaaaaagcgttaataaaaaaaaattttttttgcctattttagggtttttgtgcctatttaatgcctattttgcgatttttttatgcctaaaaaaggaagccctaatcataaaatatgacaaatgaaaaaatgatttcactcaaaaatattgtaaatttcagtaaaatatgctaaaagggattattatatacattaatttttaaaattctttttgaatattttttaggaaaaggcgtttctattccaagatgcgaattgtggtgacaatcccgaatacaaagatggtaattaattctcgatattggttgaaaatagcttagccttcttcccagcgttttattcttaaccgaattaaaatatcataaaaattaaatttttattcgaaattaaaaactaatttaagatttattcatcaatcatttatccttttttattttactattattctctgcttttgttattttaaagatagttttgtcaccccggtgtccagctgtcccggcggaagttgcatcgaaatgttggtcgtggcaggtgggaaaaagctgtggtgctattagccacacagaaaaaattatatattatatttagcacttaatttttgcgtaggggatgccattttgcctggaaagaaatcggcatttgccaggatttggaggtcatagttcttacgttcgatggcacccataaaagcttgaaaagccgccccccccccccctctaatatatcctccccgctcctaagaggaggtcgaacggtgccaggtctttactcaaaaaccatcaaaatgaaaattttgacaaaaaattatataatcttgatattattcgaattagccctaaatgttctattatcttgcaaaattaaaaaaaaaattcattaacattcaaaaatgttatgacctgagaaactcaaaaaagcaagtttttttgaacagttttggtcatgacataacttactttaaacttaactaaactttttgaaattttgcaggataatagaaaacacatagggctatcgaatgatattaagaattaaaaatttgattgcctttgagtaaagttatatcaaatattttttgattttggtggttttttgagtagcgcccattttgatggttttttgagtaatgtcatagcaccggtcgaacaacaggagcccctggggctttataaaagaaacaccggtttaaaaaaaaaaggattaccaattttcgtacatttaagacggcatttactcggtgctgcgcggctgtctcagcgactttttcgacttcccaccctccaacggagaggagggctgcacctgggggctgtcctcggagaatgcgctgatcgccaccagcgaaaagggcgaattggtgcaaaatgtgcgagtgggcgtcaatctgtgcccggcaaaagtgagacggacaaattgccaaaaattaatccgctcacatcaaatagtgtgaactggaattcaattaatggagttaattaattagatagctgatctgattgattatgctgctaattccagactttcttatcgcgtcagtcatttttctgctctattgcagttttatgcgactataaaataacatgactagggctgccaaaaatatgtacaaaaagtggtccaaatatgtacataaatatgtaagaaaaatcccaaaatatgtacaaaaaaccccaaatatgtaaataaaatttttttttaatggtattttttgggaaagaaattccccgtaaagtatgaaatagccacaaaatgacataaaaattactttttttggtatttttaggcaacattttcaaacttattttgtctttataaatcttcaaaatatgtaaaaaaaatgaaatatgtacaaaaatatttgccgaaattttggatttttattagggtcgtgtaaacagaaatagatgccatttttcttactaaaataaaaccccgaataataattaacaaaagcttgaaaaccttctaaaaattctacgacgaactttttttcaaattatttaaacaacaagaaactagggccagtcatagttaccaaacccaatccctagcaatgaccattttgagattaaaaatttatcattatcaattaacacaaaatccccaatttttaattgcttttgtttaaaaaaatattttgaatcaatttgtaggaaggcactcaatgcaattcgttgttgagaccctccgtggaatatgcccagggcaaacagcaaacggacgcttcgacgagcgccgccggcaacgcttggccgtacagctgc

SEQ ID NO: 14237 - DNA, 1306 bp, Heterodera glycines
aaatagatgccatttttcttactaaaataaaaccccgaataataattaacaaaagcttgaaaaccttctaaaaattctacgacgaactttttttcaaattatttaaacaacaagaaactagggccagtcatagttaccaaacccaatccctagcaatgaccattttgagattaaaaatttatcattatcaattaacacaaaatccccaatttttaattgcttttgtttaaaaaaatattttgaatcaatttgtaggaaggcactcaatgcaattcgttgttgagaccctccgtggaatatgcccagggcaaacagcaaacggacgcttcgacgagcgccgccggcaacgcttggccgtacagctgccgaaaatcgacatcaagtgaagcatttaatatctaaatgagaccagcagaaagtaataacgcccaattgtcagattatatcatgaaagcccttttagagggaggaaattgccaaaaaaggataaaaatttgattaaattaattgcaaaattatgaaaaaatattaaagtggttcaatgcttacaatgctcgcgctatgattgggacggcgactgtcactggaactaccgggagtactgtaccggggcatggtaattatgcacagaaaatttcaacatactatctgaatatgtattttcagaagataaattaaaaatatttaggtgcacaaaaacaattggatatgttaacggtgtgtttttgcattaaatatatttttgataatttataaaataattatttatataaatgtttcattaatctgtttaaatttacattttaaatcgttaattattcatattttaattgtctttttaggtcgttggcttgagcagcgcggctgtgccccattcaatccgttgaacagccaaatttgcacaaaagtcgagacgaatgccgcgttatcagagcttagcggacaaaatattgacattgtgcgttatgcactaaaaacggcaattagtcaactaattaacattaattggctctcgattttatctttctttttttgccaatattttttttttcattttttagcatgtgagctccgaacaatgcttttgcaatcagaaccgatgcaacggcacttttacaccaaaaacgctgactgcgctttctgtgctgtggccgcttatgttggcatttttccttgtgaagaattattgaagtcgcatttcaaatcgatgacaaaatggcattttggattatttttaaatttttgttttataaaaataaaatttaaaaacatttacaaaatgaatagttttacaattgcacccttt

SEQ ID NO: 14238 - DNA, 1504 bp, Heterodera glycines
cccccccccattgtttgcgttccttttgcttatgtacgcactttgttgcaaaagagccgcccggcctcgggctgttgttatgcatcgtcgccgacgtggtcgattgggtgagcagcaactcctgcaacacactttgctgctgttgcggtgtccctccggcggttgaactgctcgacgaatgcggcggagggggcggctgttgttggggggccatgccaccgttgagcatcatctgccaaagtggaggtgaaacagtgacagaaataaacattttaaaacaaactaacgaataaacattacatccgtaaacaaaaaatgaaaattttggcgttttgaaaaacaaaccgtgccattctgcaacattgtgcctccgttgttcgtttgctctgcattcgcgccagaccctgctgcggcagcgaccgccggctccaacttgtccaactcactgaatccatccaggtccaaatcgtcgtcgaagctggcctgagctgccaacttccgttttgtgcccgttccaacctgcgaatggacgaaaacatagaattgcagtacaattcaaaatatcaatatttccccaagttttttttatagagcaaagacaattcgctaaaacaataaacaaaagcgtctccgtattctagtgccattggcacagcattttgcaatgtttcattcccttcaccattgtcccgctaattattcattaattaccgtcgactgttgcaggtcctcctgttccatttgtcgatcttctccactgctcattttgctctgactaaacaagtttccattttaattaaacataagaaaacgcttttgaaaatgtgtctttaaataaaaggttgctcagaaagagatttgaatttgcatgttttagcctcagccccacacaaatcggcacaaaactatacgatgccaagagtaatttatccctggttggcaagtggagagggggaccctttctttttgttacgctgtatttgctttgcttttctccgtgcctgttttgtgttctgccgccgttgttatttgttgttgttgctgttgtgttgttgttgcgctctttctaatgccacatgcgctgatcagcggttgccaaagtgtaaaagggtgagtttgtggcgatcaatccccgttttatgtatttgcgttttcagcctaaaaaagattgattttcaaaaatggtatattgggaataaaaatctaagaatatggcgagtttaaaaaggtcaaggggaccaagcattcacaaatgaaatgcgttaaaataaagcgtgaaaagattcgataacacagtgtttatcaaagtatgcaaaagtcatcaaaacgaagtcgcaacacgcggagagcaaaacgcggagaccatttgaaagggagaagcccatgaaaaaacaaagtctcacgcagaatggtgcttaagaagcagtaaactctcgattaatcaattttgatgtgaatttttcttgatcggatatttcgatacaaagttttgtatgtaaaatga

SEQ ID NO: 14239 - DNA, 1965 bp, Heterodera glycines
gtgaaagtttttagtccatataaatccatatttcgggggttttcgggtataaatccataaatccatatttctacatttttgcgtttttagtccatattttggccatttttggcaaattatcacaagaaaaatgaaaaaatgcgaaaaatacgcccctaaatatttttaggaaatgttttaaaaatacacccctaaaaaagagaattgtttaatttaatacaaattggcattttttaatgttaaatccattttttggcagtttttagcgtattttaagtttgtttaagcaaatattgaatataaatacctttttcggaattttttagggtttaaaagatatatcagtttttagtccatattttagtccatatttgaccattttgagcttttttgtccatatttggtgttttttggtccatataatttataaccctagtcataagtgttcgttcattttgttcccaaattgctgttttgaaaattcacatcgattcaacggcggtacgacaattgcggaccgtacttttgccaaaaaaattaactggaagggtgggcctcgtcagtacgatcccttccgtattacaaattcaaaaagctaagtgtgtttcggcgcttccgtagacacaccaaataagtaagctcagagcaataaattaataactaacaaatagaaagcataaattaaggagcaaaaaagcaaagcataggatgataagctaagctataattatgtttattttattggcttgctgaaggcccaacaacagcttctacattttttctatattcaaagccttcaaaaaagagaagctcttttgcctttttctgttctaactccgatgtataaacgtaggagattagaagttaaaagaaattaaaaaaatgtttcatataaataatatgaaataaaaaatgaaaaaataaatattttgggctgacaaatattctacactgcgaaatttttttcctttttaaagagccttgggcaatttagcaacgcgactttaatagtcgtccgcaaaactacggtccgcaattgtcgtaacaccgttcaaacatttgtgttcacaaattttgattgttacttgcccaaagatacgttatttcaaaaaatttttcaattctaatttcgtgtaaatttttcagcgtttcttctaatgcagcgatattagaattaaaaatactttacacagagccaataaccgtattttgtgcatttttggccgatttggagcaaattagcatttttgaaaatttgaactttattttttagtcggatttggtgttcgaaataagtcgaaatggatgtcagaagccggaccggtcgggtgttctgtccaaaacgggatcagcagacctcgggcgccgcttttctgagccggccggtcaatttctgtaagctcgagcccggtagtttaaaaattccatatttaagttaaacattattttgaaaaacatcgtttaaaaagtattattaaatacgtagtgggaaatgtactttcttatcccagccgatcgctttctccaaatacaaaagtgaaattctataaatgcaaattcttcaataaaatagaataagtgaaagatgacccgcgtttcaaaatcatttatttattttatctgatttatcaatttgaatataatattataatagaaatggatggacccgcttcttcttcaaaatgcaaaataataaagggacagtttttgtgagaacatttttatactctgcgcgcaagttcagaaacaacgcgacctgcagaaaattcgacgcaaaatgcgctcgaaggccaaccctaaaataagcaatattaattttatatttttaaatattaaaattaaattattacgaaaatccagcgagaaaattgtgtagatgatcgggttcagtgcagagttcaaatacctttttgggagaaatgaagttgatatgagtagtgggggggggggggggggggggggggg

SEQ ID NO: 14240 - DNA, 4436 bp, Heterodera glycines
  unsure (1)..(4436): unsure at all n locations
aaaattatgaaagagacgaagaaagaacttcttttttgcacttttttcagtactaaccattttcttttttattttttaaatatgtttgtaaaacctacctgaattattttccaaattatttataaaaacaaaataaatatgtatggaaaaagttattgatcgatcgatatttcagcgatttgtttttctgtttccttttcgtagacacatttttccaaggaagataaattcggcaaactgttgttttcttaaatccatgtctttttatgcctaatttttttgttatttagtttttgcctaaagagtggttctaatataatgttaaatttaatacatgattaaatcatatttagctattataatttcagttattacctaattcaatttatttttataaatcagatatttaattatttttaattttagatattaattaatttcttattgttttattaaaatggtgcgcaaaaaacaaaacttccatgaggaagaaaaacgaagtgattttgatgataaaaagggttatacgctcccttcaaaagctgatgagaagggttatacgctccctttaaaagctgataaaaaggttcaaagctcctttaaaaagcggtcggaatttcaagagacagaaaatgttgttataaacttggatgattctgacaatgaaatagataatgttcaatcaatatttgatttgcaatcttcaactcaatctgtttttactaaaacacaaaacatagatgaaaaggtttttagagaaagagaaaggaaaagagcagagcagtggcgcaaaagaaaaaacgaacaatctgaaaatgatttacaaaaatttagaaaaaaggaaaaagctcgcttcgaactttggcgcaaatcacaaatagaacgatctaattttgctttggaggattataggattcacgaacaaaaacgttttgaactttggcgaaaaaaaaataaacaaagtgctttatatcaagcggccaatgattcaagaaatgcaattttttattcactaagtgcttttgaaataatatgtaagaaatgtggtgctttgcattttaaagaagaaagtgcgacaaaaaacgccaacggagaagcattctatagctgctgtaaagatggaaagatttctttactttcagatcatttagaagaatatccaatggaattaaaacaattatattttatagaccatccctaccacaaaaattttattacaaatatacgtcgaatcaatagtgcattttcttttgcttctttaagttgtttgcgtttttcgttcaaaacacctgggcccccatgtttcaaaatacaggggcaggtttatcataaattcaatgaaagtgcaatgccaaacaataacgaattgccaacaaatggacaactttattttattgacacaaatgatgcggctgagttgcgttgtaaaatcaatataagttgtgaccaaaatttaatggaatacatcgaaaattttatgagagaacaaaataagtttgctaagtcttttttgttaatgaaagaagtttatgaggaacaaaatgaaatttctaaaaaagaaggaaaggaaataccggaacttagattgctttttagtctcaaacaaaattttgataaaaggcgttataatttaccacaaaccaatgaagtttgtgcaattatgttttgcgattctaatgatgaaattccaccggctagaattgttgtatacccaaaaataaataaaaaattaaaaaatttatatcctcttgataagtgtgtggaaccaatgacttacccgttactgtatccactcgataaagaagggtaccatattggcctaaaggataaaaacggcaaaaaataacactttgtgattattttaaatattttctatatttccgtgaaaaatttttccctcatttttatgcaaaaaagctctttcaacaatggttagtggattctgctgcaaaaatcgaatgggacagacttgaatacattaagactcatcaaacggaattatgtagtagcaattattcaaatgttgaggattttttaaaattgaaagcagaaaaaagtggtgccgaaatccaaaggaaaataattttgccttcgactttttccggtggccctcgcaatatgcatgagcattttatggatgctatggcaatagtcaacgaaacaggaaaaccagacctttttgtaacttttacatgtacccaaaacgaccctgacattttaaaatgtttaaaacctggtcaaacaccgtctgacagacctgatataatagcaagagtttttcaattaaaaaaagattatttattgcatttaattttgtctgaacaaatatttggaaatgttgtcgggtattgttgggttatagaataccaaaaaagaggtttaccacacctccatttattggtaacattagaccgtaattctaaatggcggacaaccactgaaatcgataaatttattgctgcctctattcctaataaaagtgaagacgctgatttatatgaaattgtttcgagttgcatgatgcatggaccatgctcagaaaaaacactttgttgggatcacgcaaaaaacaaatgtatgaaaaaattccctaaaccatttttagaagaaacaaaaataaatgaggatggttatccttattataaaagatcaaacgatagtagatttgtatttaaaaagggagttaaattatcaaatcaatttgttgtgccgtacaactatggtaaaagttttgctgatctaaaaactgttaatggtaaaaaatatgattcttttgcaaaagcatgtttagctcgagggctttgtcgagatgacgacgaatggtttaaatgtatggaagaagcaagtattttttctagaaaatatccgagaggacttagagttctgtttgcaaacattttgattcattgtggaccaaaatacccggaaaaattatgggatttttttaaggattatatggttgccgacataaaattaaaaaatccaaatttgacgacagatttccattatcaaattggcttacagctaataaatcaaatcctaataagccaagaacgttccttatcagattttaaaacaatgccacaaacaaaaatgctaaaacaaacttatcaagaaactgataattttaatcccatcgaagaaacaaaaattgcagataaattaaaaatgatgttaaatgaggaacaaatgaacataattaaggaactgactgatgtttttgaaagtaataaacaaaaatgcatttttattgatggaccgggaggaacgggaaaatcgatttactttaaaaacaatttatcattatgcgagagggaaaaacaaaaatgtttgtaatatggctttttcaggaatcgcagcaacaatccttaaaaaaggaagaacgctgcgataatcgttttaaattgccacttaatattaataaaaattcaacttcgggtattgaaattaatagtgaagaagcgaaatgaaattaaagaaacggatatttttatttgggatgaagctccgatggatcgcgttttattttggatataattgaccggaaactaaaagaaataatgcagaataatttgtcgtttggtgggaaaacgtttatattaagtggtgattttagacaatgccttcctattaaagaatttgcgataaggtctgaaataattgatttgttgattaaaaattcgccattgtggaaagaatttacaactttaaaattaacacaaaatatgcgagcaaatacgaatgaaaaacagtttgcaaaagatttaattgaaattggtaatggcacaatgggtaaaaatggttatttcaatgtaccggaacactgcatttgccaagaaaatttagtttgtgaaatatatggagaaaatttaaaaaaccataattatgatgaattaagcaagtgcgcaattttgtcaccgtataataccgtagtggataaatataatgtagagattttggatttattacctggtgaacaacattcatatttaagtattgatgaaacagatttaagtaaaaataacccagtaactccagaaattcttaattcattgaaatgttccagtataccagatcatgaaattaagcttaaaaaaggggcgatgataatgttattacgcaatttaaatgtaaaggagggattgtgtaatggaacaaggttgcaagtgattgatttgggcaaacatgtaataaactgtatcattaaaagtggagatcgaattggagaacaaacttttattccaagaattactttaattgaagagaaaaaatttccttttctactgcgtagacatcaatttccaatanagcttgcttttgcatttactatagacaaaagtcagtctccaacatttttcgaaaattgggtcttgatttncaatgatgatccctttttcacatggccaaacatacgttgctttatcaagagcgaaatc

SEQ ID NO: 14241 - DNA, 3493 bp, Heterodera glycines
  unsure (1)..(3493): unsure at all n locations
ctctatccncatctgaaaacccaaaaatttgggatttttccctctataaatatcagaccctgtcaagttatttcaagattagtctaacctttgaaaaatgtagcctgatcaaaaatcacaaaaatacaggatttttaacccaagaatccgggtctaattcctggaacctagccctaacaaaatttttgaaaatctatgcaaatcctcataggttcgctggacaacaaatggagtatggacacgccgcggcgcgcgtatgataaaagtatgcagctggtgcggcttgtcggctgcaaccgcactttgctcgcggatgccatccgctgtctgcgccgcattccacccgccgacttcacggaacagttgtggaacatgcagttgaacttcctggagtttccgctcgtcattgtgtcgcgggatgccaactttttcagcgccgaggacgcgtttgaggcgctgcgcaagcgccactacgcacaggacgtgaacctaatgatcggtaattagtttatggacgaagtcggcacagattaattaacatatttaaagcgtatgcctttctacaaattagattttaaaattttcattccggatctgtaaacggaataaattcggaaccgtattttctgggttgaattctagattttttcgggttttagcggcttacattaactgggttgagactgtatttcaacgcactcaatccgttttttaaatcaaaatacgatagttttccacaattttaggcattctctgcatttgggcaaaattcagtgttgcctatgggtggttcttatattagaaaatttagaaaattagatataaaataattgatttcttttaatttaggcatcaatcatgacgagggcactttttggtaattcacgataattaacatccaaattaaaaattatgcattttttgtatctaatttccaggaacatttacaacatcccaaaattctttgatgtgccacatcagccaatgcttagcctggataatttcaatgaatgcgtgaagacggcattttcgcgcttgccagacattgtccgagacgcagcatcggttaaaacaaaaaataattttttatattaattagaattaatgatttttattttatttaaaatttaatagaattttcaatttattaacattattaatatttctttaaaagcatgtttatttgggcgcacggcgttgtgagtacgagacgggaatgcacaaaaatttggccgatcaagtcaatcagatggttcgttcgaaatttttacataaatacataggatttaaattatttttttaaatactattaatttcttaatttaatcattctttaggtcggcgattattttttcacttgtgacagcatttggctggctgatcaggcaagaacatttaggaaaaatttattgtttattgaacataaataattatacactgatcaaaattgaaattttatgcttcaatacatcaataaatatcataaaattatcactatttttctgcgatttataaaaagaagaaaccatttttagcttgacaactcgccagcccgtgtttacgtttattactttgaccaagcgtcgagcgctgtaagtaaaaaaattaattattttaaaaataatcaaatctaattgggtaatttgttttatcaattaaaaaatttaaatttcagaatccgtggccaaaatggactggtgtaatgcatggctatgaaattgaatacgtttttggcgtcccaatttataatgagagtgccggatatacaaaaagtaacaaaaaatgaataaataaaaaaatatattttcaattttaggagagcaaattcttagccaaaaaatggtgaacattttcaaaaataattgaaatttaattaaaatttaattaattttagattaagctgtggacatcatttgcttccaccgggtattaatattttcaaatataattgttatttttaaaatgaaaataaattggtcaacttaattgcattagtttaatccatataaaaattacataattaattaattagtgcttaattgataagtttctcgggatttcttgttttcggatttctctgattattttcctattattttaggattccaagcttggaccatcgtgaaggcttctcggatcggcttcattggccccaataccattcgcagaacaaccctcgttggcttgagctccgagcatcgcacatcaggctaataaaattttacaaaaattttatttcgttttatctattttgaattttaataatttaatttatattttttgtaggccaatgcgcgcaacaaaaaagcaggaatgccgtatatggcgagcatcgcgagacatggaatacaacgaatacagtaaaacattattaaaatattatgcaatattaaaaattaaaaataaataataattttgaataaatttaaatgatttataatattttatttaaaaattttcagtgatggaaaaattgacatccgctttatctgcatcatttgcaaaaacgcgactatttccacagtcaattgtagctatttttttcacactgatctctgtgcaaaaaattctcatttactagtaaaaaaaaattgtcaattatttttaatagataatatatttatttctatttactactattgtaataaaattttcttttaaaattattattttataaattttcaatataaaatttcctatttttcgacatcaaattaatgtccagaatttttcattatggcaaaagtttgaatatccaatcggggccattcattagatgattcaatgtgaaaatatcataaattaaataaaacaattcttgcaaaaaaataaaatatcacaaaaattatgccgaaatttgtaagaaaaatggaagaagcaatttggaaaatttcaaaaaataacggatgaaaaaaattttttcgtgattttctttatttaatttttaatttaaaaatgctaaaacatttcataaatcttattttataaaaaatgttttttggtgagcaatagagtattgtcgtattttgtagtttgttttggaaattcaatatgtttttctgcacaataatataaaatttaatcattttctattttataaaaagaaaattataaacaatttcgaaattattttgaagaaaaattaaattattgcttttgttctatttaatttccctaattaatccaaacgaatcaacaaataactcgtcccgaaacccgacccgatgactttgggtccggtttcgggacaagataagaatttatattttgaactgattgagttcaatgaaataaaatttttctcttaaaaaacacagtgcaaatattgcaaaaaaatggaaaaacttagataaattattaaacaaaattgataattatatttctnaactaatctttttaattagctcttaagtaattcaanaaataaacgaatcactacgactcatagaaaaaaccggcagggactctaagccatccacaatcatatatatcg

SEQ ID NO: 14242 - DNA, 1194 bp, Heterodera glycines
  unsure (1)..(1194): unsure at all n locations
ggtaggcttttacgcaaaaaaaaagaagtagactttcaatttcagccactttttgacttttgttttcctgtttttcgctttggtccgtaaaaatttttcatttcctttttggtgataaaatattaattaaattttagttcattttaaattagtttttggttttcatgaaaaatataaatattgtacataaaaattcataacttggctcaaattcaacaaaaataatattaatggtatcattcaatagcatttttttaaacatacttaatatgatttcattattttcacaaaagtataaaaaaaaagttctcgtcaaaaaattccaataaattttgggtcagaattttttagcaattttttaaatttaagtgctaaacgggttttcaagttcttaaaaatattaatttatgcatattttattgtcaaaattaatgattttcattcaatagcccaaagaattctttgttaaaatttcaaagaacattcaaataagttgtggccaaactaattctgattcaaatttttgatatattattacaataaattaaattggattttttgatagagaacactaaaatttgttaaatgataccatgaaatattttattttgattgttttttgagcaaatctaatgaatttatatattttttcctaaaccttggcggaattaaggttaatctcctaaacacctcacaaatcagtgctttttacttattgatgttgaagccgctcaatgcattatgcattcggtttgtatcataaacaatgggcgtttgcatcagataaaaacttaacattttataaatttatttaaaatatgcatgatttaatgagaaaattatgtttaaaaaaattacatcagttcccaaaagtcgccagtgaactctctatgcagcatagcaatcatctctttctcaaatatctttttatatacttcactcaatttttggcgctgaaattttttttttttttttttgaaaaaattttattctataggaatcaatttttatttaaaaggttcattttttaaataccntaaaataaataaanacttttttccatttntttccattttatatcatcattattanatnnatatnnttnccaaattaaaaggttcaaaacaancttttnnccnacaaaaaatcagcttgtgggcaaacagcagcatttggaacaatttgaaaatttga

SEQ ID NO: 14243 - DNA, 2859 bp, Heterodera glycines
cgtaccctcctccaagttcccaaaaagtttttgaaaaaatcgcgctgtaaaaaacgtgtaaatagtcactccttttcccaaaaatgttctaaaataatgaaaaatgacaaaaaaagattttgataaaataattgaataattttttcaagcgaatatactaaaaacatttgtgaaataccttttacttggttaagaattaaaaaatttagcctattaaaatatttagaaatttttttattatattttatattttttgaaaaatttccgatttccgacgtttttggggtcggaattccgatttccgacttccgaaaatttttggggcctcggaatgccatccctgatagggactgccggaccccctgtccctagttttttgaaaaattgcaccgcaaaaaagtggttttgaaaagaaaaaaatagtcaaatttatgaaccgttaataatttgatttccgatcaactttttaccgtcggatccaatcgaaaaatcttagtcgacccatcagccccttttaatgcatcccgccagcccctaaaaatttatttttcagcattttttgatttttggaaatttattgaatttaattgaaattttttcgaattttccaaaatcccgcaatcccgcacgggatcccgcaaattttaaatgcgggatttgcgggattaatcccgcgggatcccgtcccgcaaaaaattttgagttccagtcccgcagcgggattcgcaaatttgaaatttgcggtctctagtaattaagcttataattatactttagagtcgtttgtctctttttcattaattataattatgataaatgcttaaaagattgagcaacaatcagagtcgtgggttcgacacccaccaggggttgtcaaattaaaaccacatttatttaaggttcagcccgctgctgaaagcagcagcggtagctcaagcagtggtagctacgacacacaggaggttggacattttgataatttaataaattcttttcaattaattacttcgctaattaagactcaaccgagcggcagcgatagcagcagcggtgcgtgcagtggagcttcttgcggagaagcggtaaaaaaacaaattctaaatttatttattacttttttggtaaaatgatttttgaaattattgttttttttttgcttttaagaatttagtaagtaatttttataaaaaagtttttttctaattctcaggctcagcctggcgccagcagcagctcctcatgcagtggtgcatcatgcggacaagcggtaacaatttgtataattttttgaaatatattttaaatatttatttttattatttgaaatttgtaaatttctttttttatatattatattagaaaatttaaaatatataattttcacttaaaattttataattttgtgttttttaattaaaaattaagaaagttgtttattttttaggctcagcctgccgccagcagcagctcctcatgcagcggcggcgcatgtggacagcaagtgagaaatttggaattttcaattttcatttttaaatttaaattttttttctatactagacttcttcatcttcctcctccacatcgtcatgttccacttgcggtctgaccagctacaacaacaattggtccagcaaaagcagttacaccacaagcaggtgggtgtttgatttagtggtgtttcgggaatacaaaatatacgggtcgaaaatttggtaaaaaattggcgaattttgtctaacccgaaccccctcgtgggatgaataaatgtatgacaagaatctaaaaaaaaaataatttgttagaatattaaattaattgcacttttttatattgtgtttttctctcaattagtcttcgagaacgagcgatgcttcttcaatcatatacgaagctgccgccaatttcccgactctagaaaggagtcctaagagatttttcacaaaatattcttaaaaaatatatataccgtttaccgtatttttttaaaatatgccctcgggggctctgggttcaaccccactcaaaagagggctctaatttagggggagggctgtattttagagaaaacgttattttatttagtaaaaatgaatttttctaggctaattattgtgaaaatgtcaatccgtgttttttttctgggttcagcgccgattcaaaaaatggtatccccgcgcgttcgggacaggaacaaataatgacattaaagcagagagatccgtaaccaaaatgttttccccatttaaagctccagcggcagtgccgcggcacccgcccccgtccccgcagccgcgccagccgcgggtggctacagtggcggtagctcagccggtggacactcctcctcctcttcctgctacgtgtgcggacgacacggcctcacctcctacccgcaaacgtcgtacacaacgcggacctacggtggcggaagcggatgcggaagcggcggctgtcgcagtctcggctgtccggtgtgcggcaagagatgaagcggcgcggacagccagcggcggcacacttttgatggaaatggaaacaaacaaaaaatgattttgttgagaaccttagtcaaccccgtggtgttttttctttgttaggagaaataaatttattgcattcattcgacagggcaataaaatttaaaaaataaataacaattaagcaatttctcatttcaaaaatttcagtcatggtcttgacgtttgagtatcggccgttgtctagtctcgatctcgaacatttggaacattttcggtcatgctaatgagtgtggactttaatcagtaaaattgtcatgaactacatatttataaagtgaattaatccaattatcattctgttggttcttttctttta

SEQ ID NO: 14244 - DNA, 3665 bp, Heterodera glycines
  unsure (1)..(3665): unsure at all n locations
tgctatttttgtttcacacaacttgtgaatccaacctttcatcctgtcattgcggcaatgctggcaggaggcctgtccctaagcctcttgtgcttcatcttcaccatgtgttccatggtgggatacgccatggcaggactgagaatccttttttggattttctcagtcttgttcgcgcgcttattcaagccgcgaaaagagacatgggtattgagtgaggaggaggaaaacctcctctatcctcaccgacgaatacgccggcccaggccagcaacaagaaactgggccagtggccgagttagccaaatgacaatacttgtcatggcatctcttccgtttgtacacgggggaattgagacagtggccataatggccaaatcagagagctgtctcaacaacggcacaacgaaaatgtgccaagtcaagggaagcgtaacccttgcgcttctcccggcaggacaaccgaatgtcctgtcaatgaagaccgatgatggtctcattttgggaacccttcaagtgatcttgaaggggctctctctcgaatgccaagtatacaccaaggcttggaaacgatcatacgagatcgcttccgtggccagcaaacgatgtccgtcggctggctcatgtgtcggtgacttttgcacaaaagtccgaccctccacagccatccgagagctgagggagaccgaaacgttccccgggaacagtttctgcatcgacagcacggctttttggggaaaccaatgtctcctagcagccagttcatgtctcttctacaagtggtttgccaaaccacgctcatcagccatttacgaagtcatcggatgcaactcttgggagtttggcatccatattcaatttcgcctcgattctacaactggaagaagtaccacagtcgaaactgtgcttcttccaggccgtgtgctcaaatggcacaacatcagcatttcaacaataggggtgagccaagcaccgactcccctattgaacgctgacttcctgattgaaggacgaaatgtcgcccttgtccgtgaaagaatcacggactctctccattgtacagatttgaaagccgcccaagcttttaactgtactctgggaatcgacgcatgcacgggctgtcttcccgatcacacagacgggacagtctcgtgccattgtcgcgtcgccaatctcgagggactaatggaagaccttcagcggagacttccgctctcattccgccattacgagttgcggaatatcggaaggcggatattcgccataacctgatacagtccggtccaattgaacattcaaatggacagtctaagaatgtccatggaaatacaccagaatttgtgcaccataacaccaaagaacatctctgtttgttataaatgtgcgacgggagctcagttctcttagcacgtcgtgccatgtcatgtgcttggctgggagaaccaaattctccttgatgggacaactccactacatcccactccgacagcagtcagaatttggagctcgagtctctgaaagcctcgaagaggccagcaactcaggctgggctgactttagtttcgactggaagtccacttttcatgctctgtttggccttaaaacaggcctaattttcttcattgtcttgatgatcggcattgtgatcatcattttccgtggctgccattctctttttggcggccggaggatccttcggatgggaacctcgaaaaggggattctttccccgtttcatgcggggaattaagaatccccgaccccgaattttcattcagggaagcggaggggaatacagtacccctccatcaaaaaatcgattaccgtaatcgatcgccaaaattctatataaaagaaggaaatttgaagccattttcattccttcactatcatcaagccccaaacaacactcaacacctcagcaaactcatgccgattccgttccgagaacggccaccctttttctcggcaccaacaatcagccgaccaacaaacgaagtggtcattaatgatcgcctcgtcatcgacgtcatcggccaatacgaagcagagaaccagcagagagcaaacaatgctcctctgcccggggctgatgatgctcctccacccggggctgaagaccaaagaggcccctggtggtttgaccaggattgggggccccagctcccaatggtccctgaaaacagaggccaaaatcgccaaattggcgaacaacgaggcgattggggagccatgctcctcctcgacgggaaccatcgccccgtgaacacacggagcgactcaactcgtgggttgagcgacaccacggcgaacaatggtacgagacggctaccattcgccgtgacgcggaggaacacctccgccgagaactgcgcaccggtgccacgctttttgcggcacacctcggtccattcgcgaatgtccatttcgacgggttttcgcgctttggaccggctaacacgcaaatgtttccgggacggactgtccgggaacatttccggcggcgcgggttccaagtggacccgaatttgccatgcctccaagagtatgtaggcttcagcaatagccaacaaggaatccatgtcgattacttcccaatcgacatggtcaatgtacgatcccattcacgagaagatcaaaggaaggctgagccgcctcgtcctccccgaataagagcctatttggcagtggaggaggctcccaatgacgaccaagaggggcccaacaggggacccccggctcggcgtttcttcgaggccattggcctccgaagaggcaatgcgaatgttggtgaaagggcggaaaacaatggccgccaagcgcctctccaacgcggagagcgagccatggactatggccgcccaaattcaccggacggtagctttgagaatcgcctacgaagggcggtccccaaccgtccaatgcgccgttggcagaacggccttttcattgtggccgtggcgttgtgcctcgtcaatttggcggagggaaaagaattcccttcgccaaagacttgccatcagccgcttgaagcggcggacatggcacgtgaaaatcaatgggaattttcaccaatacttttcccattgccattttcccacgatcagacagcaaatctgatcaagggaccccgccccttaaacggcagtcaaccctatataaaggcagggattttccatgtccccacatcattccacaccccaaccatgcccaaacccatcaaatgccctctccaagcccagcacacccaagcagcgcccggccctctaccaaccactggactcatcagcacccccacatctcgccaaattcctacccctcccattggggcgccatcgaaagcgtacaggcaggaacaggatgtggaacgggcggagaaaggaattaaaaaatgaacaaacaactggagggaaaaagagccgtcacaccattcccctttcgccctttttgcattattttaatgctaaaatcaaattttgattttcgagtttcgacagcactaatggaacaagtttgtcttctctctgtttctctttaagagaattgaggctttatcagtgtgctagaaatggtttgtcaacttggggagacatcatcctcacattctngtatgngtcattcttgattcatacgaaactgattggaagcgaagttngtccctctccc

SEQ ID NO: 14245 - DNA, 2597 bp, Heterodera glycines
gattttgagcagcgaagaataatttttcggcttgtccgcttggctcaatgtccgttccgccgttggcaatgggacggccgaggaaaaagagggaattgagagaattcgggagcaaagaggtggagaagccgcgcagggacacttccgaaggccaatcggcacaattggggagtcgcgggacgaaaagaatggtcggaaaagctgaagagagagagaggggaaattgaaatgagagggggatttggggggattaaaaaaatgagaagatttatttgtaattcggtggcatacatccgtcttctgttgcgtcttctccgacaatggcacaacgagcggagcccaacaccacgcgcagaatgcgcgagatgcttcccgtgccatactgacgatgggtgggacccgcccaaagtgccgtccttcgcgaatggtcaatctgaagggcaaacaaacgaaggcaatgagcggacaaaacacagattaactgacagattggcactttcgctgttttattgaaaagtacaaccattttcacttttttgattttgtgccttttaatgaaatatttgctgggacgaagtccgaatagttaaataaacaatttatttaaataaaataatatttctatgaaatgttaatttttcatttttatattaaaacattcggctggcaaaaataagaatgatattatagtatttttaatttaaaaaattgatataatttctaagaattcattgaagaaaaatgcatttttgactttttaatttaaaaatatttttattaatgatttttttttgttaatgcgtaaatgtgttttaatgttaaggttgaaggaaatatttatcacctaatttttcaataattttttttaaataatacataaattctgtatagtgaaacaatgggaattttaggcacaaaaaatcgcaaaataggcacaacaataggcattataaaattgatcctagaagcttcaaatcaagctaatttcattttttgtgcttatctcatgcataattcggacttcgtcatagcgcggatcattccgtccatgcctttttaaatgaccgttttgatcactcgcctgaatcattcgttgcgatacatatccccctcctcctcctcctcctcctccccctcctcctcctcctcctccccctcctcctccgcctcctctttctctttctccttctcctctcctccctccttctgctccttcccctctttcgccttcgctttgtgtctgcgctttaaaatccaacaaaatcatctgttgcgtctcttgtcgccctccgtcctctccgttctctttgtcctccgtttttttctcattattcgtccaataaatggccaacggttggccaatgaaggaaaagccgatcagcggaaaaaggacagagcgattggagagcaaatcggtgcagcggagagagtggagacattccttaaacggaaggggaaggggagtggatttgatgatgataagcatgagggaagggggacaaaacgaacagtgccgaaaggctggtggacaaattgccaaagttgacggccgttgtcggaaaggacggagagggggagagagggaggggagaaacacatggaacagagaaaaagggggggagagaatggaagggagggatgaaaaggaagagggagaattggccaaaagaaacaaaaagagaagaaaaggaagtggataatgaaatgagaggaatttgctggagagagagagatgaggaaaaggaaaatgaaaaggggggaggcaatcgatgggggcgggggaagcgaagtctgttttaagttaaagtgcaatggcccagacagaccaatgagtcacgtgacagactggtgggacaaaaaaaggcggaaaggggaaaaaggaaacttttaaaaaaggaaaaaggaaagagaagagaagaaggaaaaggaaggagaagagaagaggaaaaaggaaagagaagagaagaaggaaaaggaaagagaagagaagaaggaaaaggaaagagaagagaagaaggaaaaggaaagagaagagaagaaggaaaaggaaagagaagagaagaaggaaaaggaaagagaagagaagaaggaaaaggaaagagaagagaagaaggaaaaggaaagagaagagaagaaggaaaaggaaagagaagagaagaaggaaaaggaaggagaagagaagaaggaaaaggaaagagaagagaagaaggaaaaggaaagagaagagaagaaggaaaaggaaagagaagagaagaaggaaaaggaaggagaagagaagaaggaaaaggaaagagaagagaagaaggaaaaggaaagagaagagaagaaggaaaaggaaagagaagagaagaaggaaaaggaaagagaagagaagaaggaaaaggaaagagaagagaagaaggaaaaggaaagagaagagaagaaggaaaaggaaagagaagagaagaaggaaaaggaaagagaagagaagaaggaaaaggaaagagaagagaagaaggaaaaggaaagagaagagaagaaggaaaaggaaagagaagagaagaaggaaaaggtaaagagaagagaagaaggaaaaggaaagagaagagaagaaggaa

SEQ ID NO: 14246 - DNA, 2233 bp, Heterodera glycines
caaaacaatcattaatttttactaaatttaacctagaaatagacaattttcaatgaaagtctgtttaaaatggtcaaaagttctaatttttctcccggcagcgccaatcgcaccgcccaaccccaaaaaataacgcacaatttttcttaacaaattgacccaaaatcgcaaaaattttgtctttttttggtgaaaatctgttaacaaatcacaatcaaattttcaaaattttccggcggcgcctatcggcaccgccggcccccgccccccttgtaccccaaaaagtttttttttgaaaaaccgccgcaaaaaaatggttttgaaaaacaaaaaactctattcttttgatttgcaagttgacaacctgttgttgaggatgtttttgaaaaaatgcataaattgcttaactgaaataataaatatttggataaaatcattccggggaaaaatagaattgtggaaaattttctttttattttttttgtttaaatttttatgtgtacttggatttcacaaatttcccccgttatgcacttggaaattggcatgcctgtacttggaaagtgacttggtacgatccgagccctgccataaatcattaattaattttggcatttattaaaaaaacaattaaagccaaaaattgtattaaaaattaattcacaaaaaaaaggtttattcaccccaatgaatggaggacacaaaatgaattttaaatttaaaaattaaattaaatttgtcttttaggagcctgttattgctgaagcatttggccgccaaaatttccccccgctgaaacaaattatgcgcaatgtttccctgctgtttacaaattcaaatcaagtcggacaaaaacataatgccaaaaattgtcggaaaattaattttttagttctttgaaatgccgagaccaatttcgaacaaaattataaacattggaggaatcgtggaaatgaaagtgaaagaattggaaccggtaaaaattatgggataaaataatttttaaaacatggaaatcaattctttagggaattaaagcgatcgtggataattccagggatggcacagtgatcgtttccttcggcacttttgccgatattaactcaatgaaaagggaaatgacaatggcatttttggaagcatttgcccattttccgaactatgaatttatatggaaagttgaattgtccgataaagatgccaaagtgtttgccaagtacaaaaatgtacaccccgtgaaatggatggaccaaaaatcgttgctcagtgagttaaaatggaaaaagattaaattaggctctgttccaattggcgcgtctaattagtgaccgtttttagtttattgggctacaacttttttttactttgcctaaattctcggctaaatgcaacagacaaaaaattattcttgaatttactataaaattctgaattccgcatttctcattgctattttctatgtcaagattttgatgttttcttgagtttctaaattccagagactgagaaatcgtttgataccaagaatcaacaatataggcattgaaaatattgtggcccaagaaactaaaacgatagttactgattggacgaataaactgaatagagccgaaaattctgttaacatttgatcaattaatacatatcaaatgcactacagttaattacccttaattgcctaataaatttccttttctaatttgaaatttcatttcaaagtgcatcccaaaatgcgggcctttgtctcccactgcggtttgaacagtgtcagtgaggcagtccaatttggagtgccaattttggccattccgttgcttggagaccaactgtacaatgccattatggcacgtgtgaaaggcattgctgtccaattggacgttggccaactcaacggggacggggccgaacagctgctggtcgatggacttgacaaggctaattagcaccagctaattatgtctttaataagttaattgcttttgcaggtgctaaatgacccctcttatagccaaaatgtcaaattgttgaaacaaaagtttgcttcaaccccttttggggccaaggaaaagctgatcagatgggtggaatttgctgccgaatttcccgacctaaacgagttgaatttgccgtgggaagaagagctcggcacattggcctattattctgtggacatcatttttttgattgttgcaatgttggcaatatttgcatggattcttttcaaattggcaaa

SEQ ID NO: 14247 - DNA, 1024 bp, Heterodera glycines
aaataaatataagaaaagtctattaaattacttagcacgtatttatttgtattggtttatttttcagaatatcacagatccgttggatgccatcgagagattttactttggtattacggatccatccggcaatcgttctgaatataaacaagaattcatttctcgctgtaaaggatattcatctcataggtctccgcatggtgttctgattgtgagtaatcggggttaattcggagtttgttgcggttgggaatgtgggatcggggatatccccaaaaaatgaccaaattgtcgggggccgggtgtgaaatatttgttacggcacaaaacaatgttttacagaaaatgaaacgtaacctattgctcaattgccgtttgccattaggcaacgagacggaaagttatgctgatgttcttgggctttttcacaagattgaaaagcaccttcataacatgtccatttcctcggaagaatacgaatttttaaaaaactgtaaatatttaaaattttatgatttaaaatagaaggcaaggatcgggatcgcgaccggcatttgttccagtttccttttttgggtctcggtccctttctcgtttttaaaacgcaaatcccgatcccggtaggcacggacttacgacaattaaaattcaatgttttgaatgtaaattttgggtcacttgtaagcccgattaatcttaatcacgatcccgacttatcaaaaaagcaaagcgcgttccagattcacaatgtcaatcccaaacccgctcccagctttcaaggcttttaaggtcctggttaaaattaataccgatcccgtacaaatctaattaaaaattaaaattttatttcatgtatattttcagcacttttggctaaatcaacgtgggtgcaagataaattaaaatcaagtagttcaaataatctaatgtttaagacgctactattctttattgaataaatactgctaaatatatttattaaaaaactttttaattaactcattttaaagattactttcgtttt

SEQ ID NO: 14248 - DNA, 3242 bp, Heterodera glycines
ctaattaattaattaccttcccttaggccactcttttgcccccgtcgttgcgcgtcctcaacccccagtcaaatgcggcccaattggtgatgaatgcgtcccattacattgcccagttgaccgccacggtgttcgcccgtgtcagcaacggcacattgcccgaaggcatgttaattacttgattaattattaattaattaattgtcactattttatttttatgttaccccattttttactcctatttgttaatcatttgtctttctttttcagttgcacttggtcaaattctgtccgtcgcttctcttcccgggccaatggctcagcccacgccccgtccccgtgccattcgccgcttttcgtgggtgccttcgcgaaggaagtcaatcaaaaaaagccgaaacctttgaatttatgagcaaattctaacgatttcataaatttattatgtactataatttaattttataaaatatatttttttcaaatgatctgcaaattaataagcacaatttttaatttgtcattcaaaaaatagaaaattataagaaaaggcattttatctgcaaatgggctagacattttctgctgctaattactctccgctattcctccttctttcgatcactccgctctctcacatttctccactatttcttttccttccaatcacttcgctctctctgttttctccgctatttcttttcctacaatcactccactctctcacttttctccactattttgtcttcttcagttgtgatttctttgatttcttcttcttctttcccgtcgtcatgactcatcataagcattggagggaatacgaactcgttgttgtttctgtcttggtctgtcggcacaaacaaaggttgacccctggcagtgtttgggcaacgcatcggacagaaattcgccgcctgtccaatttcaccgggcggcgcttgcggccccggcacaccgtacggacccggcttaaattccaaagttcaaatgatttaattaataattttgacaacctctcccggcattcccgtcggaccacgtagcccctgccttccgggctgaccggccatctttgatggacgacctgcgaggccggcaaagcccggagggcctttggcgcccggctgaccgggcgcccctttcacgccaatgccacctgaaaatggttccaatcaaaatgtgatcagttcaaaaagaaaacactgatcaagaacagaccgacgacattctctcccgctgcccccgctttgcccggcacgcccaattgaccccttttgcccagtgggcctctttttccaaagcctccgtctttgcccgatttgccgggcggtccgcctttgcctcggggccctgccgccccgggcaatccgcgctcgccttgcgttcctcgcagtccggggtaaccttaattagaacaaatatcgaaaattcgaatggaaccaccagaccagcggggcacacaatacacggcatgtctggcaacggattttcctgaatgtcagtgccatccacgccgggcactccgagccgtcccactgtgccggggatgccatcatcgcccggctggccgggcagaccagttggaccaactgggcaattcatacgtgcgcactctgtgaatggggcattaagcgatgtttcagtctctccgtctcgagaatgactctcgactttcggttggcattcctttgtttttttcttcaattgactattttagtcactttttactttggcatcctttcagtgcttgaaattcggcgccttttccaaatgctttcattgtttctttcgcttctgtgttccttctgctgaccaaatgacggagtgccgaagatgggtcaccactttttgtgacttttggaaatgccaaaaaaagaattttcggccaaattctttccgaatttgtcttaatggcatttcattatttattgaattttaaagtcattttaaaggaatgtgcttgccctaaaagctgccgcgttctgttcaatttccgcttggatctgctcaatttcccacaaaatgctatgcgtcgaccaaaggagggcacacaacgccaaacagctggcaccaatgccaattttggcgatcacttcggctggttggagcgcgttgaaatgtccactcattctgggaagaatgaaatgaataataataattaggtcggaatgatcagaatgaatgaccaacgagcggaatggcgactgatgaccagcaaatttggggcactgatcacaccaaaagggtaaacactgccccagcaaagtccgatcaaattcaaaagcgcaaaacaaaagaataatcaaagcataatttttcccctatgaagccacttcactccgaattggacaaatcacttttcactcatttaaacatttgcaatcgaattttttattttttgcaaaatattaaatgcaaaattatcaattccaacacattgatcaattaattgtcaatgcgcatgtgatatgcctttctttgtttccacatttggcccaggggtgctgttcactgatggcaaatgcttaacccccccccccccctccagcataccatttttcaaaattaaattgcattttggtccagtgccaacacaattggcacaactccaacgtctctttctctctgcttgccagtattttcctacattttctttggctttaccttttctcaaatgattctttccacccattttcgtcatttaaaagccgcactaattgcttatttgttagcccattttctgaattcattcccccgcccctttactccgtgccgggcccgttaatttttctcttttttttattcgcctatttttggtgaattttcaatttcttaaaatttttaccttaagagaaaatgtgcaaattttcctttaaatttgcttctatgggctttgtttttgttgtctgtttggtcaatcgtttgtttggcgttccgccaaaagggtccaaaagtgccggcccaagcagctcaagtgggaggaagaatttggtagtgattacggacatggagccggacgatcgaattgcgctggagatgattcactcgcaattggccgaacgcattttagccattggcacgacggtacttaacgcggaacgaaaggcggcattggtacggaacgcattggaggggacccaattggaaggtgtgaaagtgtttgtgggaagcggagggggagagaacgaatatccgctgatcagatcaacgaaagcagcattaacttatggggacaa

SEQ ID NO: 14249 - DNA, 2606 bp, Heterodera glycines
attttatgattttttacagatttttccggggaaaacggataccactttcaagcaaccgttttttcatgctctatcgattggtgtcattttcagaaaaatttttaaaattttttttggaaagaaaatttttggttggtaggcctcaatttcagttctgtggctataacttgtcaggagttgattttatcaaaaaatcgtctaagagcttttttgtagagaattttaagcccaatctaatgtgctttatctcatgtttttatcttgaatttaaaaaaagttatgaaattatattttattttaaaattcaaaaccatatgggggaccctttggttttacatttcatgaaaatattttttgctcttaaattatccaaaaaacatttttctggcctattttaatgtgctgatcttgaatatgcactttattttgggttgcagactttttggaaggtggttaaaaaatttttgaaaaattgtcaatttttgggcctccaaaaatcaagcggaatttcgaaaattcataactcacttcacttttggtcaattttaatgtaataaagctttaaaaatatagaaaaatcgggagaattttatgagatttatttgggatttctatcttccaaatattaaaagttattccagaaattctgaaaattttcgatttttcagaaaaaaattcagaactcggttctcaaaaaatattttataaaaataatatactcaaaaaatccgcaattttttgctctattttataaattttaattcctcttattatcacttttttgaaaaaagttatagaaataaaagtgattttgtaattcgggaccaaaggggtgtgaccatggtttttgagtggaaaaattttttcacccaaaatcttccaaaaatatgtctttaggggttatttgggccgttgatcatgaatacgtaatcagtttttacttttgacatcgttaagacctcagaatccctgtgtgattggggattctggggcttcattttgaggggggggggggggaagttcggagccgggtggtgtacattaattttctaccattttttttcgtgtttttcaatttttattcatttaaatgttttagttatttttttcgggttttgatttattttagtaggaaaaatttttttgtattttgattaaaaatttcgaaaaaaatttaaaatcttttattttagcttagaattatatcgagctatgtaaatcggccttttttgcttttcaaaaccctttaacggcgcatttaagttttaggctgtttcgctggtgaaatttagctcggtcaaattgatcgggcccggggccgggcttagccatttgaccgggaccgggccgcccggtcaaatcccgggcccggtttatccagaattctgtgttccggtcgtattttttgcttcccacaaaatttggattattgcttcccgttttttgccaatagattcgtgatgcctatatgtgttaactaacggtaaacgaactcaatatttcataaaatttgcataatgccatcatcattttcaggttttaaatttggcataaaaaactaattaattctttgaaattttcttatttaaataccagtaattcgataggtttattcattatatggcaatataaaatcaaataaactaaaatgaatttatatcattaatttggtaataaagttggcaaattaataaattatttatgttttttacatattctatcatattataattttaaaatagtataattcattttaaatcatatgaatataaatttaatttcttttttaatttataatttcttaatattttagaattgtttaattttttctcatttttactgaatttttaaagaccgcctggcccccgggcccgtccggtctttaataatcaatgcatgattttcattaattcaattattttatggtaattttcttttgctaaatttattttttgtaatttttgctttattttgagtgcatttatttatgttaataaaagtatttatttttctaaattatttatatctaattcaaaattttttaaatgcttacaacagaaatttaaatttgtaaatttattgaccgaagatgagtttgcatttttattattaattcatttaaaaattggttcataatttcggttaacaacaatacataattacgcggtgttattttgtcatttttctttctctggacattttgccacaaagcgaaagtcggacgattcgtcaccaatgccaccacagtgtcctcattctatgactgctaccccagacaaatggaagaaaagacggtgttttagagaaaaaaaatagtaaaggaatttctgttattgtttacttaaaaatattttgaaatatttctttgcaaagaattgttgttcagaaatttgattcagatagagtttaagaaggattgttttttctgcgacttaagatttttttctcttttttactaaatttagagatggatatttttgatcaaattttagaaaatttaaataaaacttacatgccaaaaaaaattccaaaaaagaataggacgggaggcggtgccaatgccaatgcaaatgtggcgggcggtggtgccaatgcaaatgtggcgg

SEQ ID NO: 14250 - DNA, 1617 bp, Heterodera glycines
gaaaatttttggggcctcgaaattccgacttccgaaatttttgatgaaaagtcggaatttttcggaattttttttgagttttttttttcaaaaaattagcaatttttgtacaatttatgttaataaattgcatagaaattttcaattttttttccgacggcacctatcggcaccgccggacccaaaaaaacttaattttcttgaaaatttgctcaaaatcgcaaaattttccattttttggacaaaatttgttaacaatttacattataaattacaaaatttttcccggcggcgcatatcggcaccgccggacctctccccctattacccaaattttctttggataaagcgcgccgcaaaaaaagggtgtaactttcccaaaaaaaatccaaaataatgtaaaattacttaaaatattttgatctttttaaaaaatatagaaataaactaaaaacagtttgaaattaccttttacatggttaaaaatttagcctattaaatatttttttaaaatttattattttttttgaaaaattccgacttccgagttccgacttccgacatttttggggtcggaattccgacttccgaaaatttttggggcatcggaattccgacttccgacttccgaaaatttttagtgcctcggaactccatccctggtgctggtggcggacgcggtggtggtggtggtggtgccgggcgcggaggtgatggcggtgaaggacgaaccaaaagaaaaaatgccgctggagttaagaagggttggaaaaaaaattgtgccggtggccgcggcagttgtgatcgtggggaccatggggggcaaggccgtggaggcggcggagggggagggagtcgtagcgtcacaatcaatttttattgaattgttaaatttttttgaaagttattaaacttttgttgaatttttggcactacttaaggtcaatctcaggaaaatttttaaactggaaatagaataaatattttattaataaaatatgtatttttgagttattttcaatgttttaattaatttaaaataattttgttttattaataataaataaatgttcaaatttaaattaaattattttttgatgaataaatattttgcattaaaaattgattatttacttattttttgaattaaacaatttataatcactgttgtacctcttctaaacaccgttttacctttctgatttcggttgcataagcgcattgatgctgtaagtttttacttttttcaattgatttcaaaatgttatttgccctaaaaattttgattgagcttttaatagaattttaaaattatggcaaacgcgaatttttcaaattttggcaagctgagttctttagggtttggaaaatcaatgatcagtagggatggcggtttttgtttattgattttttccttttttaacctcttttaaaaagcgttggcaccactaaaaaaagttttcgtgcctcctttttttgagcctattcctacttaaattgaaaagggttttatttaataattaataaataatttactttttttttaaataaaatttaatttttttttaaaaaaaaaaaatttcttttaactttttttgaagcaaaaattaaacaatt

SEQ ID NO: 14251 - DNA, 1618 bp, Heterodera glycines
  unsure (1)..(1618): unsure at all n locations
attagtctaaatcttattaggtagtttcatggcacaaagatttctaagaattttgtccaaaaaatcagaataaaaattactgtctgcgtatttttctttcgatgcctatcggcaccacacgacccaaaacccattattttcttataaattaacaaaatatggacagttttgtgtataaattctgttgacaaattatatttcaaattttcaaaattttcccgacggcgcctatcggcaccgccggcctcccctccttgttcccaaaaattaaaaaaaaatgcactgcggaaaaattcttaaaaatctgatttttatgattccgatgcactttacgatttgctaatttacctcaaattgttaaaaatgatcatagaaggcgaaaatacaaaaataatattaattgattaattgtaaaaaaaactatttaagctatgttgttaaatgggtacttacttacctgttttgaaggcacataaatattctaagatttaaatgtttattaaatttttttgctcacctaatttttttcttgaaaattgttaaaaaaataaatgaaaaacttttataaatatctacttttcatttttaaacattgttgtaatataacctttgaataataatagcaaaatttgttttctaaaaagtatattttagtattattttttaaattgccataacatggacctaattcaaattaattaaaaatcttataaaaaaaaaatttttttcaaagtaaaattaaaaaaagttaatttaaagtagcctgtcatttaaaaattttattatcggaccaaattattaatgtgcattttcatttgatttattgaattaaaggaaattaaataattgaatgtactactgtataaaatttatttaaattgggaactgatacaccaattacgtgagatagagaaaagtagatgctcattaaaattaattcctaaaaataaaaaacattaattttaattaaaacttttttgaaaggaaatcaacgtctttttaaatatgaaaatcgatatatgaataaaaaattttcttttaagaaataattgaatttttatgactttttgcataaaattttttatttacaattgattttaaaaagaaaaaacttttctaaaatgaatcataatataataaaactcattaccttttaaaaaagattcattagaataacatagagttgagcttcggtaattgtaaaaaaaccggtaccgaccggtactgcaaaaaccggtaccggtaccaactttttcaaccggtaccggtaccggtaaaacccggtaattttccaacattaaaaattatttgccagaatttttcaaatacaatattacttttaacaaaaatcatcatcatttatttccaaataatcaatttataattctttttcttctgcatcgggctcagtagatggtgccaaaaacaactgatccatattcgccttgataagtaaaatttttgtgtcatttctccactcaggctanaaaattggccgaatttgaataagaatgnaaagaaattaccaaaacaagttgctttttcggcatactcaattgctcttggtgtcgctccatacattttttaattttggggtttcggcattctttagtccact

SEQ ID NO: 14252 - DNA, 1651 bp, Heterodera glycines
  unsure (1)..(1651): unsure at all n locations
gaaattatttccatctcggcccatcgaggttttttgggtgcagacanaattccgggcatttcttggtctcttcaaaattgcattgccagcaaaactttnttctgctctttgaaagatgccaacattcggtaggtcgaattccatctcgtcggaactgacttaaaattggctcttttgccttccagataatttcagaaaggcattgatttttgatcgcatcttgaataaccaaatttaaaaaatggcaacaacactggaaacttaaaagggaacacggaaccattcaaaaataaatgataaaaattgcctgtccttatccaattggcgtgtggccgactgcatattacgagcgtcatcatgcacacatcacgcaattttatccaatgaaatccattttctgtcagacaatttgctattccttcagcaatcacttctccagaatggaaaaattcgtccataggaaaggcaccgagaacggcatcatttctgcagaaattatcatcaatccagtgaatggtcaggctaaaacggaaaaatttttctggctaaaggaaaaattatgaagattcacctttgtaattgaggtgaatgcgtgggtttagaccagccgtcgctcgtaattgcaaaatgtccatcaccaattcccgttctaattgcatggcgaatttgatcagccattcgagggatcactttacgtcgaaagtgatcgcggcctccaaattcctaaaataatgaaaactgaaaaccaaaaatgacaaaaaaataccaaattaggaaatgccttctttgtcaaattcctcaaatccgggtcctcaacaaataaaaacgagttgttttggcgaatcataattcgcacaatactctcttccgcttcttccagttcatttttctttggaaccacataattgtcaattcggcgctgtttctaaaatagtaaatcaaaaaatttaaaaagcttattggttaaccttttgttcttgcttttcaagcaaattccaggatttcaactcagtaaattgttgtttgtgtcttgcctccaagtgtttccacatgcccattgttgatccatcatttctgacaatttttttcccgcatacattacataatgctttatcattcgatgatttgtcgaaatatttccaaatgtcagacatttattggatttggattaccaaaactaaaatcatgattctcttgtacaatggattaatcagggataagaaattttaaaaccaaatattattaatcttcaatgaattaatatgacgaaataaaataagattgtttttaaaatgataaaatttggcgaaatgttctatttttataaaatttttcgtttccctaaattttgcatcattcattttgtgctaaactcctatttttaacagtgcaaatttttaccggcggttaccggtactggggggggggaattccccgaaatgaaaatttttaaaaattttcaagcaattaaaaattttcagatcacatccctgcctgcctaacagagttttcgatgcgccgaatgttatctaattgataaattctgacttaagctgaaagcttccgctactgttcaaaaatcattcaaaatattataatatttttttataaatgtagaaatttatcttttctgctgtgcttacttaactaa

SEQ ID NO: 14253 - DNA, 973 bp, Heterodera glycines
ctaatgcaattaaattcgaatacaagaaaaggtgggaaaaacggtcacaaataattaaacataatgccaaacaaatataaaaaataaaataaaggtcaaaaagtccaacagaaagaaattattataatattaatatttcacaaattaacgaaaaaaaataattttaaaaaccaattacgaataataatctttttaataatagactgatttaaaaatgaaaataaagttttaaaaattttatttaaatgaaaaggctattttaataattaaaatttaaaaaagaataagctaaaaaagaacattatgataggttcacaaagattgatttgataaaaaaaattgatcagatattccaaaatcaaaaaaaaaaaaaaattatttttaatattaaacaagagcaccaagaaaaagaaaaatcaacagatggtctgctcgagatgataaaatatttaaatgtcttacgcattggaattatttatttgtatttccaggtaagattttcattcattataatatatgctataaataactactgataaacaataatacaagtatattaattaatgcaggattctgaaataaataatatgttaattaaataataagaatgtgcaaagcaaaaccataattcattttttaattaatgcttaaaatataatgaaattatttaaaaacaattataaagtgtcgacaatcagaaacatcgaatcagcagcacgattgaaattaattcttataataaattcagcgagtacaattaaaattaaacaaataataataaaaaaattatattaaaattcaatttatataattgtttatgatggtgcttgcgcgttacgccaccagtcgcgttttataaatccgccacctaacaattcgcgttttataaatccgccacctaacaattcacgttttataaatccgccacctaacaattcgcgttttataaatccgccagtagcgttttataaat

SEQ ID NO: 14254 - DNA, 3173 bp, Heterodera glycines
tttctgttcctcttccactttctcttccactttctgttcctcttccagtttctcttcaactttctgttcctcttccactttctcttccactttctgttcctcttccagtttctcttcaactttctgttcctcttccactttctcttccactttctgttcgtcttccacttcctcttccactttctcttcactttctgttcctcttccactttctcttccactttctgttcctcttccactttctcttccactttctgttcctcttccactttctgttcctcttccactttgtcttccactttatgttcctcttccactttctgtctctcttccacgttctgttcctcttcctctttccttcctcttcttctttttcttcctctttctcgttctcttcctatttctcgttctcttcctcttcctctttccttcctctttctgttcctcttccactttctcttccactttctgttcctcttccactttatcttccactttctgttcctcttccactttatcttccactttctcttccgctttctgttcctcttccactttctgttcctcttccactttctgttcgacttccactttctgttcctcttcctctttctcttcctcttccactttctgttcctcttccactttctgttcctcttccactttctcttcctcttacaatttctgttcctcttccactttctcttccactttctgttcctcttcctctttctgttcctcttcctctttctgttcctcttccactttccttcctcttctttttcttcctctttctcgttctcttcctatttctcgttctcttcctctttccttcctcttccactttctggtcctcttccactttttcttccactttttgttcctcttccacttactgttcctcttccactttctgttcctcttccactttctcttcctcccgtacccggtttaaaaacttggacccggacccggcttttctggacccggaaatatccggacccggttttgcccaaatacccggattcgtctaaccctaaaattaactcattttgagatttataaattatttaaatatttattaatatttgtttatttttaatttttattcgattaattttaatatttaatttagactttattattctattaattataaatatttattattttattaattcaaaaaacattatcattaatttaaaataccataaagttaattaattaaaaaaataaatttaaaaaaacataatttcaatataatatttgctttaaaatatcagaagaaatgggactctaacccatggcaagccagcaccaaaggaaggcacactaactacttgaccaccggatcgcttgcctccttttaatttccttttcactttccttcttttttggcataaaatatttataattttatgtttaggtaacttattaatttgtctccatttttaaatgattttgcacaaaaaaggtcaaacaatagatttttgggctaaattagaaagaaagaattattatttttaatatttaaaataaattatttttaataaacttaattaattaaaaaaaataaaatcattcaaaaaatttaataaaataatggatgaaaacacccagaataggtgggacccgaaccgtcgaccaccaccaccaatggcaaaaactaaaaatgtatgctattaaaacagcaataatttagttggaaatatatattgaataaaagtaggagcagtaaaaaactgatgtaaatggaaacaattgataatgaactggggaaagaaaaggaggagacattttttgctgattgaaaaggcgaggttaaagaccactggcgagtgtgcattacatataaaaaaaggaaagaaaagaaagtaatcaatttttatccaaaagtactttgctccatatttttttattatgcctttctttctcttttaattgagcatcgtcgaacctgcaaaacgcaaaaataaatctttgtttaattaatccaatttaaaaaataattataaccaagccaagctgggcataatttttaagtctaacaagggaatcaccggtactagtgcagttgatacgccacaaaagttttttttaaagtcgtataaaaatgtttccagggttttcgaggacgctgttttctgaatccgacctccatttcgaccaattcagtatcccggactcaaactcaaagatttggtcgaaaagtcaaaaattctcaaaaaaatttaccaaataaatatgatcaacaatatgtcaaaaattagagcaatttatttttgaatggacaattttttttcgtcaagttgcttatctaaaaagttaaagcacagctattccactgaaatgggccacttaaataatttcattgcttaaaaacttcatgaaaaagttttttgacttttcgaccaaatgttcgggtttgaatctgtgactctgaattggtcgaaatggatgacttttcgaccaaatgttcgggtttgaatctgggactctgaattggtcgaaatggaggtcagatgcaccgaacaaagtcaccctaaagataagaaaccgaaaagatgacctcggcattttgttgctgtacgcaattagacagcaaagtcggctggaactttttgaatgtccttgacggatttctgttcccgttggcccttgggaaaggcactttaaataaaaattggaaaaaggtctactgtagttaaaaaatgtattgtggtttgtctattgtgttgtggttagtatgggctcaaaattctgcgcctcctcgcggtgagtctggaaacagagttaatttttaaaatattaattaattttttttgcaatggaattaactctggctaaagcagacgtaattttgtctaattttgtggcttagaattaaatttttaaatttttttttgttttattgaaatccccaaatgtcgggtccctaaatgtcgggttgccaaatgtccgtggttttcttaactgtcttttgctcaaatgtcgttcggtccccaaatgtcgggtccccaaatgtcgggatcccaaaaagtcgggtccccaaatgtcgggatccccaaatgtcgggatccctaagtgtcggatccccaaaagtcgggtcccaaatgtcgggatccccaaatgtcgggtccccaagttgcaaatccccaaaagtcgccacacgg

SEQ ID NO: 14255 - DNA, 3072 bp, Heterodera glycines
  unsure (1)..(3072): unsure at all n locations
agaggcgaacaattaattaattaattattggattagcaccaatttgttagtttgaatcaggcccnnccacccatatccacaaaaaaagagagagcacatgaccatcaaatcatttttaaaagcttcatttgctattttatagtggaatgttttttaagtgtcatttgtcagtaaatttaaccaaaaattttctatttaacnccagaaaagtgtacataattcttccgttggcaaatgcctgtcccattttcgactgattatgaatgcatttctgcgcctaatttttacctaaaatgaacgaccgaccgccccggcatagacgaaagtcaacacatcttcgaaatgcgaccaatcatgcaacaaaaaagcatttcgaatatcccattttcagttgccaattgaaacgcgtggccccacttacaccgacccaatcgctttgtttggcatgtgtttggaggactacgcctactttttggtccgttttgaacatttataaattcttgaaaattaaaaaccgttatttaccctttccatggcattaaaaggtcttaaaatttttcattttcaggttgaccattacgcggacacgcggctggaggaggcggaggaatacataaaagaagcgctaaaggtcggcctcttttttgtttttaaggggggactcggatttttgcctattttcgtcaactccaaccaccaattcccccatttttaggtgtcttttcaaatttttggtctcagtgcgacccattcgctgaatttgttgtgcacttttgggtcaaaatgcattttgcagaataagtgagccctttatttatttaataaatttagccaaatctttaaaaaataaacattttttcaaaggtttgaaacggcgcgcaattttctcgaacttggcgtcaaaagggtgacgctgctgcccgaaaccgagtgagtaaaaagtttttagaaattttatcattttctaaatttttcccctcccccaaaaaaggccgaccattttgctgtccttttactgctgctacgctgaggcgctgttccacaccggcgacatcgaacgtgcgcttgactacgccaagcgggcgcaaaaactgtcgcaagggagtgacattgatgcggctgtgcgggcgtacgtgcgcgacttctcacggcaaatcgaacgcgacacactgcggtgagcagagagagtggcagagaaatggagaaaaagtcaaggggcgaaaagacaatgggcaacagttaggggaggaatcagagaaatagagaaaaacgaaagagtggattaggctaggtctaaactttcggctaggcataaggtttaggattaggcctaacaaaagcttatttaaaatttcatcggcaagattttggggtgctcccgcgaggcgcagggaaaattagcgggaattcctttttaatttttcaatttgtttctgtttttccctttatggcttttgccctttctgttcagggcatctgttcggtcaaacaacgaaaggacggcttcttcttcttcttcttcttcttcttcttcaacttcactttctgcagagggcgcagaaggcacagaaaagggaatttcgaattggctgtggcccttcaaataatttaaaaaattgttttgcctaattttgcatcgttttttataaacaaatttgttttggcaaaagtgaagaattcattcccatccattcgtctcttcttatccatcggttgggcttataatagccgaatcaactgaacattcattcattcatttggatggcataaaccttcacttttgcatttgcaaacattcttttttttgtttgatagatgcgtgtaaaatcaatgccttcgttgataaaacaataataaattgtacaatttgctgctacctcctattaaattaaatcaaaaatacattaataaattattattttttaaattgttattttatttagaaattttaagaaacaaaaaattttttcttgttaataaaattgattagggttgggcccccgaccccgccccgaccccgaaccccgacttttttgcccatttttcggggttagaccccgaccccgacgctcccaaccccgaccccgacccttaaccccgactcggggtcggggttaaatatacacccctaggaatggcatttttgtgggagaaaaagcaaaaaatatatacaaattttgaatttattaaccattttgccaaatttttataaaataaagtaatttgcttttatcaattcaaatgcagtagtggcgtagtggttagtgtgttaacactaacacaacttttgtcgtgagttcgatcctggttgactgcctctttttaaattattttttttgtaattaatagggttttttaaaataaaaatacccataaaaattggtcatcattggcataatttattgacaaattaaacccaattttcctttcgttgaaattaaaaaaatttaattttccttgactaaatcatgaaaagtttatattttacaaaatataaagagaaattcataattttttggtgaaaactgtttgaaaaaagagcttaaaatttaaaattcgcccggcgttgcctatcggcatcgccgacccctcaaaaacctgaaaattttgctcaaaatcaaaaaaatttataattttttggacaaaatctgttacagatccatccaaatttcaaaatttttccccggcggcgcctatcggcaccgccggacccctttctcctaaaagtctttaaaaacgcgccgcaaaaaaaaatgattttaaaaacaaaaaacttttcggggaacaaggggccggcantntctataancncnnccncnaaaaatttttnaaaattananaattanaatncaatttattaactnatttcaccaaaaataaccaattttttcnactttnanccaaatttttttanaaaaaatttntttttnnnncccnncnccnnancaaaaatttnaaattttnactatttttacanattttcactaaaaaaggttcnttttnnnatcccttatcntttttaataacttttgaaggaaaataattatgaataaaaagaaataaaaaaataca

SEQ ID NO: 14256 - DNA, 3277 bp, Heterodera glycines
  unsure (1)..(3277): unsure at all n locations
aattcaaatttttgaattaaataagaattttataaacaaattattagtaagagtcagatattgcaacttaagcgattcagggagtaggctgccatgcttctaacaacataaaatacaatatttaaaatattaactattcagcaattaatcgcgacatataaaagaaagtttaaattatatgcttaaaataataaaaatactaaaatactacaaaaatccgcaatacccgcggtgggacttgaacccacgaccccagcaatccgtgccgtgctctaaccaactgagctacgcaggcatccactccttcactctcatttccccctatctttggggcgaaatcactctctttatcccacactgccacataggcacaagggggaagagtgccgcatttatcacattatcacttttttgagaattgttataaaaataaaaatgacttttggattcgggaccaaagaggtgtgaccaggatttttgagtggaaaattttttttcacaaaatctaccaaaaatatgtctttaggggttataaaatacgcccctataatcatattataaattaagattatattatattttagaaaaagaaaatataaataaattttctgaatttattctaaaaatttatattttcctattattgttaataattattaattttaaattaattattagtaattagagaataaaaaaattatattataatgtgggatcttgaagaatgcaaaaactatgaacgagcacatgaaattaaaaaaaatagttcatgttgcaatttcatgattaatattgatatatataaatttaaaaattaaaaggaaatattaaataaaaactaataattgtggattattaaaaagtttatttaaataataaattcttttattatattntaccataataataataattagtaatcttaaaaatntcatntattaaatntaaatgaaatataataatattaaatgaattttaaaataaaaaataaaataatttgattttagtttttgtaaattgttgtaaattttttgataaattatttaatgttaattatttcaaattcctatttattcgcatatattttagtgacaaagtttgaataaaaatattttgtaaaaaaagctaaaattgtaaaaatggcataagaacattaataaataatgaatgatgatagataaaaagattattattaaaaatcaataaacattatttaacaagatatgaacaaaacacaatcaatgatttgataaaatcgacgaaatacaatgatataaaattgcttttttatttttagtatttaatatacatacatttttatttccaattgaattactctatttgaatattttagtcaatttttaaatcatattcaatagtcagaaaaagaaaaaatatttctaaaaaaattataaattagaagaaaatatcaaaaaaaaaaatttgtccacgaactgttgagtgatttttcgtactttgtaaattgccattgatttgtcttctcgtagtttgtaataatatttttccttgagaattgataggctatgttcagggttcgcagatgaaattatcaaaagcctcatttggcaggcaaaaaagcctcattttgggtcaaaagcctcattttcacaaattattcaaaacacgtttaaaatgttcaaatgttatattttctattgtccatgatcaattgcaattttttcttagaactaagcattttgtgaaattatgagcatgaaaaatcgaagttgatttttgcggcgctttttccaattttttgggggaacaggggggtccggtttaataatttgtgttatacatattatttaaataattcaattttttactgacgatatcccggtcccggttttacaaaaaaaaaaaattaattttttaaaaatgtttctaaccagcacgagcaacacttgcagcagtggcaacagctaaaaaatatacagatttttttaattgaattttttcggaacttttaaggtttaaataccccgatgaaaaaccattaagggctgggggccttttaattttaattttttataatattttttcattttcaaggtcatgaccgaaactcaagactccctaatatagttttttttatcgggataattaaactgtaattaagtgccttttttgcaaacttaccaacagccggcttcactttcgcgcacagttgcaaccacaaagacaagcacagccagcgatatgctcgtgatcaaagacatttttatttaattttttgttttagaaatcaaatttaaaatattattttttttaatgatttttaattgagtaattaatttttgagtaattaattgtgtgatgctctgttgagtgatcggcgcgattaaatacctatacacaaaacacctcctgtcccaaagcccacccacataatgggccattgtcaaattttcaacacattgttttggcccgatcggctcgatcattctcattcattcatgctttatatttagtcattattgtttcaattacttaggtatattagcatgtttttgtacaaataaagccaaggacgatgattacagaatagattaatcatcatttttgggtcctctgtttgatcagtgatcgctgctaccaaacaaatttatttatggtcaaaaagcaattcgtcgtcgcccggggggacgagcaaaagcgaatcgggaggagagaaactttctcctttcctgcccattcatttgttgaatgtatgtacaaaaatccacaataatagatgtacaaacatcataatgatgaattgaagatgacggcgattaatgaagcaattagtagacactttgtcacttttcgagtaatttcattcattcatttagatggacggcaaccataagaacagttaaaaaaataattaaaattttgatgtggaaattttaaaaatttgctgaaaattaaaaatgtgaattaaacaattgaattttacaaatataaacaggataagagagaaaatagaaaaaattttagtaataaattgacaaaactttttaaaaaatttttccacttaaccaatttgttaaaattcaataaaaatctccaatggtataatctttaaggcattaattttagccatttcataattataaattaaattcgataattctaattagctctaaaattgattttaaatgcatgaaaacactgaaatccaacaaaaaaattccctatataaaatgccaatcacggatcaaaattattgaaaaattgaaaaaatccgtgagccgtgatcacggccagccct

SEQ ID NO: 14257 - DNA, 2838 bp, Heterodera glycines
  unsure (1)..(2838): unsure at all n locations
aaaataatgattagtttttaaaatgttttttttccattaattcacattttattaaaatggtccnccatgaaanaatattataaaataaaagaaaaaaataagtaaaaaggaagaaaatactcaagaaaagaatggaataaaattgaagaaaaaataacgaataattttatactgcgtatagcaaattgtttcttccatttctcaattattctttgactaactccaattttcttacaaatttcggcataattttgtttccattctttggtcgaatattttcttttctctttaagctcatttgccatttcaatgaatttttgtacaatttctaacttttcttcatccgtttttgatttatagcttttctttatttgtttttgaagccccaattctttaatccattcataaatatttttgcgatatgtccccatttttttcgcaatttttctttcaattttattccattcttttcttgggtattttcttcctttttgctttattttctcttttattttataaaattttgcaattatttctctttttttgagttcatttcgcctttcttcttccttttcttcccatttttctccaaaaatttcgtcaaatgacttttgtttcaattttttcttctctgctccaaattggtcaattttgataattaaaattacaattaaaaagaatagtggtaataatttcatttctttaaaaatattctcaaattggatatttttttaaaaagaatgatttttattattgatgggtatttatttatgcaaaaattttctgtttaaacaaactacaaaacattaaaataatcttagagctctgaaaaatatttttaaaaataaaaaattgtgatttatattatttattttttattctaatgcagggcttccatcgaaaaaatttcaaaataagaacatacaggccataaaataagattttagggtcaaaaataagaacatttaacaaaaaatacttaaatcgcttgtataacactttatacaattaatatattatcaacttttgtatttttcgcctccaattatcatttttaacgattttgggaagtaaattagcaaattcagtgcatttttaatctaaaaaaacaaattttttgcggcgcatttttccaaggaattttggagaacgggggatgggagtgggtccggcggtgccgataggcgccgcctgaaaaatttttgtaatttctttgcggataatcgaatggatgagaacgccttccaggaatggcttttatctgctccatctccgcttaaactccgcctaacgagagcaattaaacttctcaggcgccgcaaaaatgaaataatctcgctgacgaaagtgcggcggcacgtgatcacgtgaatattcttatggcgtgagaaacgaaagaaaaatgaatgaagtgaactttggaactctgaaaattgtaactcatacggtaaacaaaataatagggcataattttcatttttcaattggttctctattttcagccagttaaaatcgcacccctttgattggttatcagcccgggcctttttgctttaccgcaatttatttctcctttttttgtctcactttttctctctctttttttgtttttggcctctttctctcttgtttctggcctctcattcgttcaaaaagtttttaaattggtcagttattcggctgctactaggcctttttttggttatttttggcttctttaattcctctcttttctctcatccttacaaatacgcccctttagcgtttagaaagactgggcacatttttgtgtacctctttctcttcgtttttcagtgtccctttagttttcaactagcccggacagattttctcaattcttttctttaaaagtccctttagtcttcgactagcccggacaactttaaatctcagacttctttacttgcgtgtacacgtctttgtttctagccctcaggccaggcagatctcccacaaacttctgccggcttacccaattctcagcttcgtcgtcaatgatgggtcgtttctcaaaatgggaaccatccggtgctaccagtgagggatgcgcactgtgccctaagaccaactatgcaccgtttatcccggatggaatttgggagggaatgaggaaaagccaaggcgcctttgaccaagccccgaacccccaaacgactcattgactgttaaagatgtgtttattcattcgttgttggatttacagaagcgagaaattggaataataatttaagtctgttccataaataactgactaactgatcactggggaaggagaaaatgcgaagagaatgggcggagaaacattacaatgagaaaaggaaaaacgtgtgaaatggataaatgtgattgaattgataatggccaataggaaataatgaaatgagggaaatgcgtcgaataatccttacaaaaataaaagaaaaaataaaggaaagaggaagaaaatattcaaaataaaaaatggaataaatttattcaaaaatagcgaaaaaattgggaacaaaccaaaagaaaatttatcaattgacaaaataaagcgaagatttataaattttggcgaaaaatgagagataaaaaaatcggaaattttccatttttgacttatttctgcataaattaccaattttttataaatttattttcctattatatttttcgagaaaaaacacctaaaaaaatatgatgtaacgacaatgatttggattttatttttaagactttgattgagtcttaaaattatttacaatattaaaatttttaatactttattattgcgtcatttgaataaaaaaaataccaaataacaaaatacaattt

SEQ ID NO: 14258 - DNA, 4583 bp, Heterodera glycines
taaaaatgttctactttgtttgaagcttctaacatacatttttgtgactttttttgacttttttatactttttgggattttatgacttttttgcgtttttgtgactttttttcgtgactttttacactttttaatgcaaaaaattgagttttattgataaaatttcgaaaaataagtctatattcgagatggtactcaaatttcttataccattagtaaaaatgtcgatactgaaaaataaaattaaatctggcgattgtaatatgaatagagcccggatttttaggtgctaaaaatcccaaaataggtactaaaataggtgctaaaaaatgtgcaaaataggtgctaaaaacccgcaaaaaggccaaaataggtgcgaaaataggtgttaaaaattggaaaaatccagtgtctttatgtacaaaaattccaaaagtgactaattttttatcaatttcgcccacacaattgcaattggtcaagaaaataaataataaatattgtggacgaatttttgggaaaattttttgtttcttaggggatattttatgaaattttgatcaatctttaggggtatatttaaaaaaaaattttggacaggttcttagggggtgtgtttttcaattttattgcatttttgctatgaaatttctggaaaaaggccaaaataggtgctaaaactcgaaaaatgccaaaataggtgctattgaccgaaaatccagttttaggtaattttaggtgctaaaaagtcgctctaaatcgaaaattgttcggagaaaatgctatttttgggcttctctcatcataacaaagccgcaaaaaaaataggtaaaaacctaaaaatcccagctctatttatgaattttaattttattcaaaaaatttaaaaatatttttcgaattaaaaaaccaaaattataaaaatattcgaacccaaaaaagtatcagtgatagtaatatttaaattgcatcattaaaaaagatcccaacttagttaacctaagtaaactttaaaaattttaaattttttcaaaaagtttgtaggaattattgaatgttgctttttcgaattttttttttagatacaactaatatttgctagaatttaaaaagatagagagaaaagctatcactccataccgagattgtaaatctaaataattaatttaaatattactttcatttataacttttttaggttctccccattttagattttttttgattcagttcgacctagcaccttccccaacattcccttacgtaattgaacggcctttgccgtctgttgcgtggcaatttcggccgaggcgatcagcagcaacgaatttaagacgaagaagacgagcattttcatcaacattctttgattttgatttatgtgatgacgaatacaaaatgttgggccaaagatgatgatgatgatgatggcggcggaggagaattttcaaaatttggtccgccgctttttatacgccgccgtttccgatcagaaaattccgcccaccgcccaattccgatcactttccaaatggccttgggccccttttcccaatcactccgatcgctcccttccctttctcgccaaagtggtcgaagaacaaattttttacagcaacaaaaactattccatttaatctcgcgcatattcaatcattttggtgcataatttgggaaagaaagagaaaacccaaagatttggaaattaaaaaaatgagtcaaaaaaggctatatgatgacattgatttccttcaaccgttttgagtttttgtacgaaaattgttttgttaatgaaaggaaacatttatttcatttagaaaaaatattacaaataaatttgttttttaatatatgaacacctaatcgactttaaattaaacaaaactaaaatttttgtaaattaaataaaaattatctataaagaaaagcattgtatgtactaaaaacaccgacttgaaaaataatattctttaaaaagcatgactaaaaacgaatgaaaaagcctctaaatattttttgaaaaataatattctttaaaaagcatgactaaaaacgaatgaaaaagcctttaaatattttttgtcacaaaaaatccaagcaaattcgaagttagaaccaaaaattttgtaattttgcttctaattagggggttcagaaactaaaaattccgtctccctaatcagagagtaagaagttattcgaaaataaataacaattcgaatataaaaatttctcaataatacgaaaaaaaaatgttttaccttgacctaaaaataggatgaatgtacaaatatttttttgtaaaaaagtaaattttctccataaattgtgccacccagcagcaaaaaaaagcaattaggtaattagcaaaaaattcggttgaatttggtacattaaacggagtcccacacttattttttgtcaaggttaaattattgaacaattagtttttttgtttagccccaattttttacaatattttttaaacaaaatcatttttaattatgttttttttaaacagtttaaaagaattgtggtgatatcatcgtttattttttttaatttgaatgtgtattttaattaagtttatccatttattgaaacaacaacaacaaataaaatccaaaagtcaataataaaggaattaaaataggcaataaaataaattaatagtaataaataaaaatagcgaaaaggaggaaaatatgagaatatgtagaaaaatcgtaaagtgagagaatttcaggtaaaaatgctgtagaatgggaatatgcatttgcgtctaaacaggaaaaagttgtgcctttggactggacataaatgggcgcaatttctgatcaaattcaagcggtgccgatcgccgccgggaaaattttgaatttatttctcaaataaaaattctcaaatacttagtaaataaatataggcagctggaagcagtgcttttgttgccaaattagaaagcattttgtgactcacaaaatttgatcaaaaattacgatcagattgcgcaaaaaacggatataaaaattgaaggattacggaaggtcaccacgaagtcaaaaagcccaagtcaatgcaaatgctaaaaaaaatccgtcgaaggcaaattctgctccatataaggcgcatctaaaaatgccaataaaattggaaagtgaaatagaacaagcctttagtaggaagccgagatggaacccaaaaaaatctcataaatcggaatttcgactcaaaaaatttcggaaagcataattccgtacaatccctggtatatttatccactgaaaaaagcccaaaggttcacaaaaccaacaaaaaaaaacaaaattttttttggcgacagacagaatgccaaattcactcatttccactcactttttatgagtttgtctcgtccagaaaggtttgacgagccgacatttgcacggtgggcttgaatttcatctggccatacttggagggccaatagttgcccaaattttcgtcaatttggttgcaggcccagcacacgtgccatgccacctgaaaactcttagcatttttttttgtatgtaagaaggggccttgtccttggaaactttttcattttaacgaaaaaataataaggccacgaagatggttttatttcctctataattaaaacaaaaaaaaaaaaaaaacaaattcttcatttcggcgtaaatctcttaacaatttcaaaaaaaaaaatttcctcgacaccgcagggaataaataaaattccgtttgattttgtttgaaatacattttccattttggacaaaagtctttaaaaaatttatttaaaaaagtttctcaatttccagtcatagaattttcaggcctgccggcattgttatcataaagggccccaaaaaatgggagaccccccttcaaggtgagtggaggaaaatttttaaaactcgaacaaatttttttaaacaaaacttcattaaaacatggctaaaatttccctttttccaatggctcaaaaaatcaaggaacatcaaaaaatttttatgtgcctaaagagcaaaaaaaattaaaaataaataaataaaaaattgaaattttcgactcctcttcacctcgggcgtcggcaacagtgcgtacacaaacaacgaattgtgcgagccgttgtatggcattatgctgtttcgaccaaagcgacaaatgcggaaggcctggccagcggacacggagaaagtgatgaagcagctgatcagtgctgaaaatttggcagaaaatgatcgggggaacattttgcggcaatgtttcgcacaaaaaattaacatgtttttgagggttattgtatcgatttataaattttcaaaaaagccaaaataggtaggctttaggctttaaaacccgaaaataggcaagggcgtagccagaggggggggggggggggggcaccatcatcattcattagtcggcccacccaccctttgagcgtagtccgctccgaatgcgcagccactccttgaactcctgctggaagaacatgttgctgatccacgtcaacggcaggccgaccagcttgtgggtactgagctcgccggcgccaaacatgggcagtgtcaggt

SEQ ID NO: 14259 - DNA, 2766 bp, Heterodera glycines
  unsure (1)..(2766): unsure at all n locations
tgtgtcatttttggtcaattttactttcgcttaaatatnttggcaaaacgatgccaatgccaaccaaagaacaatttaatgcaaaaaaaaaacaatttattcatttttcaaaaaagaggagccaattcgctctgtgttctcccaattcggcaccatcaaagaaattcgtctgtttgcttcacaaaactttggtttcgttgtgttcgcggacaaatcgtcggccgcgcgggcgatttttgagatgaatgggagggaattggacttgggagtggtagcggggaaatgcacagttcgggtgaagtggggaagacaaccgcagcagcaaaacggaagcggaagcggaggggggacaggcggaagggcgggagacgcatggccaaccgctggcaccgccaacaacggcaccgtacagacgaacggggccaatacggtaagcaatgacgaatggcattaggtggcataattaatccccaaaattgacccaaactgttgcagattcccgccactttgatggagttcggccaacaaaatgcgctctccgacaccgccgtccgaatggtccaacagcagcaacagcaaatggccgttctgtccgcgttggctgtccatcagcagttgcagcaccaacaccaaatgctccgttttggcgggtggggcaacgaatgaacggagaaaagacgaacaaattggagcaataaatatctacgagaaattgttttaattgaatcttatacaaaaatcgaattgacaaatttggaatatgccaaaggcgaagaaattggggggtgggagggtaacacaacaggccaaggtggagaactccgttttccccttttttaatgttcgacaaaagtcacacataaatcgttttccaataattgtttcccaaattaattggattttaaaaataaatttaatgaaaataaattagttaaataatgaatcgaagaggaaaaccaacaacagaaaaaagaattaaatgatacgtcacattaaagaaaatgagtgccatttgggagattggcaagaaatttgggataaaatgaattaaagcggcatgagagaataaaaaggcattggagagatgtgaaattggagcaaaaatttggcaatgagagaaaagtgctcatatgaaatggacgaatgatcaattggaattggacaatccatccgatgatctgatcggcttggttcgtcgtttcaagcttttgatcagaagtgatcagtgcgagtaaaaactgtgctcgagcacggcgctgccggcacttccctttcgggtcattttgaacagtgcgactgtgatgatgatcagcagcacgaagagaatggcaccggcactaattagtgccgtcggggaaaagcacactccacggccggaagaagctgccctcttcccgctttcccagtcgacaaaggacggcatttcttggacggaactgcgctgagaagagcctttttgggccgcggccgccggctcttaatgggggaaaaggaaaagtcacaccccactaggcgaaatgctcgcgatttcgagaccgtaatcgtccaagatcatcagttctggcgattggatgtcgaagtccacctcagccatcctgcgtcggcttccgcccgcccttccgcccgccgcgggcgtgtcccgctgagtgcgtcccgccgccgccatttgtggcttcgcttttccctcttccgtcggcgccgttccctccaatttgcccttcttgaagacttgcactggcttcgtcaccccaccgaactcctcctcctcccctcccggcactttcttcttccctttgcccttctcctcgccctcctccgatgccgaaattgtccaacttccctcctccgccctttccattctctccatgcgctttttgtccccttccgccgttttggcatgatcattttgaagcaacaattggggccgagggaaatcctccgtcatttcttctctgctctttttgtagtgaattgttgtgccgtcagtaattggcgaagtttctgttgtttgtgccgtgatcggcgatgacgctgacgaggacgatggttgtgcagcagcttctgctgcggatgatagcgatgatgctttcggttgaatgccttcgctgctctccccacttgccgccctttccacgctgctcagcagttgttcctccgtaaccgtcttcgtcgtcatcgttgtactgcttgctgtcgtactcgttgctgttgttgatgaggttgttcccgttgtcgtgttcgtgctttgtgtcggttctgttgttgtttcggttgtttgtgctgttgctgtcgttctctcggttgaggttgtcgttgctgttggtgctgtactgcttgctgtcgttgcccctgtcgttcgttcggtcggtcgttccgtcgttggtcccgagtcgtccgtctgtgccgttccctccgccacctctccactcacttccgttctgctccctctgccgccgttttgctttttgccctttcctctcatcgtctgctgttcctcctcttttcccgttgtccctccaccgtttctgcccccaatggccgctgtccccgtgcccacctccgcccccgcgttgtccacattgaaattgccattcgcggcactctttgctcgcttcccgttgcaacttggtggcttaatttgcgagtgattggttaataagcaaagtgccactgccaaaggcattctttggtcggtcaccgtcaaagtgttgcattcgtcttctttcaacatgcaaagtttgattttgcaagtgaacagcatcatgt

SEQ ID NO: 14260 - DNA, 854 bp, Heterodera glycines
gaagggatccgcagcgacgcatgggcgacccgaagagccgaaggtgcgaaacgaagagaagacggggaggaaggacgtgcagacgcggaacacccatgagcagccgcggacgaggcgcaagcggacggggagcaggcgcacggagcagccgacctggcgaaagagaccgcaacgatgaagaactcgtccagccgctggacaagtgggaccacgggtggatctcgtgagagcatcaaggttattacattagtggaagagtagagcacgtaaagaaaggcgtagagctaccaaagggaacgaaggaagtgaaaaggggagcaaaaaagggggaaaaaggagcaaagggaggggagggaagagcaaagggaggggagggaagagcaaagggaggggagggaagagcacatcaattcaggacgaatgggaagaatgaaggggaagatgcaaataattggcttaatattcttctactgctgaatttttgggtcaacttttgggagtctccgccccgcccatcccaaaaaaagccagacgaatgtcaaggtaaacaaaattacgcgaatttgaagacgaccaactcaagttttgacatgcattgaatggcacagaatgcacaggtaattttggcgattgtgcggtcgaagaaccgtcgcaaattaactttgaatacacaaagtcggacggaagggaggggggggggcggagttcaaggtttaagaggaagaagaaaagggggaggaagatgaggaggaggaggaaggaataattaatattccaagggtttggctggagaggtgctgggcggatgaaggccacacgcggccgcagggggtggcgggggggggggggcgggg

SEQ ID NO: 14261 - DNA, 988 bp, Heterodera glycines
gttataatatatttgattattttaggtttcctcctagtagagagaacagaataaaaatgattctgcgcatctttcgtcataccatcattagcttctcccgtgccgtcccatcccgtggacaattgttgccattgtcgaatgaatcatccatcgcagggctcacaagcggagtgccaccggcaccgctcttttgcggaaacagctgcgaaagaagcatccgttcgtttgagaaattgccattcctgctgccaaaatggcattggcacgataacttcgtattgagagaattgcccaattgggtttcctgtcgcttgcattcatcgtcattgtcattgatagagcaaccccaaaacagcagaaagtgttcatctgcgagaaatgtcaagacaaaagcttatgttgggcaattgatgaccatttcgaattgaattaacttttatattttttgcaaatgtttaatgatactcaaatagagtttatcagttaaagtgaatttgttccaaaaagtggtaaatattttcgaaaaatgtacgtatgtttttcctaagcctggcctaatctaagcaattgtacgagttgtcatggcaccgaaaactcaatttaaaatcactttaaaacaaatgaagaaaatattaatttttttgtgaatatctgttagaaaattgaggttaaatttcaaaattcgtccagcaccgccggccccccaaaaaacctacttttcttaaaaaattattccaaaacacctgattttggtaattttttagacaatatctgtgaaatttatgcgaaaaggaattgaatcgaggcgatacatcgactaaaggaacaaacacatcattcataaaaattaatatttttttgtgattttttggaactaattaaaaccaaacccccgcccccgtccccggtggcgagactgctggaaataggcgctttggccatcgatttttgatgccacataacttttttattttcatctcacaccgct

SEQ ID NO: 14262 - DNA, 1761 bp, Heterodera glycines
cgccataatggcacatacacgtgacattctttgaaccggtggtcagctgcaaaccctctgcagcagaactggcacagtattgcgtatctttttcagtgtcgcatttccaaaaataatcggtaagtttggcgcctcttctgaaatcttagagatcattcaaaaactccaccttttagaaggtacaactaatttaggcatttcaatcataaggaaaatccaattttcgatctttctaaatatctctttagctttttctggtctattttcaatgtgtttatttgaattattatttgcatatttaccgatcgtgcagattgccgccagacaatattgcgcgccctccttatccaagcattctccgttttcggtttcaatttcaccgccatgccgagcttcgaatccctgcttgcacttgagtccttttaaaacacagataaaaaagaacaaacaaatgttaatgttttttgtgatcccatcagtttatcggggaaaagggtgcaagtgaaaagcagaagaggaagcaatggcttcatcagagaaaacattcccttagtttaattaattaaaaaagaaaaatatttttaaagcaaatcgttcagaaaataattaatattgaataattttaattaaaaatttacacaatttgttcatataatttcagcaaaaaatgattatgtacattttcatacgaagcaattcgatggaaagatttttattaacgcaaaaatgatcatcaatttttcacatcctttcgctgattaatttatcggttgaatatctaaattcttgatattttttaaaaatattttctcgaaaaaaatcgatggaaaaatttcgttttttttttgatttttttcggtttgattattccatattttcttgaaaaatacaatcgaagcatttctacatgaaatatattattaagtaactaaagatcactaattagataaattcattttaattttgtcatcgctttgttcctcctctctcagaatgtttaaattttcaattgccaaatttgcaaaaatgtccaaatcactttttattgcttgaataattattatggcattcagtgccttgtttttgctctgttgtgaattttcttgatttctgacaatctcttcgagactttctcgaatgtgcttaatgatgccattctcgacaatgccttctgagcaaatttcaaaaaattttgcatccgaaaatggaataatttgatcaaattgcatctcgggcagcaaactttttaatttttcggtgatgttatgtaaacgatcattgagttggtcgatcgcatgttccgcttgtaattttttaaaatcatttccatcatttccctgtccatttgcaatgcgaaacaattcagaaattggattcataacaaatttgaggacaaatcggaggaagtgcaaaataatgaaaaggaaataattgactaaatcagggataattaatccgaaatttgtaaaattaaattggtttatttgttttaaacataaattaactcatccatcatttatcattttaaattggataaaatttgccaattacaacaaatttaccaaccaaaacacgattgggttgctgattacacaaagggcatcggagtctgtcaagcaatgaaaacctaaaaatgcataattattcatttttacggaatatctttcacattcaattgaccatttgttgatgcaattgcggtggaaaatgtgctaaaaagtatttaaattatttaataaatctatcataaaccattttggc

SEQ ID NO: 14263 - DNA, 2030 bp, Heterodera glycines
  unsure (1)..(2030): unsure at all n locations
tcctnttgttantttcgtctaaacaaattgaacagtccttttctgcttcatctccaaccctgctgcttttcattttgtccttaattactttttatttacaataataatcaaagttaatcaacctcttcatactgataaatgtcaatgtcgagaaaccaaattttgtgtttgaaaaagcgattcaaattgaccgggattgatagtttgtattctgtgaacttaaaatatcaaattattaatattatttatttggcatttattttttgcctttggcatttgctgtccatttgcattttccaatttttcgagtggggcaaatcccaaaagtattctctcgtcctctaactcaaatccgcgtcggtttttctgtacaaaagcgtacacaaatgcgtggtaattgcccgcgtcgttttccgcttccacaaaaactcttcggttccaattgagccgtcccggggggtcggcactgcccaaattgaccacgtacagccgcgagaagttcggcctgaacagctcgactttgacggtccggtgcagggaccggatgtcgtccatttgcacaaattgatcttcgtatggctgatcatccgccgggttttcgtcattttcatccggcaaaaattcattatttatgggatttaccgacacatgaaattgcaaaatataattgtcaatttctctttcatctttttcattaattttgatttcgaaattttctccaatttggacatccgaatatattttaaatattccaccatttaattcataaaacagttccaacacaattttaacttctcgtgaatgttcacagataacgcacaaacggagcttttttgacgcggagctttgtgaaggataaaagagaaaaattgtgaaaaataaaaaataatttattatttccattaaaaaaatatattaaaatgaaataaatttatgtaaaaagtcatataaaaatattaatcaatattaaagggtagtttttcgcactatgttttattatgcatatttaataaataacggatgccgaaaaaaaatcgatgctcattgtaagttaaaggcaaacctataaaatatttttattttataatttaaatttacataaattgagaatttggaaaggaaatttaaaaattaattagaaacattcctaaaaaagcaccattaaatttttcttttccctttatttttttgcctaaaatatttcgctgtcattcactgcgctcaattaaccattttcagtcaaataaattcgattagttgctgctaattgtcaattaaaagaattttttttgtttttttaactttttattttcttcattttcaatttaaaaataaatacaaaacaaaaggcaaaaagaaatttaatctctcaacaaacaaatggctttctttttatgctttgagaattgaagttttcacaaagggattaaaccggctttagaatgatttttaatgtgaaggttcatcccttttttttcattttttaatttctccatttccaatcgttgatttttctaaaccgttttaattttaaatttcgaatgatgaatcatccctaccaatgcgttgataaattggggaccgttttgcgttaattggcccttcttgttgcattggaatggccaattttggcgttgtgtcgtccttcgtcggcggttgttgacaacgaaaatcggtgaaggagcacgggaataattggaaaatgaaagtaggcaggtatttactttacacttccaattattgagaaaccgcacgaaaagtcagccggccaaacatagcaaaaactcaccgccgactttcaatcatttggcggttgccttatgacactcattaattcattctttcattcttccgccccctcacccacaaattattgtccctcaattaggcccaaagcactcaaaaatattattgcgaaaatatgaaaataaggcattttattaacatgatatatataacacagagatatattaattaattaagtaacaaatgacttataattaataaaagaaaattcagattttatagaa

SEQ ID NO: 14264 - DNA, 1063 bp, Heterodera glycines
  unsure (1)..(1063): unsure at all n locations
tctaaaatnttccgaaacaaaaaataagcatcatattcgctttcagcacctcaaaataccccacaaaataatttttcacccactttttcaacccaaaaaaaaatttcgaaaatttctagggggcctagctcgaaaatttttgaaaatttcctaacatgaagtacaccattcgatagcatttaaaattctctacaaaaatgttctaagacaatttttcgctaaaaccaactcctgacgagttatgggcccgggactcaaatgtcccgctcaggccaaaaattttttctatttccgggaaaaaatcgaaatttttccgaaaaaaataccagtcgatagagctcgaaaaactatgttttggaagtggtcttcgtttttctgggaaaattcgttaaaaattcttaaaatgcaaaaaccaaaaaaacgttttttaggcctagctcgaaaatttttgaaaattttcgaaattttaaaatttggaaaaatcgagctcaccgagctctacaataagtctgctggccaccctgcgctcaggtcaaaccctaatgagttattcaacggggactgaactggaaaaaattggtactgaaaagttgccaatttctgcagctcttccaagtataggtagaggcctggaattttttttgaaaattagaaaacacttcaacttagtttcctaccagcaagcattttttgatcagagttttagaaaaaaagttacgggccttcaaacgcaagcaaaagtgagaaattagccgccgggactcagttggccaccggagcagaaaacctatagttttcctgaatgcgcctcaaaaagttgtaagacccttccaccactttcagacccctcccgacagcagttcgactcaaattagtttttaagacgaaaccccctttttctctatggtaatataaactagcgtgtgggaattgacgggggtccggtgcaggcagtttgcttttggatgaagagaaaatggacatgcacatttgttattttaaacagacaaaatattaagtgtattaatgtgctgttttaaagcgctatcgcgctatgggacgc

SEQ ID NO: 14265 - DNA, 1055 bp, Heterodera glycines
ttttgggggcctaaaattgccgattttcaaaaaatttttaacccccttccaaaaagtttggaacgcaaaataagcgtatatacgtattcagcacctcaaattatgccataaaaatgcattttggctaatttaggagcaaaaaaattttcatgaaatgcaaaaccatggggtcccccctatggttttgagtttcaaaatcacaattaattttataactttttttaaactcatggtataaacatgagataaagcacattagattgggcttaaaattctctacaaaaaagctcttagacgattttttgataaaatcaactcctgacaagttatagccacagaactgaaattgaggcctagtaaccaaaaattttctatttccaaaaaatttttgaaaattttttttgaaaatgccaccaatcgatagagcatgaaaaacggttgcttgaaagtggtctccgttttccccggaaaaatctgtaaaaaataataaaattaaaaaacggaaaattttcgagggggcctagctcgaaaatttctgaaaatttcagaaatccaaaaacatggttggatagagctcgtcgagctgtacaaaaaagccgcttacaccgacctcctccctccaaaccccgacgagttattccgccggcgctgaaatggccaaaaaagtatgcaatttttgcgcagtttttcggaaaaactggtaggccctacgaggtcggtgaagagcaaaaagttgtgccaaacctcccaacttgatttcctatcgaggccgatttttcatttaggactttaaaaaatttttgaatcccaaaaacagcaaaaaaaaatttaaaaaagccgtttcagcgccgctggcgctcagttggccctcggaccggaatgcctatagttttcctggatgcgccgtcaaaagttgcccccaaggtcgaaatcccgagtccctcccgccagcggttcccgagatttttgttttagcaatgagttcatctgtttctttagttatatataaactagcgtgtggcgcagtaattgctcggtgtagacagtatactttg

SEQ ID NO: 14266 - DNA, 805 bp, Heterodera glycines
gacgggcgcttcgcgtccgttttttagcttgttaggccacttcgcggcctcagtcgggcgcttcgcgtccggtttttcaatttttgttggccttggacgggcgcttcgcgcccgttttttaaattcgcggcctcagacggcgattcgcgcccgttttttagcttgttaggccgcttcgcagccttagtcggtcgcttcgcgcccgtttttcaatttgtgttggccttgtacgggcgcttagcgcccgttatttaaactttgtttacctcaaacgggcgcttcgcgcccgttttttagcttgttaggctgcttcggagccttagtcgggcgcttcgcgcccgtttttcaatttttttggccttggacgggcgcttagcacccgttatttaaactttttttacctcaaacggccgcttcgcgcccgttttttagcttgttatgcgttcgcggcccagtcgggcgcttcgcgcccgtttttcaaaatttgttgaccttatagggattataagaggtacaataaatggtagaagaggtaaaatagtgattagaagaggtacaacagtgatcagaagaggtacaactgtgattaaaaaggtacaaaagtgattagaagaggtacaacaacggggaagaggtacaaccacgggggaagaggtacaaccacgggggaagaggtacaacaacgggggaagaggtacaacaacgggggaagaggtacaacattattgaaacaggacaacattattcaaaattacataaaataaggaaatgtatttattaaaaaataaggttaaaaaccgaatgc

SEQ ID NO: 14267 - DNA, 4768 bp, Heterodera glycines
aataatgggttcggaagtgaattctgtccgttttactctggcactgtaatatcacagaaaatgaatttttacgcgttaaataaagtgagatttgggccagaaaaattcgggtcgctcgtcgtcgtttgttggttggtgatgtgctctctgcatttccatgtcctaattgctgtcctccctaattagggctaattaaattatcctttttccggtgcccttaaagccgtaagcgaccgcgccgacaacgcattggacagcggtgcaaatgaacacaacgccccagtgattgttggtcatctgcgaacccgggaagaggggaaaatgcataagagtcaaaaataaaaacaaaatttgaaaatgaaaatttagtaattcaaaaatttttttgaaattttccgaaaagatgcgaggaaatgggccattgtttttgaaatttagttgccacgtttttataatattattgataacagcaaaaacatttttaaaagttgccgaattctctgtcaaaaaaatattttcaatttcggtgggggaattattttaaaatattattttacataacaattattttgccacacctgcaaaatccaacccgcaacataaacgccgataaagccggtgatggcggcgaaagcgttgaacacaccgaacaccgaccctgtgtgatttggcgcgaaatcagtcggattgactgcgacaccgccttaaagatgaaagaattgaaaagtctttgacaataaaaataaaatatttggtgaaaatttttaaaaaatttaacgaaattttcataaaaagaaagtaattctcacaaaaaagttagttttcatgagttttttctgcaaagattgagaattttttcaaagaaattttttatttttaatgcattcaaatcaaaaactgaccatggtgaaagccccggacggccattgccaaagtgaaaagggcaagcgaagcggagaaagagtcgggcaaaagggagacggacagaaagcacaaagccatgccgagaagggagcagcactgggcggagagggggggggagggaaaccatggctttttagcgtttttagaaattcaggtctgtagtcaggggacacaccctcaaaaactgaaaaaatacccctaaaatcgaatttttgaattcagcccacctccgaaaccaagggtttggctacgcccttgatatccaccacaaatacaaaacaataaacaccgtacctccatgcagcggcgtgcaaaagtcaccgaccgccccttggccatcattcggctggcgaccagcggcgacagcagcgaagtgaccacaatggccatgctcggcaccacgttgtaaatgtacggcttggcgtgtgggaagttgtccgagaaataggagggcaaccagctgaacatggtgaagtaggcattggcaccgcaatactgcgcactcgaggcggccctggggagacgagagaacaatattagggcaaaaatttaagaggaaaaaaatcaatgctattgttacaattcagaatggatttttataatttttttccttttaagtaccctcgagaatttttaataaaattattaatttaaatcaaaaaaatttaaattgagtgcagactacagtgatttagttttctttgaatttggcattctgattttatgcccattttttcactgtaagacttgccaaaatgaggggtgcctgaacagtttgccccatggcacggcagcgctttcgtttcccgccgctgacacagtgccgccatttgtcgcggtggtcgccggcgatggagtcatcggcggactgtccgttttcttcgcctcactattcggattggcaacctgaaaagtgtacaaaataaaaatggaattttttaaaattccaaataaattttttttaataaaattaaatcaaattctttttattcccaggttttttgacaaattgctaatttggatattttttgtttttcggagtgggaaatcccgagagttaagatttaaaaaaacgaaaaatcctcgattttggagggtcgattatcataacaacccccgcccccgcggcgcctttcctctgactttggcggatgagtcgaaaatgcgccggcgctgccgcacggacagtgcgtctttgctcaaaaaattgaacatcaaacaccacaggatgctcaaaatgcctaaatacaattaaacacaaccacaacaaacggagtgaaaaaagccaaaactaaaattatccgaaaccccaacaaaagaaacatggaattattaccaacaaaatggaacaaactccgccagccgaaccattcgagcatcacggagccgaccccgccggcgaccaccgagcccaaagtggagccggccaagcaaaatgccgaacacgcggcccttctccgaggcggtcaaatgccgactgatcatgctggccatggatggcagatgaaagcctggcaaaagagagaaaggagaaatgatggcaccttttgctaacaaatgaccccctaaaaatgaggaaacgaagtgtaaaattccagaatttcagtatttatactggttgtgaacctgacaaacccacattttacccgatacactgtcgatttttgtttgattttgcattttaaaaaatttaaaaaaatgtaaattccctgcaactattcccacaaaaaaactgctaaaactgttgcccaccttggccaacgccggtggacacgcgtacaaagaggaggacgagcagcggagagtttgtccaataggcaatgtcaaacagttgtggcgtgcacagagtgagtaatgaccagacgagggtggagacgggaaggatacgctcaccgcccagcaaatctaacggacaaattagggataaattgagcgactttgcacaattttaacaaaaaataaaatcgcgactaggctttttgttggaattcaggttggtattcgagtttctcaaaattaaatggaatgtgtgtgggtcgaaaatggaaccagcggttaggtaccccatgagagtggatgaatatttaacgattttacggtcccaaaaaagtagacagaccggcgcaacttccggcgatgagttgagtgaaggcgtaaccccaaaaaaagcaggacagcatagtacccttaaaaggggattagactcgggatttaattttgcgaaagaattccgaattggacttgccgagtccgttttgttccacccgtactcctgggccatcgccaccgcacagattggcagcgcaacacgtgaagcgtacaacacacacgtgccgaggaaaaagttggccgtccaaagttttgattctgacctgaaaaattaaggaatgctcagcgtgagaaattcccgagacttggccctctgaaacaaaaccctaaaatgtcaaattcgaaattttaaactcccttcctccaaaaaagtatattggatttgtattggctcttccaatctctctcaaatctcagtaatttcgttgatttgttgtttttttaaaagccaattctgtaaacatttcattaaatttgagcaccaccttgaccatactcttctggaactgaatgagtggtcaaggcgtcgaaacaaagggattttctgcagttggtccggcctcagaaaaatgctcatgattcaactgctgtccacaaatcgcagatgcttctcattgcggcgactgttgcattttatgcaatttattagtgatgctaaaataaaatattgaaaattcgaatactttatgcctcttttgtgaatttgtgctgatttaattgattggaattgggaaaatgggtcatttctgagaagaaatgaacatttagttgcgtccgcaacaaattcgcttttctggcggagattttatcaaaaaccatatttgttgaccaggaagtgtccgtcttcaagaaatgcgtcttgctcatctcaagatttgacttaaaacggcataaatgtagggaaaaacaaattatgggccgagattctaaaagtatgattaagattaccgtaatcaattcttttttagaaaatgagccctccaccccatcccttataaaattgcctccttttttgattggaagataaaactgagctcccagtaccgtatttcaatataggtacattaagataagtgcttaagcagagtttacacagcttaggtaattcccgaaaaaattaggaaatcagaaaaagccatttaaatttaaaaacattttgccaaaaaggtaatcatttaaatttttttattttgtaatcaaaaagcaaggagtgctgtcggttttttttttactttgttttgtattttcttcctttttttgccttacattttcatagtctctaaacgacaacttttatgcattaatttacaaaatctaagagaactgtttgctaattaatggaggtggacaaacatgaaaaatctgaagcggtgccaaccgaagcaaaaaatgagtcagaactgatcaaatcaactaaattggaggacgaagaggaattcgaggagtttcctgtttacaacaaaggcgaaggaatcgacacggtcgaagcacaggcggcgattaatgtttgggaggtttgtcggctcaaaacagtcgcattgggaatgttacagcaaatgagacacattggaatagagtaaatcttaaacagctcaggatatgaaccggagtccaatccagcaccggagccctagttttacgaacaaaaataatgtttctaaaatttgaggacaattgggacgacgaaacgcaagagacggacttccatattcaattgcaggaggagctgaagaag

SEQ ID NO: 14268 - DNA, 665 bp, Heterodera glycines
ttttcgcgattttttgctgctttccgttgaagaattttccccaaaattaggagtgcatataagaacaagcagaaatgcaattttcaagggaaacattttggtggtttttgaatttggtggggaattgcaagcttttctcgggtatttaaacgaaattttttcatcaatttttcattaaattcttgaatttcatccatttctggctttttgtgttcccaggccgttcctctgcggctttaaatattttgtattgaatttcttgtcggtcttcagcctctttttctttccaaattccatggccatatgctttttaaaaatttaatgtttgttttcccacccatttttagcattttttttcgccgcattttttcgtatcttattacggaactcaaacaatgacgtatttctaatggaagccaaaatttatgcaaaaaatttaacaaaatattaaaattattcactgtaatttgacattatttaaaaataatttaaatttaataattttaattgaataataattattttaattaattattatcattgatactattttaggaacgccccattgatactattttaggatcgcccacattgatactattttaggaacgccccattgatactattttaggatcgcccacattgatactattttaggatcgccc

SEQ ID NO: 14269 - DNA, 1976 bp, Heterodera glycines
atgcctgataatattgtgatttaaaatatgtttggtgttttgttgttttattttgtgttattttgtttgtgattttgtgcgatagttagttcagttagtttatgctgtcgtcagtattattgattgtcctcgcctattttatttggaattaaacgataattattcttcggcattgtgttttgtgtttgctctgggctgttgtgctttgccgtgtgctgtgcaacaacaacatttattaaagcccctgacgacaatgtccccacttcctttttacgacttggcgctcctggccttggtgaatcagcagtggacaaaaacaatttggacgtagccttgaattgaaaagagggaaaagtaaatccctcgacaagtgtggaaaaatcggaaaaaagggaaaacaacttcccagcaacagacgaaccgaatcaactgtggacagcgaaattttgtaaagcccacgaagagacgagctctagcggttgaattaagttgaaaacgggagacaaatccctcaaatttcaacggactgtcaacggaaaaccaaaaggggtgaacaaaacccagaacgaatcgaggagcagacgaaaaagtggaattttttcgaaaacgggaaaagcaaatcccttctcacttcaaaatcgcagcatcggaaaaggaaattgtgaaacaaatcacaaaatttgtcagttcggtaaaatccgtcgacaaaaactgattcgcaaacgggaaaagtaaatcccaattcaacatggagcagtgtcgacaaaacaaaatgtcgggcaatgaaaattgtatggaacagccgctaaaacaaggacagcaaattggcgcgttggaatttgttctcgcaatggaacgactccccgagctgaatggaacggaggacccagccaaatacggaaatttttcaaaaatttttcgtcagcaaccgaaggttggccggaaagtcgccgcatttcagcgttggaaagcaaaataagtggaaaagcagaacgtgcctttggcgccgccatgaagcataggccgaacaaattcaacgaaatttgtcgcagaatggaggaaattttgagcgaatgggactgcaccgaaatgcaggccttcaatgaattgtgggctggcgtgaagcgacaaccggacgaatctttggaccaattcgccgaacgacttcatggagttgttgaatgtgcttatccaggtttgcccccaaatttcgtcgatgaatttgcagtaaagcacctaattcgtgctatggaaaatccggaaatttcggtgggattggaaatagctcgccgtccaggcatgagcttctacagtttcgtcgctctcgcagtacgcgcagaggcagtgcaaaaagccactaaatcggctggatttggaaaagagcaccggccaaattttcagcaaaaatcgacagttccgccacaaaaaattttcccgccaaagacaaaccgaattgtgtgctacaactgcaacaaaacgggacacatttctcgccattgtaggttgcccttcgcgcggaagcaatccaactgtgcacgaaaaccgccacaacaaaattttgcgacgaaaagtgccgattttcgaaaaaattcagaagctgagaagaaattgattgatttgcagttgtcgaaccaaccaccggcacaaccaacgaacgtggaagctggaccaaaacggaaagcgtccaaccgacagcgcaattcgtcgtcaagttgcagcgtaaaagcaacaaaaatggaggaaaaatcggcggaaattccaaaatggtttttgaatgctattttcgctgcgttggttgtgttcgccggcgtattttcgaaggaaaagtcaaagtgtggacaaatttggaaaagtaaaggctcaatgagtcgcaccgacgaagtgaaaggcggaaagcattcggaaaattggggacaattttttcgccgaaggccggggaggaattggcggatgtcgcagccgccaatctgaaaatt

SEQ ID NO: 14270 - DNA, 2177 bp, Heterodera glycines
caaaaataatcaaaattgaaacgtaaatgataattaaaacaaaaaattcaagcactggtaagaatgggggtctgagtgaaaaaatagtgatgaaaattggagttaaaggaaaaaataaaaattaatatattgtttaaaagtagcaggcttttcgtctttattctctacttctttcccatggttcagttcctctagagaaatttaaatattttgaattttctttttgtatactcaggggtttcctatcgacaaaataagatttatttacatattttatcattttttaaatgaaaatccgtacaaattgttgaacctattaatcccaaaaaccagccttttttgttgaaaatctgttaacaaattgcactcaaaatttcaaaatttcccccggcggcgcctatcggcaccgccggacccttttcttcccaaaaagttttttggaaaaagcgcgccgaaaaaaagttatgtgaaaagcaaacctgaatttctaataatactcgatcatttagtccaaaatgattaattgtttgaaataattgaagaaaatttgttttgaaaattttcattgatttaatttagctttaacttttggagtttattcaataaaaaacaaagtaaaaatttaattttgtattattttcagttgaaaaaaaattaaaatttgaattttttaaaaattttttgaatttttaaaaattcccggttggttccggttcccggtcccgaaaaaaaatcgaggtcccggtcccggcttctcaggtcccggtcccggttttgcccaaaattcccggtcccgctcaactctgttagaaatattcccattttgtgccgcgctagcgacgacctttttttcttttcgcccgtgaccggcacttgattaattattttttctaatcaggaaaattttaaaaagtttaaaaaaatttatgtttaaaaacttggaaatttttggggttttaaatgcgcgattcccagcaaatttttttgtgcgatccgcgattctcgaccgcggcttccgaggccaagctgagaaggcgcaagaaaagcgaacacttcgagccaacaatcggcggagatgaagctgaaaaaaaggaatttaaattttatatatttttttcgttttttacatttcttttttgttggggcgtcgtcgttttttgacgttgtcccaaaagaaccgaagaatggtgccacagccgaccaaatttctgtgatttttctcaaaattccgcaaaatcgtgcgccgcctttcttttagctgtttctgatgagtgccaccattgccgtcagcttcatcatttggttgcattcctttgaacatgatgctgcgaatgggggccaatttgagctggtgaattcgtgcactcgtgaacggttgacaggccgaagaattgggaaggacgaccaatttttgattgaacggtgtccaatcgttggcaaaagtgcggaccaacgggacgaaagtggccgagaagaagcatggaagacggagggcgaaggaagaagcattgattgttggaaactgctaacttttggcactcctttctttgaatggaacactttttcgtagcacatttcaatgttgtatgtgccaaaattggacgcagaaatggttggcaagaaacaataagcattaaaaaagttgttttttcataaattttcgtaaatatttaaaaatcacacacagtccaaggggtgcgtagagggccgggggaggcagggtgaaaaacgaaaatttgttttctcggcggacacctctcacctctttccccgttgaaaagttagaattttttggacaaaatcactactacatcgtcggacccactttccaatgcttttttttcttgaattcattgttgcgtgctgagaatgagttaaaaattggaaaacattggcaacaactcatgacaactcatacaaaagacaatttaattttaaaaaattaaaaagaaaatctttcctattaaaaaatattgtaaaatgttaaaatgaaagatgaaactagtctattctttgataggtcccttgttgtacgagttgtcatgtcaaaattggatagtcctaagaatcctctattagcatgcaaaatttcaaaaaattccgtctggtttcaaaaaatttatagccaaaaatagtgtagaaaaccaactttttaaaattttctggcccataacctt

SEQ ID NO: 14271 - DNA, 1740 bp, Heterodera glycines
atacgcatcggcagcaacacagaaagcttttcctatttttttgtcttcttcaatgaatgcacacacacaaattgtattttcattgtttattgcttacaattagccccataattaatctgattagacaaaataatttttgtggatttgttcgcaatttaaaaatgttttaaataacccaccccctagcgatgacctttttttatttttttgctcttcggccacatttttttttcacccgctaccctttttaaaaagggttaggaggacactggcgctgccaataatggtgctgatcgagacttgaaaatttaccgagactcgctccgaaactcaaagccgaaattcgaaaaccccgagattttctcgagcctagcctttttcaaaaattttctttacacttaaaaattagttaaaatttaaatttaaaaatgaattttctgagggtttttctgtatataacatttaaatattaattaaagcataaatttccaaattttcctgcgattgagctcaatttaccataaaatttctctcatcaattttcatggttgaaggatggatgattcaattccttcctcaacaatcccaaaaatcctttgttccacatcgttgcatcatcatccatcccaaatggcatgcaaatgggtggtcattttggtttgagaattgcttcaaattaaaaaaaaatcatccagcaatgtgccaatgcccgaataaaatttagcataatttttcttaattttttttttatattaatttcttttaattaatacttaaatttctaaaacaattcttgacgggcatttttaataattttctatagaatatttactacggttttaaaatgattttaaatgaattgttttctatattggctcagtttcaaccatttataaatttatttaattaaatttttaaaatatttctgttggacaggttttttaaaatttttatagaatatttatttcaattttaaatgatttttaattatatgtatatgatgattatggttggctcagtttcaaccatttatcatggaactgttagctttccaaaaaagggcattgggcggatgggggggggcgggagcgcttttgggtcgtccgtccctccaacccctcctcatccccccccccccgcaaaagcccatcctttagttctggaaaaagtatgtcggattatcatatgcaaaaaggactatattttgttatacattaaaatccactttgacgaaattagtaaaattttcattttaattgggaaatccaaattgttgtaatataaaagctacacaacccattagagcaaattattaattttttttcgttttctaatacgacgtcttctcaggatctcacggaattgtgaatttttttcttttttaatgcggcattttctcagggtctcacggactcggaatttcagtatttctttcaaaaaaaaaaaatttttttttaaagcggtttgaatgttgaaataaaataactgaaataaattagtaactcgtccgtcagttctgtccgtttccgaaaaatgtcaaaccctagggatctttatctcaatagttctcctcttcccctccccctccatcgctgacgattttttttctcattaatttctgccgcctttgattacgaagtccccctcccccccccccgctcgattacgtgattgtcgccgcgtaaaaaacaatgaattttggttgtaagtgataaaatttctttcatttctctccccttg

SEQ ID NO: 14272 - DNA, 2440 bp, Heterodera glycines
  unsure (1)..(2440): unsure at all n locations
aaaaaaaaaaataaatttgaaaaaatgaccgaattaaagaataaacttagcgtcaattttttttaacaattttcaaaaaataatttatgaactgttggattttacgtacattttttggttatatgtcaattattttttcngcctctgatttctgtcgctgacccaaatttttgcgccgctggcgtgaagaaacaaacgcattgaacaatgaatgaattgcaaagcacatttgtaccacatttgtgctgcattaaactttttgttgcttacaacattacacaatgacaaaaaaaaagaattggattacgcaaatttaattgttctttttttttgctcgacaaaatagcagcccgacaaaactcaaaaaaataataataataaaactttgtaggggctaatgaggatgatcgcatttcttaattgattttgattaaaaaatcaattttgcggggattttgcactgaatttaaaaatattagtgtaggtatgcgtcagaagaaaattattgaaattatggccccatttgttaattgattttgaccaaaaaggccaattttctgaggttttgagatgaattaaaaatatattaagaaatttttgggttgttgataagaattttaatgcaattttttagatgaaaatagtttcccattgttcattagttttttcagctctttggcatttggctttcactacactctccgacacaatttttttttctatcatgagactttttgcttaggtgtgcccttctcggacccgtcgtctccgtctgtgtcctccttcacctcaaatgttgctgctaatgacggttcatcatcatcatcgaataacaacaaccacctgctacaccatcatcaacagcagcttaatcaccatggttctgctgctgctgctgctactgctcacacaacaagtctcaacaatgacgcggacacaagcaaatgggtgatcaacgggtacacaacggtgtacggcacttacattggcccaatgcgatcgtcaatggtcggcacgacgacaatggcacaatcagcagcgaacaataacattggccacttttttgcggtcaatgaaagtgttgtgcaatgtgtgaactgcacctttgctggtgatattgcaggtgcagtttttgactttttttttggtcatattggtttaaactggatacaacaataaaattggccatatttcatcaatcaggcccgagaatattgagccttactttcatagtggtacggaccaaaacaattttatgcttaaagagtttctctataattaaggaaaatttgaaaaaatttcgtttatttttttaaaaaataaaacaatatggcctaaaatgttcggaaaaaaatttttttgagtttttttcgtcataaccttttgaaacttaatgaaatttttacctgaattatactggataggatttctttttaaaattaaatttatttttttaatgttaattattatttttttcttgttcgtatacatagaagaaattaattttgttttcttttgttaaaataattttgtggacatatgtattcttctaacttgtgtctattgtgtctcaaatttgcgcacccaatttgctcaggtcaaattattgaccttaattgtattgtgaattgttgtatagagatagatccttgaccttggggcagaaccgaaaaatttttgttaacatttttaaatacacatatttctaaattaacaattccaaaattaaattattatttattaacttctttaattaccaaattttaattattcaatttttattttattttcatcccaaaaccttcaattccacttccccattcatttttcttcgtcctttgttcatcccaacacaaaattggggtagaaaaagaattatcccccaaaatgtgctagtgtggtgggggggggggggtgatcgttattgtttggttgggttaagaaaaactatgaatagtgttgaaggaaatgaaaaaaaaacatctgctctcttttcgatttatttcaattttgtttatttttaatttggttcatgataaaattttaaataaatggacaattaattatattattaaatttttacaccaaatttaatttaaatttttgaaaggaaaaatgataataaattcccattagagccccgattcttttttagcatttttaataaatataaatcgagggctttcccgtttccttcattttaggcaaatggcaaatcaatctttatgaatgatgaattacattttgtgatgctgtcactgtttaatctcatagaagatagataaccatctggcaaaaagaaccacaattaagacataaaattcataagaataaattttttgcattttcttattaaagcttttttaattttaatttttaaagaagtttttaattttcaagtaataatatatcaattaattaattagagaatttgtattat

SEQ ID NO: 14273 - DNA, 1382 bp, Heterodera glycines
tagaagatttttttcccgccatttttccttcaattattttacaaataaaaaatgattcttattttgtgcccaccctttcaaaattgtttttcgagttatatagatggtggcatttttttttcttttttttacaaaattttaattattttctggaaattgagcaattttagctgttgagagcggccagttcagtgttgtccagtgtagggtcgacaactcgtcgttccatcggtgctgttagttttcgacagtggtgatctcgacagtaaagtttgtttttaaaaacttgttctatatggtaaagtttcgataaattttgaaaaattaaaatgattaggacaggctctttacattgcagcggggtttgcgattttcgaattctgctataagaaagagcttgtagatatttgcatcttggcactcaacgccagcatttgttagcatattttcccacacgattcgagaatcgtatataagattttttaataaaaataatcatacgcatctttattattaccacttactcaattctaaattttgtatatgcaaattgtatattaatagtaattcatatgtacaataaatcaagtagaaaatcttctcaagattttcggcagagaagctcactgttgacccactcgcgcacccattcaaatttggattaattttaggcataatcaaatttttttcctaagagatattcgaatcggaaaatatttgacgaaaaatggcaaaatatgcaaaaaatcggaaaatatttgacgaaaaatggcaaaatatgcaaaaaatcggaaaatatttgacgaaaaatggcaaaatatgcaaaaaatcggaaaatatttgacgaaaaatggcaaaatatgcatgaaatatgcagaaaaagcctaaatatgcaaataaaagtcccgacttttatacgcaaacacaaaaaaaaagtgttttttatgcatttgcatattttttgcagccctgttaatgaccaaaaacaaaagtcacataaaatataattttccgaattttcgagaatttcaacaatttctttgtcctcttttttggctttccatttccaaaagttcttcgccgaagtgttggtcattttggcaatttctgttcacttatttttggagtttctctttttatttgccaaaaattttcatttttgccattttttctttttccgttattctcttaagactaatgccaaactgttttttccatgttgtaattgctctataattaactccaattttcttaccaatttcggcataattttgttgccattctttgcttgaatattttcctttttgtttaaattcatttgccatttcattaaatttttgtacaatttcaaatttttcttcatccgtttttgatttatgaca

SEQ ID NO: 14274 - DNA, 1140 bp, Heterodera glycines
  unsure (1)..(1140): unsure at all n locations
ctttttaaacaggccaaaatgtttaggcttaactttttagtgaaatttcaatcactcatttttcgagtagtgctcagaagcgtaccaggttttgcaggggcctaaaaaggtcaaggaaaggcgtctctgcgttgatttagcagtagtacctatgaatttaaaattttctaagaatttttaaagtttcactatttatttatttttgcaaaattaattcatgaatattttttcagaaagtgctctgaaacgcacctaattttatttacatgttaataaggctctctgatgctttttctatcaaaaaggaagatgaattaaatttttaattcctttttaaacaggccaaaatgtttaggcttaactttttagtgaaaattcaatcactcatttttcgagtagtgctcagaagcgtaccaggttttgcaggggcctaaaaaggtcaaggaaaggcgtctctgcgttgatttagcagtagtacctatgaatttaaattttctaagaatttttaaagtttcactatttatttatttttgcaaaattaattcataattatttttttcagaaaatgctctgaaacgcacctaattttatttacatgttaataaggctctctgatgctttttctatcaaaaaggaagatgaattaaatttttaattcctttttaaacaggccaaaatgtttaggcttaactttttagtgaaaattcaatcactcatttttcgagtagtgctcagaagcgtaccaggttttgcaggggcctaaaaaggtcaaggaaaggcgtctctgcgttgatttagcagtagtacctatgaatttaaattttctaagaatttttaaagtttcactatttatttatttttgcaaaattaattcatgaatattttttcagaaagtgctctgaaacgcacctaattttatttacatgttaataaggctatctgatgctttttctatcaaaaaggaagatgaattaaatttttaattcctttttaaacaggccaaaaagttgcgggggcttaactttttagtggggggggatcactcatttttcgagtagtgctcagaagcgtaccaggttttgcaggggcctaaaaaggtcaaggaaaggcgtctctgcngtgatttagcagtagtaccta

SEQ ID NO: 14275 - DNA, 829 bp, Heterodera glycines
acggtgaagttggagtaaggggagatcagttggctaacgcaaaaagaattgggtcgataggtgcagaattcgcaatgtgcgggccacatttgcaaagagccccccccatttttttatatatagataactaggcgtcccggtagatggctgcgctttatagaaagccgagcctatcccgtcgaggtgtagatgcgtaaggtgtgcaccgtcgcggttgttagtgcagtagcagctcaggcgcagatgcgtgtctggatgttcgtgcagtagcagctaccggtaacagcctagcctagccgttcacccccaccccaccctacgcggcatgcaaaagaattgatcaggttcgtattgactcggtacactcgctcgtcgctccgcttcgctccgctcctcgctcgcgcacctcgagggtcagggcgcttcgcgcccgccccttgtcatgagcagcatcggttggcgcttgctcggcgtactcgctcgtcgctccgcttcgctccgctcctcgctcacacgcctcgaggggcagggcgcttcgcgcccgccccttgtcgataatgagcagggaaatgaaatggaaatggaaaagggaaaagaaaagtaaaaagaaaatggaatggaaaagtaaaagaaaaaggaaacgaagaaaaagaaaggaaaaggaaaaaggaaagggaaaggaaaaggaaaagggaaaaggaaaagggaaaagggaaaaggaaaaaggaaaggaaacaggaaaggaaaagggaaaacgaaaagggaaaagggaagagaaaagggaaaacgaaaagggaaaagggaaggtaaaaggaaaacgaaaagggaa

SEQ ID NO: 14276 - DNA, 266 bp, Heterodera glycines
attttctgaggtttatattttggttgggatcgaaaaagttgggccgctaatgtcttttatggctggtggccgcaaaagtcggaccacaaatgtccgaggcgcaaatgtcgtttttggctgtgggccgcaaatgtaagggcaccgtttactataaccgcactttttgctgccaaaaatcagaagtttcacattttttgctattttttggccgctcaacgataaatcccccccccccccccccctccatatattgtggactgtttgca

SEQ ID NO: 14277 - DNA, 1834 bp, Heterodera glycines
gggggggggggggggggggttaaagggggccgggccaaaatattcgcccccgaaataaaaaaattttttcaaacctagaaatttttcataaacaattcttagggaatttcttagtaagaaaatttcaagaaaaaaatttttgaaaaacatttcagcgattcgaaattttatgaaaattgctaagttttttagaaaaatttgaatttttcaatggtttttcaggaaattttcttttaaaaaatttcttaagaattttttcttgaaaatttctaagtttgaaaaatttctttttaaatttctgcggcgatatttttaggatgcacccggtataatggggagcaatcagttcgtccccctcccccccggatctgtccccccccgcattgtaactccctcgagaatttttttttaaattttactgatctagaaatttttgcaagaaaaatttaaaaataagttttaaggggttttagggtcgttgatcacgaatccgggctcagatcagcgctaccgttcactacatgagctgtacagggacaaagaattgataggtttcctgtaccaataataccctcattggcaaggtgcccatgaggatttcgaattttattcttcctgtaccaaggttaccctcatgggcaagatgccaatgaggatatcatccatacaaattttctatttttatttttgttcgagtccgggtcagaggttcgaaattggcaaaaatgggtgctgtattcgtgatcagcgacctcaaaacccccataaaactaggcatctgaaaatgtatgtgaaatctgccccttaaactagataagtaccgggtataccaacacgaaaaacccataaattttcaacaaaaaaattattgttttcaaattattaatttccagttggaagactgcgaagatttggacaacgaaattgacgaggcgctgtccgagttcgaggcgaataatccggagcgcaatttgctgcacacaatttgcttctattgaccccccaccccccaaaaaaataaaatggaaaaaaagttttctctcattgtttgtaattttataattctctctggttcccctaaaatcaaaattttgcatgttattgttatattgtatacaatttaattttgtcccattttatttgccaccaaatttgctgctcaaagattttctcgacttttggaaaagtcttcgcttttcacgtaacggatgggaaatttccaagagtaggaattggtcggaatggacgtcaaattcgagacccagaacaccctttgcaacatgttttaatgatttaaaaaaaaatgttttttaaagttggggtgccaagggcagtattatccaaataaatatcaccgtcttggagcattctcgttttgagtccaatcattcagtcgatcgctgttagacacaaaatgtcgaaaatattctcgggtttacaaaaatattgttcaaaatttatgcatgcaaatgtataaaaagaaaagagataaacagaatcgataagaaaaaaaaaatggataaacccgaaaatggaataaaaaaacaattaaaaaggtaaattggttaaaatggtgtaccccgtaagtgtcctcaaaaatcacttaaaacccgaagaaaatgccgtcgctggcccacatcacttgctgaatggccccaattggtcaatgttctgctccgactcctcctccgacggttcgtcgttgttgtactgctccaactcctcctccgacggttcgtcgttgctgtactgctccaactccgtccccgatttgtcgttacagtactgctccaactccgtccccgatttgtcgttcctggaaaggtccaactcc

SEQ ID NO: 14278 - DNA, 3477 bp, Heterodera glycines
  unsure (1)..(3477): unsure at all n locations
tctagagtctcaaaaataaaacaataaatattagcgcatatactctgatatttttgggatggcttttccgatcaatcaataattgctctctttctctctccgtctacactttggtcgtttcctcttcgctctctcgctgtctctcgccttgcctcggttttttacccgtgaaaaccgtctgtctgtttctctggctgtccatcttcaccgttcccatctcttgcgagtttcgactcgttgccgaactgctcgaactctttcgtctcgttttgctgacgaatgttttgccatgttcagctgctgctgtctgttcaacgctcgtcatcgctaattcattagcatcgaataattttggcattgtgtcggcttttcgaagccttaaaacatttaaaattaaaattcattcgagcaaaaagaacgtttcttggcaaattcacaaattttgaaagaaaaagtgccgaataaatttaccaattgctgggcaaagaaggcacatcatcgtccaattcagcattgaccacaaaactgtgggaggtattcggcgttggcatttccgacctttggtcttcttcgtcctccaattcggcatttactaccaaattgtgtttcagctcagaattcggccgtgccatgtcaataggacgagcggaataagccgtcaccatccgccgactttcgttgtcacgctcagacaatgggcgatcatctgctgttgatttgccatagtgatcagaagcctgaacccgttctgacgaccaatgctgatcagtcgaatcgaccagttccgtttgtttcccatattgatcgcttcctctgatcaattctgttggtgttgtcccttgctgataattgctgcttccaactcgctgctgctgttctgttgctctgatcacttcgtctccctcctcatcctcttctttgactactacgatttgtgtgatcattggtgtcattccgtcgtccttctcatcgtccgctgacggcggttgctcaatgactaatgattcaatggtactccgccgagttgaagtcggttgatgatgcttatggtgccgatattgatgagaatggtgttgggactgatggagtcgagaagagtttggcaccgccggaggagggggcaaaattggccgaatctgaaattcaaagctctcaattatattccgtggtaaagcattggaattcatttttgacaaatcccaatccgaagttccgcccgtcatttgtgtgagtttggatgaccttttgttggcttttggcgttgccacctcccaatgtcgtggtggtggtcatattggacgaagtcggcgaaaaatgagtcattgaagaaactgcggcaccttcgccatcgtcgttatcagagttgaggacgatcgggttaagaatttgctgatcggaactgtgacccgttgaagaatttgccgaggaaagtgcaggatggacccgggaaagagagtggcgacgagagcgatggatggagtgggaatcatgatgaagggcaaactgacttaaagggcagaaaccattaaccaagggattcaatctgaccaaccaatgattggtcaaccaatcaattatttaatcaatcaatcaatccacccaatcgatggatcattgaactgactgacaatgatgggatgcgcaagtgttcgatgttcttgaacatcgtgcccttggcgatcagttctccaaagccactgcagtgggagaaggcgtagcccgagcggagactgcgttttgccaggcccgtctttgtgatcggcgccgtttgtttcatcgcttccgccgtcggcgctttgtccgatggttccatgcaaaagcgatgacggacccgaaggcgatcagaataggagggatgggtgtcgaaccaaaagaagcgattggcgatcaccggcaccagcagaatgacacagattaacacttagaggggaaattggcacggtaaaatggcaaaatgaaggcaaattgatctaatattgccgacagggacaaactcacagagtgaaagccaaaactcgggaatgcgaactgctcgagccgcgacgccaaaattgtaagtgccggtgatcaattgnnngaaagggtactgtaaaagggggaagagtttggtattanaaagcaatcaatggttttgctattacctgnntacagacgaaaaccgtaagcacgtaaaagggcagagacccgccganncacagncnattaatcccatgtcannntagcgtgtcaaacgcgatttgaccagtgaccacaagcaccgaaaatggaatttgggggagaaaaattaaaattgggaaaataattaacgaataatgaaagactaattaaaaattaactaatattgattaatgaaagacaaataataaaataattaaatgaactgaacattcgtttgttcccccattttctacgcaatttttgtctcatttttggtccgcttttcctttcgctgcctcaccagtgccgtgtaagcggtgaatgcgaacagcgaataatcgtagaggccgcgtccgttttcactgacagcgcggaacaaagcgccgaaagggacgaagaaaaggacaagcgaactgaagcgataaaaggtcacaaccttcgcttcaactgctgctttttgttttgcttataatagaatgcttttcattcaattcgatcgccaagtgattttcgccatcggtgaaactgatcagaattcgatgggatggccaagggatttgtggcattggccaacccaattgcttattgatttttgccattggccaatccgttcaaatttcgatggcattgctaatcggttgttttgtacgactgatccgttgcgattggcttcgttcttccgctgcgtttcctcccccacctgatcatcccgtgaatgatggagtggatgaaaatgcgcatgttgaagaacagattgaactgtcccggaatgtaaagacggggaaagcgcgtgctgtactcctcgtccacgtcctggtcaaaaattgccatcgccagcacgggcaaagcggtgaaacacaaattgtacatggaaatgagcacggggtcgtacacagtctgcaacaaattagcaaacaattcaaaatcgactgtccaatagccaaacagtggcgaccgcaattcaattaattaaccaattaaaatgggaataaaatccctatcaaaacattggcgtgctattttttattggactatcagtgcgccatcagtgcgacttcattcagcattaaactgatcagaccgccctagtcgcattctctcatcatcggcaggactgatagtccaaagtcgtatagaagtgggagactggagggagagaagagtaaaaaatgggcaatgtgtgatggggagaaaaagagtagagaaagataaacaaattaatgcactttctctctgcccgctcttttctctgccgctctcttacaacccacgctcttttgcctcttatatttatttatttttttaaatatatttaatttt

SEQ ID NO: 14279 - DNA, 1071 bp, Heterodera glycines
  unsure (1)..(1071): unsure at all n locations
cattgtaacgacggttctctgcaaaatgttttttcttttcaattgattaattaatttattatttttatgtatttttaatcattatcatttagtccaaattttgctttccattttttaatcgttctcttatgaattgccaattcttttgaaattttttcccccactttttgcgcactatttgcttctccgtttaccagcgatgcctttttttagtttcatatatttgtttacaattttgcgtctgttttcatcagtgttctttttctggtttaaaataaattaatttgcgttttatctttctttagtttaattaattacattttttaaatacaaattttcttactggtcaagcccaattgggctttccatctgtaaattgatgtaagggaagtgccaatcttttcggcaattttcatccattccctcgttgaatgggcccattttatttgtggctgaccaaatttttgcgacatttcttcatctttttcttccatttttatctttttcctgttattttcctgaatattttcacttttcgtctcttttttgacaaaatttccaatgtttttgccaattattttttgttcaatttttaattttgcttcttccccatattcagtgggattcttttcctacatttttggttcacggaaaaagaagcaaatttgtataatttttaaaccactaaaatattcatttattcattcattaatttttgattatatcacaatttattcaaatatttgttatgcaattatttcttatttcaatgtaatcatttccaaataaacctttatacgaaatgtgaaagaaaatcccataaatattttgaaagatatcaaataaattttgggaaatataaaatgagaaaatttccacaaaaataaatcacatataaaaacacaaacattcttaaaaaaatgcgtttttattattcttgcatttttgtggttgttcttttgatggcattcgtcgacaaaggaaattttggaaaaagttttaaattaaagaatanatattanaaaataaaaaaaataaaaaaaacattatatttgcgataaataaatttta

SEQ ID NO: 14280 - DNA, 2211 bp, Heterodera glycines
attcttaagaaaattattggtgactttgaggaaactgcttttaatgttaacaaaaatattttccaagtcctgtaaatcagattctgaaattaaaaaaaatgttttgaattttcaaaaagagtaatttaccctttaagaacaaaaaaaacaaaattgagaatttgccgaactttgtcccttgtttttaaatttttatttacttattttcaacgcatttactaattgatgataacaattgtcgtcattacgggatgaatattatgcaatttgttgggacagtgtcacttcaatggtccctcttttcgcttcattttgttgccaatgaattgaaaatggacgggaatacattgatgaattggaagaaagcaatgaaaatttttaaaaaataaacaatcataaattggggaggagctgataataacatttttcaatgtaaaatttaatacaaacaaaataaatgtagcaaattaatggacaattatttaactcgccttaattcaaaatgttattatttttaattgtctttaattaacccaatttatttatatgatttcacaagagatcaacaattactttatagatttattaataaggatttaaattgaaaatttttatgtttttggataccaaaagtttccggtgattggtgaatgttatttttagttttgctgcttgacttattgccccaaaaaaaagatacccacgaacaaatttatgatcagcaagtgactaaaatattatgatcaaaatattaaaaaaatataaagaaacatacccataattaaaaatgctaattaaaattaattaaaaattgtattgaaaagagaattaaatgttatggaaaaaattaatattatgttttatgtgtataattcgaatatgcatcaaaaaacaaattttcgtgattttttgattatttttgctaccactaattaatcgtttaattaattggtcttacatcttttcgcattgctaattttcattttaatttcaaaatttgtgatttcccattcaaattatgctcccctcccttcctttttccgcttttccttcccccgtctctcccaatttcgctgctcctcccccgcccattttgcccaattggtcccggcgttcgtccccatggtccataaatatgctatggctctccgtttctcgaactccgccgcgagataagaatcgtggtaatacgactgataagtgcacatgacggcagacgcggcccacccgtcggttgccaaagtcccgcgactctttgcgctgcgctcgccgccatataaaaaaggcagcggaagaaagcattagtcagtccgggacgagaagagaccattttgggacgatcgttctcactcaaacccatttgaaaacaggaaactgttttttagcagaccaaaagtaataaccaacgaaattccgccggaaattttcatgaatttaatcccaaaaaggcgttaacagtccatttcttgatcatactcatagttttatttgacaaaattatattcgagaaaatgtaattcataattttaataaattaaaaaaagaattctcctttctttttccatttctctttcataaaagtgtgaattgcgtttgttcaaaggatcatcaaacattcaattaatgttattgatcgttcactaagattaaatgatcagatggtttttaatttctgaacttttcatggccaagggaaaaaataatatacttaaaattggacgaacatttttcgtccgccattcgcagacaaaagcgaataattcaatgttggagagcagggggagttttcagagtgggcatgtcgagaagtgggtaccgaaaaatttggagaattttcgggattttttttttaattttccaagatttaccctattaaattgactaattgatacgcttttcgggttgtttcttatcagaataatcgtttgaaacgaagatttggcgaattagcctttatcttttttctttttctcgcattttcataaaattgtggggggggggaaatcggagttttttttttgctgttttttttattcatttttgtgcacatcgtcacaaagtcatgaatggccaaatgttatcacttatcattatcagttcagtagaactgaaatttcttttttcttttttttcattacgcattcaatggagagggaaaaaattgtaattggggcgtttcagttattcatgaattagaaggtaaatgagaaa

SEQ ID NO: 14281 - DNA, 3518 bp, Heterodera glycines
ccaaaaatatgaggcataccttggcattttgtattttttgaaaaagaattggcaatgcaaaaatatccttgaaaattttgatgaatttgaatggaaaaaatgccaaaaatatcgcaaatatttggtcattttgtacgaatatttgctcagagagtacgccggaattccagcagtgaaggcaaaatccgtgaataaaatatggtcaattgaaattgaagggctaattttttatgttctttattcccttaccaaaatttcgtagttttattttaatccgattaaatattataaatatcaatttaaaaaatggtaccatcataatgttgaaccaaaattattgaatgagaataaattgagaaatgaaattaaatcggaaaacggaccaaaaaagtaaattaatgaaatgattttacaattggcaattgacacagccaaagaaagcccaaatgaaagtgttgatgaaataataaaacaaaattttgatcgaaatttatacgaaatgttatttagcaaaacatttggaaatgaaaatgaaagcccaaatttcaaattattttttcatgttttataatgggatgccaattctcagtccgaaggatttcttccaattccctgaccaaatttgggacaattttttttgtatatctgtgagaaaatacattaattaatttcgaacaaatttaattaattagtgaattttataatttcataccattgtgaaggtttaattttaattctgtcattacgatgaaataaactaaattttctccaacactttcgctaatttctttatttgttctaaatttttgaacacattagatttgctgagaccggaattttttgggtaaaaccgacacatgccgggcctagaaaagccggggcctggatttccatatgaagcagcaagttggaaaatttcaaaattttgggaattctaattatttttttcagttgtaatcggatttaatttgtatgccttattacacgaattttcaaatacgttggcataagcgcgacttcatgcaaaatttcaatttgtttcatataataaaaaaaattcgccatttttgaaaaacttggacttgaaatttttttacttttagaaaacttcaaaatttttgagcgattaaaaatcatgaattttgcaggttgttttagactttctgttaacgtattgtcgtgcaaacttttcaactcatttgaaaactattatttgaatgaagccatactattcgagcacactctccttgcactcgcattttcccaaaattcactgcccttttttcaaaaattcagtgaataaagcatcatcacacttaatttggcataattaaaaataatatttaagttaaatttaattgaatgctcacccatatgtttgaatcatcaaattttgacccgataattatcaaatgcttatcatcaaaagcatccaatgatgatgaactgccatttttttcttgtgtcatttttgccgcttttttaaacatttcgtataaatttcgatcaaaattttgttttattatttcatcaacactttcatttgggctttctttggctgtgtcaattgccaattgtaaaatcatttcattaatttacttttttggtccgttttccgatttaatttcatttctcaatttattctcattcaataattttggttcaacattatgatggtaccattttttaaattgatatttataatatttaatcggattaaaataaaactacgaaattttggtaagggaataaagaacataaaaaccttcaatttcaattgaccacattttattcacgtattttgccttcactgctggaattccggcgtactctctgagcaaatattcgtacaaaatgaccaaatatttgcgatatttttggcattttttccattcaaattcatcaaaattttcaaggatatttttgcattgccaattctttttcaaaaaatacaaaatgccaaggtatgcctcatatttttggattgcatatttactgatttgaagatttttttgttggcctttcataaaagcaattagcatatcatcttaaatctaatgaaaatggatttaaataaacaattaaaatgaaaactcaccgatgaattggcatttgaaaaggtaaatgaaaatggagacaaataatggtaaaagaaaaagccaaagcggggttaaacatttaatgccaagaaacaagaaatcccttacttgtcaagatcttagaagttacactagccccattttctgggctgtttcggtctcttcgggatccattttcgttttttcaaatcatgtaccaaacctgacctaggcgcctgggcacctaggttttctgaatttttgatcagaatatgcaaaattaagtcagacactaaaacactaaatccagaaaacccacttccaaaggctttttttttttttttgcaaaatcgcattcaaaaatctcatatttctttttctttccatttttcctccctctattcggttttttgtttgtttgtttgtctccccttaagcttcttgctgcttctctgttgacaaatgcgtgagcttttcctctttcctccgctccatttaatcatcattcttctcattcattgtcaaaagattaagcaaaagaaagagaccacagggggaggaggagggaagagaaaaaaaaggaagaaaattgatcgtttcaaatcagtgtcgctggggagccactcgttccctacccccccccccccccccggattagctccctcacccgtatcctttccatccctatttttcaaaaattaaaaaaatattttcaaagaaaattcgaaaattcctgtttgacttttatttttttaggtggggagcgggggggggcgacatggtgagtggaaactgatatgggcaggcaacggcgcggagggtccgccggagagaacgtacccactaaacaaacacaaacatttttggtgggggcacacaaaatcggagaggctaagagtgctcttctgctgctgctggtggactacacacatattattcgataattgcccgccaccatcggtcggatgagtccaaagaacgccgctgctctgagtcagatgatgacaatgatgatgatgatgaggaggatgaggaggaggatgagtagcatcgctgctgccgccacttttgcccctctccgttcctccgccgcctccaacgccatgtcaacaaacaaaagcattctttttggtcggtcgatggttgacaataataatgttgataataattttgggtgtgtctgtgatgctatcacaccaccctcagccgttgttatctctcggttttgttgatatgtaattaaaaaattttttgctttaacattccatttttttggtttgaaaatctgatcaaatccaacgaagcgggccgtttgagtctggcgcactttgaagctttgtaacttttgattgaaacgactaaatacaacattcttggcgtcattcgatagccctaaatgttctctatttagctgcaaattctcaaaaaaaacttttttga

SEQ ID NO: 14282 - DNA, 2110 bp, Heterodera glycines
cctaatctgttttatgcaaatcctaattgagttttccatcggaaaattgtgctgttactaacacccaattttcgcgcaattatttttaaaaacgcggaaatgggcagctagtcgaatgagtatcttttatagcaaagagaacggcggcggtgctagcttaggaaggtggattgggcgccgggcttttcgacagtggatttttcgacagaaggacttttcgacagcaaaggacatttcgacagaaatattataaaattcaggaggggacttttcgacagtagatttttcgacagtaaaaagtaattaaatttcacatttagttgtgtaaaagcgtaaaattttttccaaaaatcaacaattaagccaaatcagtatttgagatacataatatttaaactcaaaaatttttaacaaaaaaataaataaataatttttggtgatgatttttagaaaattttttaattcttagtgatgtatttttgaaaattttaaggatcgattcttaggagtttaatttttgtttttattacatttttattcataaattttgagcaaaacacaaaaggtcaaaataggttttgttaaacttcttagggttcaaagaaaataaaaacgataaaataagtgctaataactcgaagagttgcttaacaatcaccaaaaaacatattttccatgctttagggccactgcaagttcaggaaaaataagtaaaatctaaaaaacttatttctatgtagtaatattatttagcaatacacattaatatgttaattaaaaagaaatttagtaaaactgacaaacaataacttgtttttatgattactgtcgaaaagtccattttatttttctgtcgaaaaatccttcactgtcgaaatgtcctttgctgtcgaaaagtccttctgtcgaaaagtccgggagccgaaaaatccactgtcgaaaagtccgggaagccctaaagcgacaaaaaaaacaatttttttaagtcttaggaataaattttatttcacgtaagaaaacattttttctaaaacacggcaaaattattaagaaaatggaaaaatcaaaaattcggagaaaaaattttgggtcaatttctctgaggtgcttttaagccattcaaagagatgacttctgttaaaattaaagaaacaaaaagtaattttttttaaaccaagctcaaaaagaaattcaaggggaaaagacaaaaagataaaagaactaaacaattcataaaatgagcaaacttttaaaatataaaatttaaaatagtaacaaatggaaatagattaaagggatttaaactcaaaataaattcaaaataaaagggctttaaaaattaaaaaaatcaaagtatgggattcggcagaacctatggatgctgccggagaaaattttttgaaactttaccggtttccaaggacaatcctggaaagaacgccgctttcaaatttttcatgaagaaaagtacattttcgaagttttagaaaaagcaataattcacaatagaagtcgaccctgctctatccaatggtatatcgtttataggcattttctgactgacagctcgtaatgttccctgttagcgataagacaattaccaaaaaagttataacatgaaataacaaaaaacccaaaattttggaagttttttcttaataacttttttattgaatttcgaattcgaacagcattttagagaaatacgaggggatactttttggagatttcagctcatttgagcagccctaaatggtgtatttaatgtcgaaagtgaacgaaataaaaaaaattttcgtcgaaaaaagaatcatcaaaattaacaatggcctaaagaaatgccaaaatgttttttatctcgaaaatcttaaattttaatcgaatttgtctctgcccgaatttgaacaaaaacaaaatattctaaaaaatttttataattacatattttaaattttacgcaaattctgctcaccatatgcaattgacaccgctcaaattaatgctgacattgttcaaattgttgatcgaattttcgtccgtccattgtgccgtcgtcgtgtcccctaatttggcatcgtttaattatccatcggtcgtatgctgctttggt

SEQ ID NO: 14283 - DNA, 1565 bp, Heterodera glycines
  unsure (1)..(1565): unsure at all n locations
ctctagagtccatgctcactctctctctatctctttctgttcttttccctttatggttagggccatgnccgcgccgcgccgcgccggtccttcaccaggcaaccaattataaagtgccgtccccccacccagcgcctcgggcatgaagcattagcaattccccgaccacaaacacatggagagggcgacaattcagacaattcaatggtggcacggcacacacagtgccgccttaagcttctcttctctgatggcaatgccaagagagacaaaaagcagcaggacggcgcgggagggcaattgaaaattgcaaaagactcactgagggcaaaggggggggggggaagaagcaaaacaacaaattcacaaaacatagtaacgaatgaatgaatggtgccgagaaaaatagtgccgaaaattagcccggaggggggggggggattttatgtgaaattttggtgtaaacttttaattttatggcaatttgtgccaatatgaaaagagttaatttaaataattttaaatcaatttggaaaataaataaacgaaaaggtgaacggaagaacaaaaatgatgaagcattttgaatgttaaagtgattttgtccggaatttttgtgtttaagagttagttaaataattttttttttcattttaatgaatggtgccgagaattaacggtgggcggggggatttgtgtgaaaattttgctgtaaatttttaattttatcgcaatttgtgccaatgtaataaaaaaaaagaaaagaaatttttttgatgtgttaacatgattaaagtgaaaacacagaatgcagaaaaaaaaattttcggaattttttaaagggatttttctgtctattatttatttttgttcattttacttttcaatttatattattcgcaaatttgtaagctaaattatgccaaaaatctatgaaaaaattattattgaattgttgtgattttacatttatttattgattgtttattttgagtgtttttattttttagttaaatttttgctaatattttttttgaataaataagttccttttaaaaaattacgtgaattttttatactctataggccaaggtggacagaaccaaaaatgctaaagcattatgaattttaaattgattttgtccgggatttttgtgttcaagagacaaacaattgttgttgttctttttcattttaaatgaggaaaggagaatattttatttaaaaattgcttttaagttttaagaatttttttttaaaaagccggtctcgagcctcgctcggctcaagaaaattctcagggtttttcagtctgggagtttgtctcgggtctcagctcaagaaaactctcgttttnttttgttggggtttttgctgtataagtagtcaatctcgaatctcgactctacnaaaactctcggggtttttgcatttttcggaggtaagtctcgagagtcggctcaaaaaaactttcacggaatttttgcagtccgggaggcaagaagctgatatgataccgtaatttctatgaagaaggcacttgcctgacttaccatgattatttg

SEQ ID NO: 14284 - DNA, 2087 bp, Heterodera glycines
  unsure (1)..(2087): unsure at all n locations
gcagttttgttactgtaagagacacaccgtgatcctgtagtatatatttgcgncacgaacggtcttaataaaaaatgattgatcatcatctgattgagtttttctttactattttaaaactcataaattaaaacttaaaatttattacaatttaaattattttaggatcattatttaaatacccaatttttgatacatttgtaaggctgtgtgatttgtcatatttctcatttggatttaattttttattaaagaaagatatatttataatgttttattccgtttcaaccattctcctttttattactgctattatacatctttatttaattcatatttcatgtgcaattccatcggtgagttaattaatccgagtaattaattttacgggtctattttaattagtttgatgacaatattctaattgcatttatgaaaggccatcattggaaatgtgacaaaatagcagagaaatttgaagaatatgaacgcaccgaatgccaaaaatatcgcaaatttttggacattttgtacgaatatttgttcagagaatacatcggtattcacacagtgaagccaaaatttgtgtttaaagaccaaattgaaattaatgggccaataatttatgtggtgcattgtctagcgaaaatttcgcaattttattttaaattatcttggaataaaaattatgaatataaattaaaatctctgttcaaatggcttgacaatatttttgaaccaaagttgttgaatgagcacagattgaattatgacgaaacaaaattgccaattaatgaaattattttacaattggcaattgaaaaagcgaatgaatggcaaataaataaaagcttagacggaataattgtacaaaaatttagcaataaatttgaagaaaatttggaggaaatgtttaaaaaagcggaagaaagggcaaaaaacaataaatggaaagcaaatctaataaatgatgacaagcatttaatacttgtggacccgaagtacgaagataaatggacatgggtgagacttaaaattcaatgaaattatataaattcaaaacttagactgatgatgcgctattttctgaatttgtcaaaggattagcgacaaattttgagaaattttttaaaatggctaaagaatattcaaattatttaaatcgaatgaaagagaaaggagggaggaatttaaagaaaaatgccaaaaacatcgaaaacatttgcatattttatatgaatatttattccgattatatgctgaaggtttgttggaattttagtttattttgatttttacatttattaaagtaatataataataataatttaataagctaataagctaaaagtccgaaattgtcgaaacaattgcccccattggtgaagccaatttttattgttggagggaatcttcctgacagtttaattggtcttgtcgaaaaaatgaatgaaatttcgaaatgtttttggggaaaaaaggaaaaaactcttgatgaaataaaattagtaaatgagtaggaattaaattttgaaattaaagagcagaaaaattagtcccataaaattaaacaaaagagaaaacaaattttaaaaggacaaacggacactgaatgaattcggcaagaatttgaacaaaaaatggaaaaaatatatgaaaatacgaaagaaaatgccaaagaagaaaaggcaaaattggaaaaagcaattgaaaatgcgacaaatagtgaagaaaaggaagttctgggagaagaatacaatgacaaatttggcactttcaattcatcgccatttattgacgaaatttgacaaatttggcactttcatttcgtcgctctttcataaatcgttccttctttcccatcagatccatggcatttctgatgatgggtactattttttcttggaactttcattcaaatattatttttaggggttgattactggtttatttctctaaacttttggcttaaaacggggaaatttactatttccccgggaggggaaaaaaaaaagggtcaataaattggttattttcttaaaataatttaaatcccattgttttttccgaatatttcctttcttttt

SEQ ID NO: 14285 - DNA, 4205 bp, Heterodera glycines
tgtgaatttgcgtacttgaatcacactaaactttcccatcatgtacttagttaacctaaatatataaataatcattttaatttagcgacagatggctttgatccgcttgtccgattctgcgtttaaacaccgctatgtgccggctgagcgccaaacttattcagagcaacaaccgtatgaacgcacgagtgccaatggggacgaaacgatttcaaccgagaaaaaatgggacacaaaagcgatgaattggccgaaaatgttgcttgatgaagaagggaagagatgaatgaatgaatattgggaaaatcaaacaatttcatgatgaatttatgcacttatgatggatgcccttgattatgccatttaaaaaagaattttacatttttcgctttaaaattcaaaatcttttttttgtgagatggaatcccgagggataatcctgctaaaaccccagttaaattttatgggatcacgggtgattgcggaatttttgcatgttcgaaaattctaactttaataaaaatcttcaaaaaacaagaaaccaaaccaatttgcccctttcataaattcagggagtaagggtggggccggtggtgccgataagcgccgctggttaattaaaaaatctggccccaatttcccagtgaaatttttcaagagttaatcgggcttgtgggccgacggaactgatttacggcgccgagaaatttttttaaaaataaattttagatagaatttgcgatgaaaatgtttacaaatttttgtaaaaatgttcataaaattctggcattatatactttgaaattaaaaaatatatttacttttctgagaattttaagagtagtttttttagtgacttgaaaatgtttcaaaaattaaaggattatgactaggggtgagattatttggctctaaaaactgccaaaataggtaggctctaaaaaactcaaaaatagtatctaaaaaatggaaaataggcactaaaaaccctcatttttagggaaaaaagtaaaaaaaaattaggccaaatcagtattgagataaataatttttaaataacattcctgtcaagaaaataaataaataaattttggagatgaatttttgaaaaatttcatttcttaggggtgtatttttcgtttttattgcactattattaacaaattttgggcaaaacgccaaaataggcaaaaatagttctttaaaaattttttaggcgctaaaaataaaagcctagaaaataggcactaataactcgaaaagtagcttaacaacagccccaaaaaaacatgtttttcttgcatttcaggccacggggagctcaggaaaaaaataggcttttgcctaaaaatcccatccctaattatgactttaaaaaattgttattatttttaaatttataaattaaattaaaaattttatgctattgcattgaaacacatttttcaaaaatcttaatagtcgcgccccataccccacctttattaagacccccacctgaagcaaaagtcttaatttactcatgaaaaatagttgtcaaaaaattaattttgaagtttaattaatttaaaaaataaatatcataaattcaattggaaaaatccttacaaaacctgacattattaatttttattcaaactttcgaaaacatttatttaactttgaaatattattaaatcgtttagttggactttaattcaatctgattattccacttaattaaatatttagacaaagaaaacaaaatgattttttctgctccattaatttcttttgttatttttgctttccatttctcatttccaatttcaaatgcaaatccattgatgggttaaattttggaaaattctattttaatccattaattaggtgacagacaattggctaattgcatttattaaagagcataaaaaccactatttgtcaatattcaacgcaagaatatgaggcttaccttggaattgtgcatttaatgagaaagaattggcaatgtgacaaaattggggagaaatttgcagaatatgacggatagaatgccaaaaatatcgaaaatatttggacattttgtacgaatatttgtttagagtgtatgttggtatgtccataatggacccaaaaactttgcaattggcaattgacacagcgaagaaggttcagcatggagagccaatgaaatattcgaggaaagcatttgataattttgtatttagaattccaaaattcagacatttgggtaatattttttttgattaaaataaattcaaaattagactgatgatgcgttgttttcagaatttatgaaaggccaagcgacaaattttaagaaattccataagctgtttaatgaaaatgaattaatgatttttgcaaagcaaaagaacatttgaaatatgaagtgcatctcggctttgtatttgatgcgacaaaattggcaagtgccaaaattggagagaaatttaatgaatatgaacgagaaatatgccaaaaatatgacaaatatttgcgtattttgtacgaatatttatttaggctttatgttgaaggtttgctcaatttccattaattcaaaataattttttgattttaaataataattttaaaggaaaaaacgctgaattggccaataaattttcggcaatgaagccaaaatgatcggtcaaaaaaaattacaaaaaaatggaaaagaaatttcaaacgaactgtcggacattgagcttgttcagaacgaatttgaaaaaaacatggaaaaaatccatgtaaatgtaagagcaaaagccattgaagaaaaggcgaaattttgtccaataatcagaataaaaattgttgtcaacgcatttttccttcggtgcaaatcggacatcaccagacccaataacccattattttcttataaattagttcaaaatcacaaaaacagtttttgtataaattctgttaacaaattacatttcaaattttcaaagttttcccggcggcgcctatcggcaccgccgacctccccccccccggttctctaaagtttttgaaaaaatttgcagcaaaaaaaatcttaaaaatctgattttttgattccgtttctcaaataatcatctgagacgaaaatacaaaaattgatattaattgattaaattgtaaaaaaattatttaaggctatgttgttaaatgctctcatttttgaaaatctgattttttgggcatgatattccaattttgaaaaatttctataaaaatctgatataattattgatcaattataaatattagataaacatttgaacaaaacatggcacaaaatgtaaaaaaaaaaaaattgggtttgagcaaatcccgataatcccgcgggatcacgaaaaaaaccaatttagtgcttcactttttcatttgtaaattatttagcggctttcctcccaatgattgcccaattttgatattcaatttagctttatcttttccgctgacccacaaattgtccaagccacgaattgtccaagccacgaattgtccaagccacgaattgtccaagccacgttttgtccaagccacgaattgtccaagccacgaattgtccaaaagagtaaaaacccacgaattgtccaaagtctaaaaagctcataaaaagccggaaaatgggtctattttagggttttcggggtcgctgaataccaatacgacatttatatagccccttgcctaaccctagacccaaatataaagattaaatagcaaaaaaatattcaaagctcttacaaagagtgctgatcaaaattcgaacaagtttagggctcctatgtgatccgaattccctctatagacccaccctcagcttcacacattgaaaaaaataattttattaaacattcaataaaattcattacgggacatggacaattgaatcatcaaaattttcaaatccttcaattttcctgcatatccctcaatttgagagtgccggcggaattggaaaatgtggtgcccgaacgatttcgtcctcccatgctgtaaatgaatctttttattgagtttaaaacggtttaattgattaaaagaattctgcctgaaggcgctatcgaagtcgatagcggactcaacaaatattgaacaagctgctcacgtggactcacagtggttggccatgtaagagttgatggtgccggtgagccggtgccgaactctaggggtagccgcatggcttgttccgagttgat

SEQ ID NO: 14286 - DNA, 3173 bp, Heterodera glycines
  unsure (1)..(3173): unsure at all n locations
tcttaaatttaaatcaatttaattcaataaatcaatttattttgtattgtaccgtattgcgtgacataatttggcaaaaatggccatggataagtgacaatgtgaaatgccataaggagaaacaacgagaaaagacacgtcagacgttcattgatcctaattaagtaatctttttttttacaatttcatgattaaattccgtgctcacttaccgctgtcccaaatccgtaaagatgtacatggcgtacaccagcaaagtgagaagaccacgggcggagtgggcgaaggattcgtaagtgaccacttcggtggaactccacccgaacatcatcatggcgaaggaggtgccaatgctgcagaaacaacaacagtttgaagcattaaaagactgttcgaaattacgtctccaaattcgtgaagatcaaatactgcgtgaatcgcatcgcacagcaaatggccaatgcccagcggtcgtagggcggcaatttttgaatggccgactcgacttcggacgaatttgcctaagcaaacaatttttgaaaaattttatttgctcttccaattttcaccttgctttttggactgtctaaaatgccgacggaactttcgcgaaagaaaaattggagcaaaaaatgaatcaacacattggtgcaaatcgcaaaaagtgccgtggcagtgaacatatttatcgaaatccatcggttgagccgccacccggggtaaccaatgtaagtgaaaaaccattggaaggctaaaattaaattggatttgcttgcatgagttttctcctcactcgggccaagagtaatgccaatcgctgtgccaaaggtcgtccacgccgttgcgcggtagcgatctttgtccacactggcaatggtcgaaaaagcaaccagcagactgatttgggctgttgaattggtttgctcaaaaaccaaattcgaatgagaaattaccgggcccaattccggccacgagcctggacagcaacatcacatgcttcatccattcgacagggaaccactcgatgacgaagtacaacatattgccgatcaacatcatggcgttgcacaccaacaacggcacacgcagctgaccaatgcggtcggcccaaatgcccatcaaaggtgagaaaatcatttgcatcagcgagaaacagccgacgatgatgccgaagaagccctcagaaacggtggggtcaagctgaacggaaggcattgaacgaatttaacattttttaattatttgtcgcattttttttggtttaatcgccttattttttatattctgtagtcaaaaatagaaagcataaacataaagagcactgaaaattgaaaattcagcagaaaaatgataagaaaagagagaacagaaaaggggggaaatgatggtcaaattttacagaaaatgaatacatattctgctaaaatgataataattttaaatgagtattttcataatattcaaaaataaatatttatttatttttttaattttaccgttttcataaaggcgaattgcgagttgaggaaaatgctgaactgaacttggccaaaaaagcacaccaaagcggccaaataaattgagcgccagtccgtttttcgatcctctgctgagaatgaatcttcggttgcgccgctggcggttgattccgtgccattggaggggacgcatttctgactttttgggaatattttgtagtccgacggtttgagtgtcgtcgacattttacagaaaaacacctaaaaaatataaataagccaaaaaagtaaaatattattcttttaatagcctcttaatttttcctgaatttgttcttttttcttatcggaacagaacaacatgggtcatgggattggttggttgtggtcattgcaatgattaatgttaatgagtgtgtgcacacacaaaaaccaaatttatttgaaatgacaaataaaatatgaaaataaaagaaaaataattaaaatactaaaaactctaaaattccaattttttatgttattggaactttcgacaacagaataatgcaactttattgcagcaatggccttctccatttggtgctctgcttcaaacaaaatgttaaaaatagcggcgtttgtgtgtaataatatggtaataattgtggattaatcattatgcaaaatattttttcatttttatattaaagaaaatataaaaaaataaatcaattagggaaaagaagagaatttttatgttaaagtgcctatgaaaaaaagttttaatttaaatgcaaatattgtgtttcccgttgaattgatggatgaattaaagacaattatgaaataagaaacaatgttttttttcattaaatgatagtgaaatgaagagactcccaaattttatagcctcagatgtaattgatgcaatttggccggttgatccacctacacttcgaatggctttatcacgggatgaaactgacaaatgaacacattggggagaagaaacattgacgaactgataaaagacaaacgaatggaagagataagagataagcagcaaagctaaaacagaaatttgatcaaattaacaaatgttttgaaatatcaacaaaatgaaatgagtacatttgtacgcagcgattgggggaaacatagggacaaatgataggagaaagggcgaaaagaaagaagcacgaacagaaacatctgaccacaacttacgggaaggcctgtgctaattgaacgttacaaaaaaatgttgaaaggattaattacactatttggagtggaataaataaattaaattgtcaaaattatgagacttatgtcaacctttttttaattttttctttattatttggtccaaatttcttcaaaagtatttatcataattagggaacggaatttttaacaattaataaatttctaaaaacttattcaaactgaaaatttgagaaattactgaaagtcgtaacatttgaaattttaacatttttgttgtaattaaaggcttctgaccaagtttaaattctttttcatgtcttttgatcgttaaaccattaactagtttaaattaagcaaatgcttccgatccaatcatttaccanataatttttgattttctttttattttatattttatttgttttttacattttgtattcttttaatgttattttttgatcatttattgtttagttttcgtat

SEQ ID NO: 14287 - DNA, 1374 bp, Heterodera glycines
  unsure (1)..(1374): unsure at all n locations
tttgatgcgttagtagcaggtacaaccaatatttcttcccnccccagggagtgaaattatattcaaagggagcggggggggggggcaacacgaaccagcaacagcaacagaacagtttgcttcggtggtgtccttgcttcagaggtgagttctatgctttcaaaatctaatagcaacagcagaaaaagccaattgttttggtgggtggcagagggtggcatttgaaattggtcgtcacatttcccccgggccaattgtctcctcaatttggcctcaaaagaaagcagcaaatgtatatgtgtgcgtatgtgctggcgggcgagaaaattgatcaattgggtgcctccgatcattttggacccgccaaaagctgatcaatcggcgccagcctcgccccgcttcctctgcccctccgaccgcttcgggaaacgattgggtgctggccaaccgaccgtttattggacgacaaaaggcacgtattcggattttccgctactgctggtgctgctgaaggatttacgacggacggatgcatttgcggagaatgaaaggaacagcggcggcactttggcagagagttccccctccccccagggcctatcccttcccaatgttcgcatttccggccaaatgcccaaaggcccacccatccccaagctgaggcttggagggaatcatcatctgaagccgcttgctgattagtgataattaacgatgcatttttccacgatttcccagggacatttattatacatatgtactatagcagtaggaaattaatataaaactttttattggataaatttatttcctaatttattgctgaaatgtttaaataattaaatattttgcattttttttttgcgttttcactgttctgccattttttgattattcatcttttttatatgacaaaggttatcgcaccctttcaaatagcagtgctcaagtttttaaaaggtctgtcggctgtccgttttcctaaatgcgcaaatgtccctctttttttgacagtgtttagggaatgtcccccccccccccttattcgtctgttttgcattttaaaattgccattttggccaaaggtccatccgtcgagcacttttttcaaaattacaaaaaaaaaaaataacaaatttgaccgaccaaaaatgtctttctatggtaaaatgaacagagagggaaacacggaaagaaggttttgtgttctgtttcaaaggccttgcccgaaactgaactcattcattcattcattcatttcattttgttccatctccttctcctgctgttgctgctgaaccctataaaaagccgtgtcccccccccccctccactccatccgttccccctcagtttccccctttcccctcctcg

SEQ ID NO: 14288 - DNA, 2121 bp, Heterodera glycines
atcgatttggtttttgatttcttcaaagtcaaaaaatggcccatatgtaggcggaaatggaattaaaaagcgtgaagttaaagaacaaaagttaaatttataattaatattaaaatattttattaaaaaaaattcatccatttgcattgagttggatatttttatggaaaatatgtttatggattataactccatcctagaggcttcaaaccaagatatgtgcagaatttattcattgaatgtttttcatatgtggacccacaaaagttggcattgtttttttttggtatttcaattcattttgcttaagttttgctttttcgaggatcaagcagaaatatttggaattggatgtatttattaataaaaaaaaatcaaattaaaattaaaatttaagggcaagggttgttttcaatcttacaaattctttgaaagtcgaaggatggcaatacgtcaaatatttcagtttgggcatcaactttgtatgaatgtgacggcattcaaaaatgaattctttgggtaagtatttgaaaaagtaaataatattattattaatatacaatatatatacaaataaataattaaatttttttattaaaattaatatataataattttaatcttttcagaaatgatcagtcacacaaattttgtgtgcacacccgcaggggagattttgttaaaagaggttgggactcgaagaaggaacctacggagaaaggaattgatttgggatttgaatatttaaaggtgattcaaatgatgaattatcctttttaatttttaattaaaaatttaggaaaaatatgacaacatttccatttctgttgttttgcttggagaagacaaacaatttttggcgaatttatcattcaatcagcaggcaaataaattaacacattttattgctataattaattaaaataaattccctttctttttttgtcttttgccaatgtttacgtgccgaaaccaatgccaagggctaatgatttggcttttgccgtgttgggatgcgattctttgtttatctcggctcagacatcgacattttcttggtggattgcttatttgatgccggacgatgcgaccattttttacaattccgattttcttccgggtcctttttaactttttgcatttacaaaaaattgctaaattcgccggtgataatttaaaatttttttttccaatgatgactaatttatatttgctcttatttaggccataatacccaggaacattttttgcctgaatggattccgataaaatcgaccaatggcacagagtctctcgattaaacaagcaaagtgaatggaaacgattttgaaaaatgttttttttcttctctattttatgatgataaatttaacaataaaaaactgcttcttcagcggttggcttagtttgagcggcggcgttttctgctcgggtcacacactgatgtatttggttggagtggcgctgtcaggtacagtagggttggcaccagcggcgcggtacggtgaccgggttgaaatcctctgatttttcgtctccatttttctctcccgggaacagggaccaccgcacctatccccgccgaggatgggcataataactagtgctgttcgagactctcggtctcgactcgagaaaagtctcaagtttttttttgtctcggtctcgattttcgagactcgagattgagacttttttacacccctaatggttggctttttgtaaatttaaaattaatgtatttttggttaactttttgcatggtctggtgggttgtgtcttggtcatgttattcagttttgcgttgggtcagttcccctccaagtagttttttttcttctcattttacgaaattaatgtttattcgatagggatttaatcacaattttaacaattaaaatcgtaaaatatttcatttttggactttttttgttcacaaagtgcactataaaaacccgtgctgggacgtttcgtaaaatccgccactttgggcgtttcgtaaaatccgccacttttcccattttttcgacaaaacatggtataactttgcttaatatcaaccaaatttacattcttggtaccattcgatagccaagtttatctctattagcctgctaaatt

SEQ ID NO: 14289 - DNA, 1776 bp, Heterodera glycines
  unsure (1)..(1776): unsure at all n locations
gtaaggacatgttccatgacaaccttaaaaatntggttggcattctccactatcctttggcaaggggttaagcaatcgaaaattgacaatttcgtgcaatgtaccgaaattgtgccgcagaaatttgcgccgcgacctttgcgccccgacactagcgccgcccagtaaaaactgacattttcgccgcgaaacttgcgccgcaccacaaacccattttcactatttattctaaaaataaattaaaaaaatcatttcacagtcgtttgagaaaattttctgaaaattgcaataatatttttaaaatatatttttgactcagcgacgcaaatgtccattttataaaaaattagaaagaggattttttttttttaaaattccaataagattacacaaattgatcctaaaaactcacctaaaaattcagaattgtttattttgtcatctaaggacagaatactgaatacttgctgcaccagtaaataattttttatacattttctaaaaaaaggattttaaaaatccaaatttcctttatttaatatttcctttttttgcattttcatcattggattttcttggtaattttttctcatttgaatcctggacatttgcggcacgtttcttaagatccattaacggacattttcggcccagtttttttttggtgcggcctaagccaaaatcggacttttgcggcccgcgacatttgcgtcccggacattggcggaccgtttcttaagggcaattttcgtaccttgtcgacccaatttttttttaaattttgagtcccaagccaaaatcggacatttgcggcccaacatttacggcccgacattggtgtcccggacatttgcggcccatttcttaagatacattttcggaacattttaggccatttttttttttgaattttgcgtcccaagccaaaatcggacatttgcggcccaacatttacggcccgacattggtgtcccggacatttgcggcccatttcttaagatacattatcggaacattttaggcccaattttttttattgaattttgcgtcctaagccaaaatcggacatttgcggcccgatatttacggcttcacccaaatttcaccatcggtagcggcataaattacttagcatgggcacataagggagtaaatttatgagacttttcggtaaaatgttaactcctatctgtgcggatcctttttgcgtgaggactgcaaaatgcccaaattgttacttttttatacctcccaaatagttgaagcgctatttttggatattctgtgggcttttcattgaggttttaaaactcacatgtgactgccccaaaccgtaaggtacctactttgcttcatcatttaaacgcatatagtatcgctttattttttgaacattcatgcttatttttcttgatttaattaatatttctttgattttttcatttcatttgaaatttaaataactgcactaattatatgtgtttttgttgaaatggaatcatttaaccctgatacaaaaattagctttaaaattgaacaaaattgaaccattttctacattttcccaacaacgaactggtactaaaaaacggtgtcccaacactttgaataatgggcaatttgaaataaaatgccaccattatttcgtcgacatccacgacgaagcggatggtgcgctttcaccgataagaattcggaaggcattccgaattctcttggaatgtcagggaaaagtaaattaattttatttgccacaaattaatatttgcataatta

SEQ ID NO: 14290 - DNA, 2690 bp, Heterodera glycines
aaaaatgcaagcgcctcctataacttctaccttttttgattttttagaccgattaaaattgcaaatttgctggttttagggataaaatctgttagcaaggttaacaaattgcactcaaattttcaattttacctccggcggcgcctatcggcaccgccgggccccaaaaacttattatttcataaaattggctcaaattcgcaaaatttggtcatttttagacaaaatctgtgcatatataagatatttaattttaaaaatgttaagtgatttttttataaaatgtaaattttgttaaaaatggaatttgacattttttgttcgaatccgggttcggggtttgaattgggtcaaaacagatgcaagaattggtttttccgcccccgaaaacctataataagtttattctcaaaaaaaaatattttttttttaatctggacacagataatacataagcagggttgccagatgaaaattttaaaaagcctcattttgggtcaaaaagcctcatttttacaaaatttattcaaaacacgtatgaaatgttcaaatgttatatttttgattgtccatgatcgatttgagtaattttttttgttcgaaatgagcattttgtgagattctgagcatgaaaaatcgaagttgatttttttgcggcgctttttccaaaaaacttggggaattgaggggccggcggtgccgataaaaattgagaagtttgaccatatttttagcagattttcatttaaaaaaattcataattttgtggatttccgaaaaaaattgtaatttttctgaggattttccccaaaagcctcaaaaatcctcaaaatttctcaaaaagccacaaaaatcctcattgacctatcaaaaagccacaaaatgaggataaatcctcagatctggcaaccctgtacataagttacccgcgcccgttgaactgttcaacaattgctcttatgttgttatcttgtcgaatacatttttcttttcgactttgatttctccctgggcaaattggcggacgccttggagatctccaatactcaaagcttccgttcaaaggaatataatcaaaatttcggaacaagcttcgtccacgatttattttggtctcataaaacggaaaaattttctctggcaaaacgcaagtgaccaatccatttcatcatttgcaacttcaagtcaagataacacaatattaaaaaaagataacgagaagaacggcagaatgcaaataatatacataatttaacgattcttgcaaataatatacaaacaattctcgtttatctaatatttatgggaaaaattatcacattatcaacctttgaatagtttttttttcgaatttgaatccgaggcagggctgcacgcaagtggatttacaattacggaaatccgcaatccgcaattgcggcgattttctcagttgcggaaatccgcaatccgcaattacgggtgtccaaaaaccccgcaatttccgtaatccgcaatccgcaattagaaaaaaaattttttaaataatttaaattttattttaaaaaatcctataaatcttttaaagcaatttaaaagcatattaaaaagcaaatttataaaagcaaaatcattcaattgagaaaccggttaaaagcaaattgtgatgaagaaacaaaagctttgccagattctccgcctgtaaactctttctcaagtcatctgaaatcaggccggccgttgagaaaagcctctcactttctgaacttgttgcaggcggagaaagaaatttccgtacaacggcaccaatcattggccatttttgtgaattaacttcccagtataatgatggatcggccctggatttgattttttggtcccgtaaatattcagctttacatttagcagttgctttgccttgacgctcaaaataataccaccaattaccagttaagtttgacatttttaaattgctaaagaaataagaatttaaacaaatgtacatattttctttaaataaaaatagaaaaaaaattcattttataaaaaataatcttacaagaaatcgtctcgttaaaaaatccaatagtcaaattacggatcaaaattgcggataaatcccaaaaatccgcaacccgcaatccgcaattacgggggtccaaaaaccccgcaatttccgtaatccgcaatccgcaattgcgtccagccctgatcgttaatcaaattaaaagtgttttttaaattgcagtttaatcatgggtttaatttaataaaattatcgatgaacagtctattatatttttttagctttatggttttttgattttaaattatactttacacttaaatattaattttcagttttacccttgtttaaaatgatgattgaatataatcattaaaactcattccataaattaaaaaaaacaattttttgaatatttctttgacaattttttgcttttttttaattagacttcgtcaaaaaattacaatatttgcgatattgaatctattttattaaatatgaaaaataatacaagtttccagaaattttttgttttaaaatcaaatatgcaaaaaagacaatctctgtaaaattaaaattttaattggaaatattttaacggaattattacaataaattcgtattgaattttaacagagaaaagagaaatagttctaaaaatatatagaattatgactctaga

SEQ ID NO: 14291 - DNA, 1004 bp, Heterodera glycines
cacccccccccctgcctacgcccttggaactgtgggaaaataaggagctggacgaggggaaatccaggatcagctgcaggggaccttggaaaaatcttgtacatatcctgaattgcccgggctctatttttttttaaatttaaacaataatttatgtatgtaaaaactttctcacagaatcttccattctttttcactacgtctttctttctcatcctcctcccctcccctctctctctctcctcacttttcccacgcgtcgctgtactgtctcaaccttttcatgccttctttcttcgttattcgttcgccctccttcccctctccctcccactttcttagtgtccctctctcatccatccgtcaggcaaaaatgggacacgggggcaccttcccagtgtctctcccccccccctacctccctctccccgtctaatagcagactttttactcctcaccccctcccctttttttccaatttcatcgttgtcttgggacttgggggtgactatcctttctttcgttcttctcatgccttatatttgccatccttagacggcggaagattggatgatgcaaattgctaagtggaggttggaggttgaaaattgttgaaaggacatgaagccatgacaaatgaggagggcacggcacactttggcccctctcctccgtttccttttgcctttctttcactttctcaagtgccaattttcttttttttttcttttatcatttcgcaaattaggcattctcagtctgttctgctaataagctaattccatttattcatttgattgtgtctgcgagctttttaatgagctaaaattagcatgaattaagcatgcaaaaaagagccattgctcgttgtcatggacatttgtgcatacatcatttaaaacatcacctaattgaaagagagaaaagagacagagagagaaaagagacagagagagagagtgagagagagagagcgatttaattttctcgaaaagagagtccac

SEQ ID NO: 14292 - DNA, 2780 bp, Heterodera glycines
ggcgcgcggacaaaatcccgccccgacaaaatcccgcctcagctaaaaacgacaaaatcccgcctccacctaaaaacgacaaaatcccgcccgaaaaaatcccgcccagacaaaatcccgcctcagccataaaacgacaaaatcccgtcccgacaaaatcccgtctcagccaaaaacgaaaaatcccgcctccacctaaaagcgacaaaacccgtcttcttaagaacaccgaacatttagaattttttattctaacataatgaattggcaaaaagtgagttgaaaaagataatttgacaaaagaaaatgcgataaacaaaaaaaaatggtggacaaatcttcaaattgtcaatcgtcttccgaatcgatatcgctttcattgttcctcacatggagaccaccaacgaacccctgcatcaccaagcccaaaaggttgcacacttccatcagttcttcattcgttccgaaccttgctgtttccaaaatttcgaccattcgttgctctttgataacgtatttgggccgacgatctctgattttgcgtaagcgtatcgatcgcgcaatgtctatctgtttgtcgatgtccttgacgaacgcggccaagaaagcagctctgaagtatgatgttccaagtcacgctgaagccatttgtcttaaaatcactatttgttaaaaaactaactgcgaattgtccatgcgccgactccatcgcattgtttgtgcgttacattgccgcctgtgctctgtcgtagacgttccaaaagtcgacattgtattttggaggccgggtgattggaagattccatcggtgcccacgtccgatttcgtcgtctatggatgccatcgtgggtgttgaaggtcctggggaaggacgcccaaactgaacaaattcatgttcctttcaagctgttcacgacgactcattttaacaaaaaaaaatggctcgttgctaaattcatgaaataaatgttcggtgaatgatttttataaaacaaaactaaggaaatttttgtacacgttggatttgcgatttgttatcgttttgtaacattcggtgtttttagtcgggattttgtcgtttttaggtggaggcgggattttgtcgttttatggctgaggcgggattttgtctgggcgggattttgtcggggcgggattttgtcgtttttaggtggaggcgggattttgtcgtttttggctgaggcgggattttgtcggggcgggattttggtttttaggtggaggcgggattttgtcgtttttggctgaggcgggattttgtcgggcgggattttgtcggggcgggattttgtcggcacacggcggcgcgcatgtcggtgcatatcgattcagtgccgacgattcagtgccgacgattcagtgacgacgattcagtgttaagacgattcagtgacgacgattcagtgacgacaattcagtgtacgttgaaaaattgacaattcagtgccagaaaatttggcaaaaaaaaaattccaaaaaaccctaaaaattgcaaattttattaattggaaaacataaataacaaatcatgggttcatctcataattgtgggatattccctgaagaaattcaatcacatagttaaaatttgggccgggatttgcaaagtattggtgatcgtaatgaatgggcactaacggattttggactcccatttcttgggcgtatcgttcaacaagagtaagaattcggcgatcggcgtctctgtactgcttccgcttctttgaaggttgttcgcctataaagtcagctttaaaaatttttgatttatttttgaattacccatcgaaaattttgcaaaatcggcgtcgataattttctgacactttcggagtctgtcgataaccaaattgacggatggtcacagccaaatgcgcgttgaagtgatcggtgtgcggcttctgcgtaattattcgtcctgtctcgtttttggatggttcgcagatgaacactccagatcaccggatcaaacagtgcagggtttcgagttccgtcaaaacgcggtcggccagtgtaattgttgatgaacctgtatttaacatttaagcaactttcaaaattgaatttttaccagtcaaaaactggctgaagttcgagaggaagttctctttcaagtgccatgattccaagcgtcaaatgttcaattggtaaaaaagccaatgatgtaatcattttggcattcatttgaaagaccgggtcagaattgtagcgctaaaattggaatggaaattaaaagtgacacagcgttgaaggaaaaacctcaacaaggtgttcagtagcaagacgctttttgaaattacggacaagatgaaaaaagcatcctgacagttcacaatcctaaaacacttcttttacagcaccgatgattcctgcttcaaagtcaaccgaaattgagtcaggacgaaaattaggccagaaagacacaaccatccgaaaaaagcgggcataggtctcctttgtttttgtagtaagtagcccgtacaaaactggtaaaacccattgttcacgcctaaaatcattaaaaaataattgtttacaaattaaaatgtacctcgcaagaactgcgaacacctgataaaaaagcggtggtgcgattgcaaaagtgccatcaacgtacacagttcgcatttgctgtgcccaactgccatttgactcttttccgaaaattagaattctaaatttttaaattataaacggataatgggttttgtttccttaccgttcagttgtctgtcgtcctgcttctctgtaaatccctg

SEQ ID NO: 14293 - DNA, 2705 bp, Heterodera glycines
  unsure (1)..(2705): unsure at all n locations
ggtggttcagctactgcttcgtcttctcgcttccgtcatcgtcttctttgtcgtcacttttccttcccttcgtctgtccctcttcaatttgtcggccagcgggcgatggcggaggctttggcggcaattttggtggcgtcaatggactgtctggtccgccgcccattctttcgcgccgcggcggcaccaccggaggcgacgacggcgtcggccgaacgcgaagcggcagcggagatggtggcaatcccatgtcattgcccatgtgacatggcgatgaagtgcttgaatgtattatgtaagctagccactaattaccagcagtcactgccaaagtatcaatttccacgccgtttctccacgaaaaattttaaaaatttaatcaacccaaggtttttcagtaagaaaaaagcaaaaaaaaatgtgcagattttcaagaattttttggttttaggtctttataagaattgttcatttttgcttatgcaggtcttatttctttgattttttaaaaattttttgggctggggaaatgaagtgcgcccatcacaagcggccataaattaccgacttcggattggcacagtgtgccgttgccggtgacgatgctgcaaccgttgggtcagaaacgtactcagcggatacaaaatggtcattagctgaatgtccaaggagtaccccatgaaaaatcaccattgaccagcatactttctcgtatttatttggttttactggctaaatccggcaaaatttcaccagttgaggaggatgtcggaggggtgtcgtccacacagtgctgctgctcatcatccaccgtcgggcttgtcaccgttgccatggtcggctgaatgcgactgcgattgagccgtgccggtttcggtctctgtttggccaaatgggtcagcagtttgccgttgttgctgccgttgtctctctctcgccctggttggttggcgtcgctcacatgcgtaaagtcgccgatgacgctgcgagacattagcaacagcgaggccatcgcatccgctgcggttgtacgaactgagaacgaataaattaaggagggatggtacggtaatcatgcacggaatactgtattcttttcttaaagcaggatttacaggataactgggcttttgtgctccggataaacgagaaatgtcaaggaaatagtgattgactccacaaattctacgcttcaagagtgtttttaccgtagaaaaggattggttgccctaccgtcttcggttggcacaattgcggactcgggccggtgctgactttggtgggtggcggcgttctgttgcgattggttgttgccccggaagatcacttcccttttccgtgtacgtgtcgaggacgacgaagaagacgggtcggaattcgcctgctgctgaaccatgaacatttcctgcgcatcctccgcaagaaggcactggtgaacattggcgaaaaggtgcgaccacgtgaattccctgcggcggattaaaatgcgggtcattaaaagagagcagaagctcgtttcccgcccagtcccacgccgatcccactctccgtttaaaaatttttaaatcttagatattttttatggaagaaaaaaaataagaatttttgcttttctgaattttttgaaaatgttttatttgaaattaaaaaaataatatttactgtatatttactttaggtatcaaactcccgaatgatctgtcgggttttaatttcaaaagacctcggttacaaatttgcagagctttgtttagccaaaaaatttgccatcatattcaatgacctcaatttatttaatggtccaattacagtactcgcgatgacacattttgtaccgtactttttgtatttgtccaaaagtgccgccaaatcgtcgcgcagtgcgacgcccaatcgtttgtttgtctcgcacttttgttggtcaatttctgcttgtctgtgctctggttgcatttggacatcctccagatcggccagacggaaaataaattgttgaacaaagcgctgaataaatttattttataatgggcttgatcagattgatcagttattgatgcctatccctaaaatgtttttaaaattggctgaattttacaggtcttttcatcgggagcagcttgtcccccccccccccggaaaattttatataacaattttttccaaacctagacactttttgcaagaaaaaaagtttttgaaaattttttttagcgattttcttgaaaaaacttagtaattcactataattttttttgtaattttcttattaaaaactttctaagcttttttcttaaaatttcaaagttggtaatttctcttaggtttccagaaattagtctcaaacttacgaaaaaatgttaagcctagtaaatatacgcggtaccggaacgggaaaacgttcaaacgaccccgaacccatcgagattaaaattgtcgggagtatggaaagagccaaaaaagaatcgggtaatggaccggaccacaaacacacctcactgtgcagatcagtaaaccgttcaattcgttcagcgagctgatcagccaaagtctcgagaatgccacggccactgtcggcatgtcgtccaccaacattgctcttggcaccactgttgttttcgtcgtcgcagtcggcattgtttggnagtgcaaaattgtgccccttcttgtgatcattttgccatttttgtgaaagcgatcttcttcag

SEQ ID NO: 14294 - DNA, 2073 bp, Heterodera glycines
  unsure (1)..(2073): unsure at all n locations
ctgtcacacatcatttcctcacggaaaattttgttttactttttcttagagatttttcctaaaaaactactaaactttcaaaagatttcttactaaaaaattctagggtttntaaaagaaaaaagctccaaagaaagaaaaaacctctaactaaaaaaattctttttaaattttccagtgggggggggggaggaggggaatggaggggaatgaaatttgcctcatttacgacagtgattaattttgataaaattctcggcataaatcatcaatatttaatattaaaaataattttcaatgaataattcactttaatttctccatttccccactcactgctaattaagtcttaaatagttttcaaatgatagaattcgagaaaaaaagacaaattcccgaaaattctgttggattgtcctactcgggagaagcccggcatccacccccacgcacattattcaatttgtgcatggtcctctgaacgaaatggcacacggccaccggcggttcaaccgacgaagaaaatgtgtgaagttggcgattgcgttccaggcactgctcaatctcttccatctgtgtgtacaaaaagtggccaattactttaaaaacatcataatttcatgcaccaatcagaaaacggcaactaattaaagcgaaaaactctgtatttgtggattttcggaaaaattttgcaaaattttttgggaaatttggtgaggtaggtcttggaaggggtataaaaaagaaaactgaatggaaaatttggcaaatgcctaatttgcgaatttcatttgccggacgcattttttgccaataatttgcgtggcaaaggaccaaggcttggagaaggcttattaattagcattggcttcttgcctgaagctgaaaacgcgctcgttcggccggcacgcgtgccatagccaccacacactcggccgcgtcgctgaacggcatttgcaggccgtcgagcgcgaggttgacgcgcaatgcacgtgccaactctgcgaagccgtccggcccaatttggttgcggtccagcgccagccaacgcagcgcgtggttcaactgcagcgacttgcacagcagacgcgcaccggcagggccaagctaaaaccattgggaaattggggtgggaattggtaaatttacagtgccaacccttcacaccacaccgcgtcattttatctcaaaatttttttaatcttcaaagtttgaaaaagtatttaaaaattcgaaaaaaaagtttcaggttaattcttttaatgacattttttcgaaaaagatagaagaccgaaaaaattgttaatttattataaaataataattaaaatttagttttatgaattattntaagaaaatttttctattctcggaggaatttttattttaatgttagaattggttgattcaaatccctaaagagaaaagcaaaaataaaaaattctccccctcataaaaatatttttaagttctgttgtcagtcacttcttatggaatggacaaataattgaaaacaaagtttgcctccaaaaaacacaggatcaaaagcaacaaaaatataattaatttctgatcagggtgatggaattgttttgagcgacaaggcggtctgatcagatcaaatgggggcggataattagtcatttctgctgatgatgattgatcgatgatcaacattagcaacaaacagcacctcattgttggacaaatcgagccgcttcaaccgcccacaaaggcccaacgcgttcagaaaaacgctcagatggggcccaagccgtgcgtcggcaagcgacagctccgcaatgaacttgaaaatgttgacaaaacgattcattttctaaatgagttttgggccaacttttacctaccggtccaccgccctcctccgccgcctcgccttgtccctcccgctcaatgccgttgatcaacttgactaactcggccaaaatgccggccaacaccggcgcgtgctttttggccgctcggagcgcgaagaaattggcaccgccaatgtccaacacgcgcagatggcaggcgcggccaagcgcggacagcaaacggaatgcctatgaa

SEQ ID NO: 14295 - DNA, 1045 bp, Heterodera glycines
  unsure (1)..(1045): unsure at all n locations
agggggcgatcccggggagcagccacngggaaatagcttcccgtacaaacatttacgccaaaattaattttttttttaaacatacctgcgtgaagtctttgccttcgtaatgctcaggcggagggtaaatttggggaaatgcctcggggaaaatggcgttcaactgttgctgcgccttataaatgccgtcgttcagcaccatcggtggaccggtgccgttcagcaccaaatgccgacatttggggccaaaagaacgcatccaaacacggtagtcgccggagttgaacagccgctcgcgcgtgaagtgcacaatgtaactcatctgatcacggcgaccatcgcccatgaaatcctgtcaagaaaaattgaacataaaagcggaattggcttaattaatgaatttattgggatattttagaacgaaaagtccgaccggcaaattcagaaacatttagtataaaaattgctaaaaaaaatcgacaaacttttagcaatgggttggcgtggatacgtctgagtttttcgcctgaaacaatctccacgaacagcaaattgggatgcaatattttggcggcgtccgagtacacgtcgctgggttggatttcgcgtccgtcctcgagagtgatcggatttcccgccttcagcctcgcaatgtgaggccccttcgaattttcagcttcaacaatttgatcgggtcatgcttggcggcgttttctgaacaattaatgatttagactaatgagtgaaaaaaggtcataaaatttgggaaattttcacgccgaatcaaaaattctctttcacacagaaggtaaactcttattaagtcgggtgtacttcttccccacccgatatgaattactttttcaaaataattccaaaaatttatactttttttgaaaattgttttttttgggggggggggggggggaagcggcggggcgaaggggaaacaaactgtttcggccatgccttggtcattcaccttgactttgatcaagtatgccacgtcaacgttgcccctgccgtaattgccttgctcttgtgt

SEQ ID NO: 14296 - DNA, 2796 bp, Heterodera glycines
  unsure (1)..(2796): unsure at all n locations
acagaaccagtcgagtgaattttgaaaattantgaagaattaacattggtacaaaatttaaaatgtaaaattattgagctaacaattatcaatccattgcttcgtttttacggggaggagctcgtttccaccgtatcagtttgccgtcggaaaaatttattaaaaattttttaaatttttcaagaatttatggaaagtatttgggaaaaacttaataattcatcataaaataggaaaattcgctaaaaaaataaaaattttaaataatttttccgggtggtgaggggggaacaaacaatacgtggggtggggaaacgatggggtggaaaagtagtgcacccgtttatacggacctttgcgcgtccaaaaagtgtttgatacggtgcgggccgtgtaaccgcaaagtttcgtcagtgttttctttgttcaaaagcactgacgcaattccgcccgtgttgtcccaattggctgaaaatgcagcaacaaattaaaagggaaaggacgaaaattgttattttattgatgattgaagcagcacccttggtgaagaacatgtcgttgatggcatttgtcctcagccgaaaggtgggcaaaaagcggcaaatgccctcggggcagttgaacaagtaggcattcaacggcgtacggagcaccaccgacgggcgcaggtgggtggtcccgttgctgatcacctatgtaagtagagaaaaagtgtgtttttataggaaaatgggtcatcatcaggcccataatcagataaaatttcgggagggacacccaagaatttttttttgatcttccggcccacattttttgcccagtgagattttgctagatttttgcgctgtgggaaaatgggaaatttttagccagtcattttcgcaaaattttggccattttgagaccaattttggccaaaatataagaaattgggacccggcgatacctttagacactgctagggaaaattgcgtaaattttgggtcaaattcgtaggaattactctttctgaaaattttttttcattttttgggaggggggaatcgccctcacttgccccctcccccaggttacgggtctggtcatcacttttaaccctttttttaatacgtgcctccagtgtgacttgagttggcgccaaaacaaggttagcaatgctcattttgtccctttcagtatgcaaaaattcgtatttggagttttcgattttgatgatttctaaaaatggttgacgtaaaaaaggactgattgaaaataatatttagcaaataaaaaaagaatttctcgccttcctgcaattggttaagctgttctttggtcgccgtatattccttcgttcccggcctttgcttcctccactcttccttacgcttatcgagcttttcgcaaagttcgttgtgcaaaagcgaagcgcaaaatacgtccgactttccgtcggttgagaatttggctgaaagtgaaaaaaaggaaacggaatttgctaaatgaaaaattctaacacaaattgggtttaaatgataaagcacccgaagattcagagaaaacatgattctttaggttaaaattgtccattttcttttacccgccgaagttgccggaaggggacagtgcaaggctagaaaatttctgttgattaattgctgcaaaaatgagggaaaaattctgggcgagaatctcattagccctttcgcatcacaaaaatttttttctgaaaaatttgttagaaaggaatgggaagtggaaaaaccgatagaatggccaaatgccaaggcaatggtcaaaaaccatgtcgaaaagtgattggaacgggagttaaatagtttattaaagagttcaaaatgtttatgccaataaaattcatcaaataaaacacaaatgaacaaacaaatcaatatgaaatggttggttatgttgtttttggcattggaatgatctgctgggattatgttcaattggtcatcattatttttggtacaccgaatttatcattttcaatattttatttgtatttgattgtagcattcctcgtacggttattgagcttccaatttcatggcaagcaacaaatccattcgaatttttcgaaactaaatttttaaaaatttgaaaagcaaaaactggtcatgagttgaaattaaataacatttaccaaccaatttgatgatgtgaagaagtccaaacatgtaattttcatccatttttgtctccgtcttttgaatgaaaaatacatgtgaaaagtcaatcatagacaaactgacggatggcattaagttggaatggcctgtaaatgattaaattttttcttgagttggcttccataaaaggacggatgaaattctttagttgattattaatttggtttaataaatagcaattagaaaacttcgccacaccttcgtaaacaaaaagtagagaagaggcgtaaaaatgagcaattttctgctgttgaaaccaacaaagcacttggtcgagttgcttaacaaattctgtaaagggaacaaagggtttcgacaaaaacaagtcaattaccatcgacaattttgaacgaatcggctgttgaacgcagcgaagtgagatattcgacgaatgctgaaagcagggacggtcccaggggggtggggggggggggtacgcggggtcggagtaggacaaaacgtcgtcggccgaaacgtcgtcgaacgaatttttcgaccgtaacttttttctttctcaaccgaattaaacgattcttggtattattcgaaagcgttcgaaaggatactattagcctgcaaattttcaaaaatttttatttat

SEQ ID NO: 14297 - DNA, 1769 bp, Heterodera glycines
  unsure (1)..(1769): unsure at all n locations
ctctatttttctcattttctcagccttacctcatattttttctattcttctgttctctctcgtcaatttctctgtctcgctttgctctctttctttctctgttttctttctctaatttctctgtcttattttccggtacttttcggttttgaggccaagatttaaatttaaaaaaaacaaaggaagcacataattgcaaaaactccgtgccagaattatattgggggcatatatgtcacaatttgagctaaaatttcttcaaatggcactgcgccactttttttttggcatctttgcgccagaggaactcgcacaaataggagtccaccatttgggagtgcgtgccgtgttgcttttttgttgaatgtttttgccgagcgccaagtgcgctcaatcgttgtgttgggccccgaaaaatgtcctttcgttagtttatgcaatgtgaatgaatatttttgcatttctgcgcgtctttttttaaattcaaatctaggccccaaaaccgaaaagtaccaattttcctttaaatttattgtttcttttcctcccttctctctatttctctgcattgcttgtctctttttttctctcttctctttctctatatttctttgtctttctcgtcaatttctctgtcttgctttgctctcgttcttttctttgttttctttctctgagtttctctgtcttattttcctttaaaaatttctttgtttcttttcctctgttctctttcgtctatttctctgtcttgctttgctctctttcttttctctattttctttctctgaatttctctgtcttcttcttgtcaatttctctatcttgcattgctctcttttttttctctgagtttctctgtcttattttccttaaaatttctttgtttcttttcttctgttctctctttcttgtctatttctctgctttgtttctttttcttttccctcttctctttctcctacgccattttataaaatgtgctttggttggtgttttgttgtgaataaaacaaatatcaaactgaaaaagcagtagcagcagaagaactgacagacacatgcacaaaccctttcttttttgacaccgatttttattattttaaaaatatttatttatttttattattatccataaatacactaacccaaagaagtcttgcctcaaacatataaaattgttcaatgcttaatactagggctataattagatagaaatgctattttgagcccctttcttcatagcatatgcgcagaaaaatatgcaaaagcatagaatttatagtcctaattattacataataaaagtcagaattatcgttgtaaatattttagatgtctttttcaaatacccaaaagaagaattcccatattttttttaatgactgagttttggattccgaattgaatgatttgtaaaaagttacgcgcaaaaagtctttcgcaaaattaaaataattcatgcttactttctgtattatatgtatttttttttttgtcattttagcacaattttgtttaacaataaattttttgaaaaaatggacaaagacattgtgccaaaagaaggaaatcgctttaaaaagcacttcgacccattgactaccaaagaaggtgggctttgcataaaatgacatcattatttaattttatcctaatttgttanaaatttaagcaaagtcttccgtcacttttcgatccaccgaaattactggtgattattttgttctaccataacgatcaaaatgggctttggataatttttgaaaa

SEQ ID NO: 14298 - DNA, 2522 bp, Heterodera glycines
gttggttaaaatgggtttttgggctatgggttcacatcctgttgcctgtaaaaattgtgttttaattattttggggtttttgggccgctgatcacgaatttgatattaatttctccctgtaccgaacccctgacccaaactcgaacattttaagaatttaaatgagaataaaaaaattttttggtaaaaataaatcggagtcttcaatgctattaaaaaaggaagaatcgtaccgaaacaattgtgggaaacaccaaaaaatgcaaattaggtatgcgagtgggatctagaccccgatttaaatgaacattttaattttgttaaactccccgaaaaaaccgcctctcgtattcaacctttagatcgttttttcaacaaacaatttaaataatttattcgcacaattcatgaaaaggtacgccgatcttactcaaactataatttgtctaatcgcaaatttatcggtcgcatattaaatgaaattcatttccaactttctgcgccaatttttgtcaattttattcgttattcatggaaaatttcggggtatttgggcattgtcacaattccaccatttgaaaccccaccccaattttgtttccgaaatttggatgtttatctctcatgccaaaattgtaatgtgcctgaaatctgtccgcaaatttggacactgacctcccctccgcccattatgcacccctaagaaatgaaaatttctcaaaaattcacctccaaaatttatttattttattttcttgacgataatttttgattttgaaaattatttatatccttaatgacttggcaaaatatttttgctttttgatgaaaattttcaattttacacccctaaatttggaactttttggcacctattttccaatttttggcacctattttgggctttttttagggcctaaaacctacctatttcggcattttttagcacctataaatattagccctagtcagtaatgaacaaaatttatttttaatttcaaaatatgtgctaatattgagattttcaaatgtattttggcatttttaagcaaagtcttccgtcacttttcgatccaccgaaattactggtgattattttgttctatcataacgatcaaaatgggctttggataatttttgaaaattttttaccgaaaaaaaattaaattttctattttattttgctttaaaaatatatgtcataatgtgcgaccaaattttaacaatggatttcttacaaattatggtcctaaaagttcagaattttatcattttttcaaaatctttcaaagaattcctaatttttagcccatgaatatttggatttttcattgtttcgtttggtgccaccgcatttggtggaccctggcacaattgtggtgaaaactgtgcgacagccaaatgttcttgaagagcacaattatcacaagcggccaattatgtacattatcaatcaattaattataaaatcaatcaatcatctcacacaagggataaagccaaatgccttatttttgacataaaaaattcaaaataattaaatttgtgtagcgatcgatcgctgccatcggtgccaaatttgcctctctttcagcaaaaccctggtcagaaaacggttgtattggctgcgttctccctccccaacttttgctgattctgatcactcgcaaaacaatgaatcgtcgatagaatcagcggagaatttgcatgagaatacggcgacggaggggagaccgcgcgcagaaagttaggcaaaattttcttttggaaattttcgtgttttcctttaaatttaaaaatttaggggaagaattgatgttttgtaatccattgataactttcaaaatttaaagatttaatatattaatgggcggggaaaacattcaaaaagaagcgaataaaattttaataactcaatagtataatacagtaaatcatcagagttttacatatattaattattagagccctgacttttaggcacgaaaattttttaattaggcaagaaaaatgtgaaaaaaggcaccaaaaagttcaagcaaaccaatttaaaaactcgttttttgtgcgtattaggccatagcaagttaacaaaaaaaggcatcaaaatccgggctctattaattattgaataatattctcaatttaaattctactcatttttggcacatcacaaaatattggcgccgatgccaccgcgtgtatgacgacgcgtccctctgacgataacgagtcgtatttggatgaacaggtggcccaataaagcaattacgggttcccatcgtcctaatggggcggggtcattcgccgtggccaactcacagcaccttattttaagagttaattgccaccacatttttgtcatacacacggagcgaaatatttaatttgttttaatcccttctttagggcctccgttggcatcggcttttcgccgtgcccgacaatgatttgtcgacactcctgcgcatttgcattgaatttagcggtggcacggcacagaattggtcaaatgcaacaaa

SEQ ID NO: 14299 - DNA, 3184 bp, Heterodera glycines
cagcaaccaaagcaaatgaacttttcggtacactttttgaattattaaatatttaggcacttttattttgcaattctcagacacgaatggcactttcccaactgaaggggaaggagaaaaaactgctggatgagaagacaaaattggaaaaattgtccgaaattgcgcggccgtcccatcgtttgatgccaattttgttgcataggcaaccagagatagatgtaaagaaagaagcggaagagacagtgttggacggaggagagagtgagaaagatgtgaaacgagagactgttgagaatgaagagagcgagaaagaagcggcagagaaacagccaaaggaagagacagaaaagggacgagaaacgcaagcagaagcagaaacatcagcaacacaacacacagtcagggaaaaagaaaatgacgacaaagggaagagagtggacgaaagaaggcaaagcattgaccagaaataattaacagaacagacactgtgtaatatttagcaacgaagcagcaccatccattccatcccccaaaacggcggaagaacgtttttacgcgccggccctccccccgaaacgcaacgaaatggccgaggcaattgtgccaaagtttggcatgctcaccaaagaggaaatggcacggatgaaaatgctgcaacagcaaatggagcggaaacccgaactcgctgctgctgtgaagagagctcggctcgagcaggaacataaaacattgaagacggacgaggaggtaatcaaccggatgggcgggcggggtaaagttgggttggaatttttcctaataaaattaatcaggaataaaaatatacataaattcgaatggctattgaatgtctgctggagaatcatgttttcatttttaaagattttgaatacagtgttccaaaattaaaggaaaagcaacaagtgcaggacgttcgtgagaaatatacgacatggcttcctcccgaagaccaatcgggcgacggttcgacacgtttaaatcgaaaatttgcaggaaaatattaaagacatatattttcttgttctttcgagtttatgcttttataaagcccagaaattgctttttaaatagaaatctgaaaaaacattcaaaatcattgcttcacagggttcgactacactaaacttaacagtccctggtcaggaaaatacaaagtagcataagaataattctaaaataaaatttgcataagaataattcaaaaataaaaatatgtacatcgaatgattaaataaagtagtttcctttcgtcattcaaacacttggtatgccatcccgcgaatgtattgccttttctggtggacaatgtaagcaccagcaacgaaaaaggcgccggaaatgaaacaaaaaattgcaacgatagctaaagttgagccggaaaagccgacaaattgtggaggcggcgatgggcccggcggcgggcatggatgaggtaaaggagaggaccgtttgccaaactgagtgccagagaacacctggggataaaggcaacagtttttcttgcgtcgctctaatgtcgtaataattccaaataactaaaaaacctggaacatttttctctatttgttcaaaatgtaattgagtcaaacccaaaactaaaatagtaatctcgtatttatatgcaaagcactaccaattctgtgttcgtctcggcttctgtcgcaagtggaattcgaacggcaaattttcctgacacgacggaagtgttcagcaactgtactgcctctgctactgttatttctttctaaaatgagtcatttttattttttgaaaaaataataaagtcaccaaaaggtagatcgtctgcgcctgaatggctccgcttggcgcaccaatggcaaaaaaagcgtacaatgtgccgtcgttcaattcgtctaactaaaggagaaaataacaaaaataaatgaatgatgattggaacacaaaaatctaattttacaaaaaagttccatacatttaagtcgacaattcgtatcagtgaaatattggccgcttctgccaatgcttggcaatcgccgcttttgcccattccatgccgatctgtgcgttcaattcgctaagcgtaactaaacccaatttggacaattctcagttgcctttgccgtgttttttgtctcaccgtttcccatccgtacgaaatatccccaggccgagtcggccgtcgtccttctgacgcatcccctcagtttccccgccagcgtttgccatgcattcagctgctgcacccgattgactatgaactcggcattcgtccgtccgcttttagtgtaatggaccaccgatcgaatggcatcactgggcatatttccaatcgttagatttgccaaaagaacttcgacaacaacgacggcactctcatttttggtcacggcaccatcgacaaactgatgagtgatgcgagaaacgtatgaatcgagcagctcatcgccaatttgaacctgaaaaacaaatatacctggggatccagacctgtatttttcctaaaccatgcaagatcaatgacaaccgaaagaacacatttttttatttaaaaaacttgaatagcgaaaaaattgtggttttattctgaaactaaagaatgaaattggcttgttggtcacttgtatttttcctctatttttagatcgaaaaaacagataaaggtcaattggggaatatagatacaggaattatttcaatggcaagttttgaatctgagttcagcaaattccgaactttaaagatgttagaattcaggtttgtagtccgaaactatgcaccgactgggggagtgggtgctctctttaatgaataaccattttcacctttcctgcatggtaaaattgcggctttgtgctgccatcattgagtttgcccatccaaatgatcaaatcttccgcagatcgcaaatacatcgtcccgttggcattgcgcccgacatcggccaattcagcactgattggcccaatttggccacattttccatggtgtacaaagtccagatgatattgaaggccttttggggaatacacattttataccacaacaaattgtatttaaaataccataggtgaaatcgtggacgacaatttggtcaggatttgaagttaaaatgccagtaattgtggacctcccatcgtaaacaacctgcgaaatggtttaaaaatatctcatttattgc

SEQ ID NO: 14300 - DNA, 1616 bp, Heterodera glycines
atattggattgggtgtgaccgtgtttggcaactacaaccttttccgcttgaagatgatccggaattgggtgcttatggacgagtggacgcatggattcgaaatcgaattcaaaacaatggattacaggggaggtctgcaagtttcccacaggaaatgtggaatatgagtgaaaggtgaaagtggaaatagaattttaagaaacaaaaatttagagttgagcaaaatttaatgaggacaaataacagcatcgaggggtggcatcgctctttcaatagccaattccgcttccttcatccgccattaagttattttgtcaaaaaaatgaaagaagaagacagacactggaatttgattgtgcaagattacaacaataacccacaaaatggaatgcgtggcaggggaatggcaaggaaaaacatttacgtacagcaggaccaagcaattcgcgccattttcttggatcgtcataacagaccttttttggcctatctacgtgcaatcgcttatcgaatgccggaaccaaattgatttgattgagatatttttaggaaataatccgttctaatgacttgaaaatattttttaaaatagaaatttactgtcggattgtccactgtcggattgtccacttctgtcggattgtcctcactgtcggattgtccaactgtcggattgtccactgtcggattgtccactgtcggattgtccagtcacgtatccaaaagttattaaatttaatgatgagaaataagtaaactaaaaatagttcttcggttagaaatcttggtcaagcagtaaatacagctaatcaaaaagcttaagcaaaacagtgatttatatgattcgaacccggatttatttggcttttcattttttacatgatttttttgatgtttctaaactggttttttctcatttccatatttctgattttgtctatatttccatattgtacattcatattacggcatttttacaaatctcaaagacaccactcaatattttttgtttttgtaaaatacgaccttaaaatagaaaaattttggaaaaccatcataaatgtaggaaacgaaaagaattgcagaaataaatcattgtagagaaatgattagaaaacaatggcagctttggcaataaaatgtgatactgagaaaacatctgaactgagagatactaaaaaaagtgatgaaaagaatccaacagaacctattaataacatagactgcagggctgggacgcgaccgcgatccgcgatgcgcgatccgcgaccacggcaaattgaatccgcgatgcgcgatccgcgaccgcgggatttttctgtgcgcgccccacccctgatagactgtccttctagttctggaataggtttaagatgtactgatactattgcatgggcaatggttaaaccagaaagcgatgaataccaaataagacaaaaaaaggataaaaacagagatgatcagctaaggatgattatttttcagagaatggataattatgcattggctgttcaggtggataggaggacaaatggccatattttgcccctagttcatccaaatttaaaaatgaatccatatccaccccttaggcaataaaattttcagtaccaaaa

SEQ ID NO: 14301 - DNA, 1237 bp, Heterodera glycines
  unsure (1)..(1237): unsure at all n locations
tcatccaaatttaaaactgaatcagttttcacgctagnncagtataattcagtancaaaagtggnaaagctgaaatatnntagttcttcgaattatgagttatactcacaaaatccaaaagaggaaagtgggactatttataatattataaaaagtgtaagaaatgagataaaagcaattgatgtcgattntaatgtatatgatgatgagagtaatgatagcataaaccagcgattctttccgcatcaaattggataacaaacaattctatgtggggatcagcattttttcggcaaccaggattaataacaggcgctacagagacattgtagaggtgcgatcagcgtctggtctgtcggctactgtggcatttgtagacgcgatggacattgggcgagaaactgccccaacagaaatagacaagaaagagttaccaatcgtgaaagaggaggacaccaaagataaaatgtcaatggttatctgccagaaaatttaaaaaaaaatgcggaattgtagacatgaccggcccccgcacttgttgaccaacaattttcaaactgctgcggcaatccaaattgtagttaaattgaaatttccaataattgattaatttagggtataattaattcgagttagtgatggagcataagtaaaattttttttcaaaagaatttaaatgagaaaagttgctttagctatgaaaaacactgactattggatttttgctttcataaaaaattggcgcacaacgcagaagagcagttcgagcagtacgtcaacatttgtgtcaaaagaagaacggaagaagacgcaaaacggacaaatgcaaggcaaatgagacgtcaactgagttctcgtggcgacggctgttttgtttgtggacctttggactaggacaagagtacgtgaccaacaacaaagaaggacaaagaaatgaattgacataaattaaatttgaaggaaggcaaaagaaaaacttaatgcttcggcaaactaaattagaataagctaaaaaggatcagggacgaccctctatgggatgggaatgataggctaggttttaaacttattttattaattctcaataacacatttttgaatttaaatttagcaaatttttcgaacaaatttttcaaagtaattaaaaaagggaattgccaattgataccaaatttgagaccagggacggtctaaaacagggtatgaggtgtaagagataaataaattaacattaaat

SEQ ID NO: 14302 - DNA, 3582 bp, Heterodera glycines
  unsure (1)..(3582): unsure at all n locations
caccggcttccatgtcctccttggcgtgcttcagccgcttcgcaattgtctcttcagtttcgcttccgcgctgacgaagtcgttgttcctgaattttcgattctgtttgaaaatccagtacggtttcttatggcccgcttattataaacccaattttttccccgaatattttggtaaacttccctaaaaatgaggccagattttacctgggaaaaatatttaaacgttttctagcgccgaggaaaaaatatattttttagcccttttcgccaaaaacaaaatgttgtgtggtcagtttcaaaatatggtaaatgtgagtccacgatgattaaatgtgtgccggaggggtaaattttggaatttaatttctctttaaaaaaatttggggagcaagtaacccactcctggataagaaattgtttaaatttccctatttttctaggaaaacaaaatattttttaggggtggggcatgggggttggaattcctcccccccccccttggcttggtcccatagatcctaaagtcagaggcgccgttcacttttttctaaaagttgctgttttttttctcccttttttgagtaacggaccaacacttcgatggacgggggtcggacgagcacaaatttggcgtcaaattgcagcgctttgaagttgcgcacgccgttcagctccacgtccaaaacgcaaattttgccgctgctttgcacgtcgtccaccgcctttttgctcgtcccgtacaaattgccgccaaattcggcgtgttcaaggaattgtccggcatcaatcatttgttccatttcgcgtcggtccacaaaataatagtgctggaaaattataaatggaattgtggggacacacacaatttttgagttttttcggttgggagggccaccgaattttacccttattgtaacagaaatttgagaattttgcaagaatttgggaccattttttcaaaaaaaaaaagcaaattaaagggtcctctcctcatttcggtttttatgaaaatcggcccgttaaaagcgtaaaagtgccagaaaatactcggcatcaacaatgtaagtccaacatttgatattttcaacaacctgctggtccaattcgccatcccgcggctttcgcgtggtatctaaaaaaccaaaacaatttttttttaattgacacaaaaaattgctttaaaattttgattttaaaattttttaaagttaattttccacaaataaatggagaaatttaggccagtaaccaggaaaagtcctattaacttccttgtcaaaatcgctaaattttcattattttccacaataaataatttttttccaaaacttgcctaaaaattatctaaaatttagcatttttgccagataattaacggtctaaaataaatttccatttcaaacccgaattattgctggttacgagcctaaattaaacgcatttcttgctctgtcaaaaatatgaaaaaaaattgccacgaaaaagcgtacgagaaatgctaaaagcaaatgcttcgggatattctttcattgcgcgggccaaaattgtgctcttcccacaaccggaaggaccagaaatgatgatgggcctaaccttgaaaaagggggaaaaatgaaaatttggaattttttttttgaattttttaaaaccatggcttgctggaagaggcttccgttcaacaatgttccgaaaatatgtctttgcaaatgctgtcgaatggtgttagtcaatgttcctaaagaatgcattttgctaattttcccgtcacattaaaaaagttttctattggctttttactcacttttatgtttttaaaaattaaggtaggccgatgttgtgttaatttttcaactttaaaattttagacctcattgtcgacttttcgtactcttgagcgattattgaaaattgtacgatattaaggaatttgaaattcaaagacattaaggaaagaccaaattgaataggatattttttgaattttaattttttgtgtattaaatttggttttatttcagtcccgttcgttaatttataaattggataatttttagagatcgacctggacctgaatccaggcctggatttttcctggatccaggtccaggtccaggccatttttcggcatcctggatttttcctggacctggattttcctggatttttgtccaggaaatcaaggtccaggtcaaatgtgaaaaaaaatccaggtccaggtccaggcaaaacaggaaaaaacctggattttcctggacaaaattttagaatttattttttcaagtgaccgatgttttttcaagttttcgaaaacagattaaataaatttaaaaacacattattattattaattagatatttttagatgcttctaagcaaataattaattttttcaaacatttttttgatttttaaaataaatttaaaaaaatccagtccaggcctggatccaggtctcgaggagcctggatttttcctggacctggattttcctggatttttgtccaggaaatcaaggtccaggtccaacatggaatccaggtccaggtccaggcttttttcaaaatgtcgatctctacttaaaaccaaacccgaaaattttgctcatccagaccgaatgccgacttttttcccacctcgtcccctgctgttgttgtgccaaatgctgcaaattgcgtagtcgtggtgttggcaacaaatccctgttggttgttgttggtgccaaaatccaccgccacattgtgatgccgtggcacaccaaatcccagcggcgcaaccggcggtgatgccattggatttgttgtgccatcgctgccgctgttgtggccatttcttcccatcgctgccaactggcgatgatccgccgccgatggcatgaatccgtcgctgttgccgttgttgtgccgatgcaattccacctcgttggccaacagcgaggcaaggtgttccgtgttgtaattgctttgcgcgtcggcgacggaggcggcggcggcactgtcaaaaggccgcccttcaaccattaatgagcccagctgatgatgattatgatgaaagttctcttaatggataggtaattaggaaataattagtttcattaacatttgagatcgtgaatctcgagacctattctcgatctcaggcctccctcggtatcgagtttccgttctcgacttgcgtcagcccctcccccgctattttcatggcttcaagcgcctcgcccccatttttagtctgagagcatcgctaattacattaattaattaattaccctgctggtcgtcccgcaacacttccatcaggtcgtccatctcctgactgtggcacatggacattgtagcctcgggcgctggtgacctatttgcagtgcaagtgccattgctgctgcatgccnngtagtggtggtggcactgtgaggagaattgttggtggctaaacattngccggaagcggttgctgatggtgccattgcgcgaaaaaattattgttgttacaagtgccagtgccatcatcaacgtattggccacacatgggaatgttgtgcaccaacacagtttnggaggaatggtcaacatggtcgataaat

SEQ ID NO: 14303 - DNA, 1502 bp, Heterodera glycines
tcttttgattataccaaccattaaattatttaatttattttatgcctataattcttaaaaaaaatattaaaaaatattaaaaaaccgtttttgatgaaaattctcaaaacaaaattgtttatttacaaaatatagaacaaacaacttaatgaataattacatttattaacacttcaatattaaaatatcaattattaatttaactatccaaattatttcaacagataatcagcaattcatcttaaaaaatatatacaatttgtgaagctttctaggaaaaccaatttagccaataattcaaaataattgtcataattattcaaaaaatttatttctttttaaaatattaatattcaagaataccaaaattgatatttaatgatagaaagattatagattttactgactaattaaataaataatattcctttgatagtcatttttagatttaaattatttacgcttttcgtcattaattttttagattaattttttgtaccgtgtttgttattcagctgataaatattatttgtaatttactttcgtaataaactttttaataaattatataaaatataattaattttattaaaagttagaatgatctgtttcaataagaatatatttacaattatttttattttcttgtattttttaaattaatgtaaaataataaatatcacacatcctttttaaatatttttatttatttaagtaaaaataaaattattttatcattttaataaatctttcttgcttcttgccttagattttgacacgttttgatgttgacactacttctttatttcttaatagattgctttaatatacatacaaaaaatattatatttgacaattaggttgtgtttttttattattaatcatatcaaaggtacgaaatgctttaagtttgttaagttaatttcacccaaaataagcatttttggtcattttttaataggtgatgtgacatttgcgccgcagacacttgcgccgcgacagttgcgccgcagacacttgcgccgcgacagttgcgccgcagacacttgcgccgcgacacttgcgccgcagacacttgcgccgctgccatttgcgccgccgacacttgcgccgcgacagttgcgccgcccccccccccaattttgattatttaaagcataattttctcaatcaattttaatgtttaaagttaatgtagcattcggaattaaaacttccattccaattacattttaaataaaattcaacattaggtaattatcaacaaattttactaaaactataaattaaacgcaaatgacaactaattaaaaaaacacaacaataaatcactaatcacaaaggtaaacacttaattttttgtctttggtcaacgcatacagtaagagcaatgacaagtttttttcttcttcactgccgagagtagcaagaaataaaattatttttttaatgaactcaatttcaatttttccgccttttaaacacaattttgaatgttctga

SEQ ID NO: 14304 - DNA, 1664 bp, Heterodera glycines
  unsure (1)..(1664): unsure at all n locations
gcgcgaaaacggcggcgcgaaaacggcagcgcgaaaacggcggcgcgaaaacgaccctgaccgatatttcgatgctcattcatgcattttacccattggacggttcagtcccaatggcatttggccatttcagtcccgggtctgtaacccttcagggattggttgcccaacaaatttttttcggattcttccattacagaccgagagacttcgatggtatatatttcgtccattttgactctggactatatgaacgatattttccgatcattttgctgtaaaatctttttctttaaatttaattccattctttccgattttaagcgtaaattcaaacattttacatcaaaacaataaaagcaaaatgtatttaaaaagatggaaattttaaatttcatgtcctttttataaactgacaatttgaaacaaataacaatacttttctgcactttttagcatatattttattatacatttcagaattttacacataaaaatcccatctgtatttataatatatcaattcatttgggtctgctgcctttggtcatccgaaccgatctccatctgtaaaactttataaaaagttgactccacgataattgctcaattattacggaattttcccatttttggattttttaacttatttccgcttctttttttaatttattaaaaataaatttataatcattaaataatgttttcaattgatataaacaaaatcaattaaatagttgatgattagccagccaactaacaaaggctaaacaaatatttttcagtttaagagaagagcgagtaaaagtttaaaatttagtttagtaatgttcttttgttataatatatcatatcatttttatttaaagcatgcgccaaattgaaatgtgaagggcgtaagatcgttttgatttcgttgaaaataaaaaaagttataacccaatgggaatgggctggcgcgaaaacgaccaagtccactttgaacacccaaaaagtgaaagtaaagcttttaaaataattttagcaaagataaaacataatgcaattaattgaaaaagaaaaagtatagctctatgaatttggaaaaaattaatgtataataaaagaattatttaagctcaaaaaaccgtttatttaaaaataaaaaattttaaaaaataaaaatataaagagcaagacaacaacacagagatatggcaagtaataaaaaaacaataaagagtattcaataaagtaaaaaattaacaaaataaaatttaggttgaagaataatattattaattagtcaaaaatcttaatttttaatcaaaagaagcacaaaaattcgttctaatcctaatttacaatctcttatatatacacaataaaaagttgtaaaaattatatatatgtaataagtaataataaaataaatattacattttgtttaatttaaatttatttcaattatttcttttattctcatcttttaatgaattatattttgattatctatagagaatacaactatataatcatctttggttataattttaagcgagtttttgaaaaatagagctcctacgatgatgagacttcttttataaaatattttctctattttagcatttatgctnaatgaacaataaaaatgataatgtcctcgaagaattctgtctataaat

SEQ ID NO: 14305 - DNA, 1465 bp, Heterodera glycines
  unsure (1)..(1465): unsure at all n locations
ttttagagaaatgtcataataaatattattttttcaaatttttctttatanttttcccaatagatgaaaataattanacgtataataattgccctgctcatttgctttgaaaatagcntaaaacatatacaaaaaaaagcaattagaaaaatataaattatttattaaatttcacagaaaaactaattgttttggaaattttttaaacatacttttatttcaatatgaaatagcaaattataaataataaatatactacgaataggaaatattttatatacaaaggataaattcaatttgagaaaaattaatgataatagctgcgcttccaatatgaggtgctgttaattcgacaagattttaatgtattaaaaataaaaaaataatttcatttaattggaattttcattttttactaaaccttttttaaattatataaacattataaataaataattttctattttattttcattgggtcctaaaataagaaaaaaaatgaaaaatttggtcttgaaaaaatttagaaatttttcagttttaatcagtttattctgtaaacataatggtacaaattttttgaataatttataatttaactttcaattataaaacaaaaaaaaacagagctgtgacttttgtagctcttttttaattttcataacaaatcaaatttcgaagtatgtaaatttaaaaattaattagttaaattaatttcatcctggaaacgtttattaatgagaatattgaaaaacagaaatttttaaaattacttattacatactttataatcaaaatattaatgtttacttaaaccagtaaagcggataagattggtaaataaactatctaataaaaaaatagaaattatgcgaaaaattactaaataaatttatcatattaatgataaattaaactgtaaacaaaaaaataaagtaaactattaatttagtcaatatattttaagaataatgattacctaataagttcattcaattttattttttattatataaattttgcgctgtaaattaaccgatgaaaaataatatcaaaaagattatcgaatttaaaataaaatttttagcaaatttatttaataaagcctttaaataaataatatacagttaaaataaaaaaactattaacattgcttcattatttattatttcctttgttctaataacaatggtaattcaattaaaatataattctttttatatttatttttattaaatttatatgtcttatttatttatttattatctagaataatttatttttatcaatttcctttaaactattaaaatataataaaaacaaacaaaatgccatcttaagaatatcttttaaaagaagttgaataaaaatcataaatgcactcacgaatttatcgaagttcaccanaaattttataaaataaataattaaatagatatgggaaaccgnaagaaatttcgtgcaa

SEQ ID NO: 14306 - DNA, 2882 bp, Heterodera glycines
  unsure (1)..(2882): unsure at all n locations
attttctttttatttgactgaaatttcaaaaaaaaaaatttcagtgcctcttctttttttttttgatggtgacacaaatttaaagacatggcaaaagaaattattgaaattcaatttttttgattaaataaaaatcgtgaacggaaaatgggtcagtggaaaatgcgtcagtgaatcagtatttctttaaattgagatacggtagtaatattaccgaaatcacaacttgttttttagggatttgggaaagtttcaattaggtattttgacttttaaaaacttaattgataaaattcagaacaaaattattagacaattttgtccttttgtaataatacaatacttaatgctacagtaactttatttaaaaaatactgtattattgacaccttttccactgacgcatttgccaggagccaaaattattattatttttaaaaattaattttcatttaaattatggcacaaaaatttccagcaaacgccaagtgtatgtggtggaggagccccgtgacacatttgttgtgccgttgaactcgcagcatgccaacgaaaaggaaaatgccacttttgaatgcgaagtgaacgacaaggacatcgatgtgaaatggttccatgacggtgccgagatcgggatggacgggcggcactttaaggtgggaaggagggggcaaatctcttgctaatcaaagaatacattcatatttttgtgttatgattaatttcaaaaattgagtaggagtttaaattacctattttgggattcctttaatcccaaaaatccctaagtatggatatttccaaaattcaaaccaaaactagctcaaattcttcaattcaaatgcctatcagaaatttaaaaaatatattagaaaagtcagaaacaaaaccatttttttaacaatattttttttaattttatatttttttacattatctaaaatttatttttatttttttgccaaatttcattttgtttttctattgtgtattttatagatgcttcttgttttacaggaacgggctggatgccgtcgtcgcctgctgatcatcaatgtactcattgaagaccacggggagtacaaatgcacagccaaagacgacgaaacaatggcccaactcattgtgcaccccaaattcgtcaaaaaagcggagcgcaagccggtgacctgctggttggacgatgagttgtattaaaattttttgtttttcactgttcctgttttatttgtgcccatctcttttttaaactctgtgaattgaagataaaattttattttcctttaattgtcctaattttatggtatatcccaaccagggctggccgtgattgaatttccaatcacggaaatccgtgagccgtgatcacggggctttaaaaaaaatccgtgatccgagatcacggcaccccaaaaactccgtgatccttgattaaaaaatttttttctaatgatttttttaatttaaatttatttagaaaaacggaatttaatcgctggaaaaattcctaaaagatattttaaagaaaccaaaacacaatccgctttttttgctgcgtaccttttccaaaaaatgactaagtttaccattttgagcaaattttttgatgaaaattaggcctttttgtagaaatctccaaggaaaaattttattttttaacaaagtttattaagaaaatttttcaaatttttcttaaatttatatttaactgtcccataatgtttctttaaaaattttagacattgcaattttgcgtacttttccaattttttgcaaaattaattcatgaatattttttcagaaagtgctctgaaacgcatctaattttatttacatgttaacaaggtcctcttaggcttatattatgaataaggctaaagaataaaaaaattttaaaatgtttccttatattttggttatttcgttcaactttcggtggggtgcttggaacagtggaatcatgcgcacccgtccgatatggtccaccagcgggacgtggttgctcataacaaacattcttgtccaggacaaaatttatgccaaaattggcgattttgatccgtaccatttcatttattcggtgatgtcaatcaaatggttttcacaaactgtttaaaaacactaaattattaacgacttgaaaatacgacgtgtgattagaatttgggattgggacgaattgttgctgttgttctgatcacttctgattattgagaaatgagcaaaaaaattaattattttactaatgtgacacttaaaaattgtataattttattttatattatgtgattgtctttacccttcaggcataattcccatgacaatctaaattacagttgtagccaaagtaaaaataaccacgatttaggtcggatgagattatcttggtcaaaaaactgtacagtatgccagagaatttgctaaaaaacggtgtgtttgacgaataaaatgaatgaatcgttttatggaataaaatgaatttttaattccacattttttgtgtacaattgcacgcaaaagggaaatattattgtaattccacattttctagtgtacaattgcacgtaaaaaggaaatatgaattgtaatttcacgtttacaactgcacgcaaaaggaaaatattattgtaattccaggaaatatgaatttttaattccacgttttcttgtgtacaattgcacgcaaaagggaaatattattgtgattccacattttctagtgtacaattgcacgtaaaagggaaatatgaattgtaatttcacgtttacaactgcacacaaaaggaaaatattattgtaattccgaggaagatatgaatttttaattccacataattcgttgtgtactaattgcacgcaaaagggaannatattattgtaat

SEQ ID NO: 14307 - DNA, 848 bp, Heterodera glycines
tttaaattttttatagatttttaatatttggattttttttttcttaccaaaacttcatcgaacctggttctttctattctctttcaaatcgccccaaattttttttacagccacgaggccgcgaagcggccgagtgagtaccttgggcgcaggaaaattattaatgaggagggttcattatttatttatttttgcaaaattaattcataattttttttcagaaactgctctgaaacgcaccaaaatttatttacaagttgaatgagcccctgatcaattacaaattatcaaaaagggagatgaataaatattttaaatttttgaaatttttttaagtgcaaaagtggtgggtgtctgcaaaaaattttcaccgggtttaataaatctaggaaaataagtaagcttttgtagtgttccgatacgtatctctgcaaaatttggtgagcccctgatcaattacaaattatttatggacgatcaaattttttgaaatttttttaagtgcaaaagtggtgggtgtctgcaaaaaattttcaccgggtttaataaatctaggaaaattagtaagcttttgtagtgctccgatacgtatctctgcaaaatttggtgagccgctgatcaattacaaattatttatggacgatcaaattttttgaaatttttttaagtgaaaaagtggggggtgtttgcaaaaaattttcaccgggtttaataaatctaggaaaattagtaagcttttgtagggttccgatacgtatctctgcaaaatttggtgagcccctgatcaattacaaattatttatggacgatcaaattttttgaaattttttaaggggaaaagggggggg

SEQ ID NO: 14308 - DNA, 1029 bp, Heterodera glycines
aaatttttttacacttaactaggccaatttagcttattccagaaatctcgcatgaattctcatttttaattttttatagatttttaaatgtttggatttttttggcttaacaaaacttcatcgaacctggttctttctattctctttcaaatcgccccaaatttttttttacagcttaactaggcccaattaagcttatttccagaaaatctcgcatgaattctcatttttaaattttttatagatttttaaatgtttggattttttttggcttaccaaaacttcatcgaacctggttctttctattctctttcaaatcgccccaaattttttttacagcttaactaggcccaattaagcttatttccagaaaatctcgcatgaattctcatttttaaattttttatagatttttaaatgtttggattttttttggcttaacaaaacttcatcgaacctggttctttctattctctttcaaatcgccccaaattttttttacagcttaactaggccctattaagcttatttccagaaaatctcgcatgaattctcatttttaaattttttatagatttttaaatatttggattttttttggcttaccaaaacttcatcgaacctggttctttctattctctttcaaatcgccccaaattttttttacagcttaactaggccctattaagcttatttccagaaaatctcgcatgaattctcatttttaaattttttatagatttttaaatgtttgcattttttttggcttaccaaaacttcatcgaacctggttctttctattctctttcaaatcgccccaaattttttttacagccacgaggccgcgaagcggccgagtgagtaccttgggcgcaggaaaattattaaggaggagggttcattatttatttaccgaaaaagtttaggcttaactttttcagcgggtttaaaaaatctagaaaaattagtaagcatttgtagtgctccgatacgtatctctgcaaaatttggtgagccgctgatcaatta

SEQ ID NO: 14309 - DNA, 1987 bp, Heterodera glycines
ttcaatgagtaattttatagtaaatcagaaactattaccttattatcaaaaatataatttaggaaatgctacttaatatgatagatttattttatgaaaaaaaacttatggctgatgaaacggcataaaatcgcaaaaaaataaatagttgtttccatttcaaacaatgctttaagaaaaatataaattagaccaaccaaataaaccgtaaatcagtttttcgattatggaaactaattcttcagaccatgattataagtaattgagaacgaatgtaaaaagtaaatattttcctagttaactaaaatttcaccgcacttaattaattaattttttattaaatagttttcaaccaatgtgcaaaattttaccttttgtgacagagcttgactttactttcgtaggttttttttatgatgtcgtacagtaacggatacattgccaggctttacagtagattttacccaattaattcgaagcaaaataaagaattgaaaatacaattaagatactgcataaaaaagctgtttttcattttttaattatctttaaatattcaaatgaccgtagattcaacctcttttttaattaaattaaaattttaattcgagtttcaaaacctaacggcaaaatgaaataaattatgttttgttaattattacaatgggccaacaaatttaagatggcattgctttaaaaaggagacttaaagccaaaagtgattctattgattctaattaaatttatttatttaaatttattaagatagcgatattaatatcgattcttatgaagcagaaacaagcgcaaaacggcaacactttatataatgtaaaaacaacccaggatttattggcaattttgtgtgttatcaaatgattaaattcagcaacagactgtggtaaaataacaaatggaaataatttatttgaaataaaatattataaaaaaacatactttttcgtgaacctactcttttcttgaaactttgagacaaaatgaacatttatttgggaaattccggaacaagtgaggcttattgggcaactcatttccctgtcggtgattttgtggcagaagtaacggagaacgcaattgtgttagaaagcgaacaaagcgtgttttattttgaaaaagaaaagggcgatgaaagagagggtattgttggcgtaccagacgaggcgtataaaatgtcaaatgacgttttcattctgatacacactccgagtccacaaaaagcgagaggaaaaagggaaacaaagcagaaaagtgaacctcagagaaaagagcgaccagcgaaacaggaagtgtttctgaaaatcaggccgggtcaaaattcaaaatttgaaaatttggacccagcgtccagacccaaaagcaattggacagggacaacttgggctccaaaaaggaacacaacggagctaataattttgagtaccccggttccccagtccacaagtacagtggggagtacgataaaagtgaccatgacaatttcgacaaatattacaagcacggttccaacgactataaggcctaagatagaagtcaaaaaaccaattttcaagaaaattcaaataaaaaatgagcaaaaactcagtcagtatacaaggcagttgggaaaaaggtggaaaaattggtagttacgacaactaaagctccttttacaacgaccaaaaagtcaaaaattgaaaacatactgaaaaaggtaacaccgaaaccaaaaattgcggttttaaagaacacaacgcaaaagattcttagtactgttagaccaagcactaagagagtggtcagtgagatctttccaaagtcagttacaactccgagtacaataatgatcttaaaaagcacaaataattccaaaaattttttaatgaatgtgactgagattccagcacttatgactccaattcctccaaccactcaaaaaattgtggaaaaggtggaattgccgaaaaagaaagtgaaaacaaatcagaca

SEQ ID NO: 14310 - DNA, 1392 bp, Heterodera glycines
  unsure (1)..(1392): unsure at all n locations
caaaaactcagtcagtatacaaggcagttgggaaaaaggtggaacaattggtagctacgacaactaaagctccttttacaacgactaaaaaatcgaaaattgaaaacacactgaaaaaggcaacaccaaaaccaaaaattgtgggtttgaagagcagaacgcagaaggttcttagcacagttagaccaagcactaagaaagtggtcagtgagctttttccaaagtcagctacaactccgagtacaattttggtagtaaaaagcacaaataattccaaaaatttttctaagcatgtgctggttaaaaaacctgaggttgaattggaaaaggccacaacagcaagtctatttccaaagacaattaaacacacagaaccaacaatgaatgtgactgagattccagcacttatgactccaattcctccaaccactcaaaaaattgtggaaaaggtggaattgccgaaagagaaaggggaaaacaaatcagacagcattaaagctgaaaagaaaaatgaaaagttattaattccatccacggcaattacggttgtgaagaaaattaaggacgaaaaagtaagagacgtgtcggaaaagacagtaaagaataaaaagagtgaggaagaatacagtcaggaagttgaagctgaggtcattgagagcttagctaatgatggcaatgaaatggaagaattcgaaaattcattccaggatgaaagcgatgaggaagttagtgtggaattattcgatgagaatgaaatcttcgacatggatcgaagaaaaagaacgacagttacaacacctgacgcccggtggattaaaaaagtagagaaaagcaaagtgtgaaataaagcaggacaggaaaataagaatttgaatacgcgagtcaattatgcattgtatcgactaaatgaggagaaaagaaggcaatacgatcatatttataaacaagcgtgcgaaaatactaaatttcagctacaattggccaaagcggttttacaaattaatccaaatgagggagtcagaaaaatatttaatcgagacgatttagtggcacgatggaaaggagataatttggaagttggtttttgtgcgccggttacaccagaaaaaatattctgggacagaaaatggggaacgattgttacgaatggataccaattttcgcagaaaatacaacattttttattcggccgggtaccagagaattgagcattataggcaaaagaatggagtgtacagaaatggaaaaaaccaataatatgaacaatgcgacacaaaaggaaattgttcaaaaattaactngaaaattttgggaaacatttaaaccgaaatacagaaacatacaaaaatcctttggtccctgagagcgggaagccttttttgaatcggacag

SEQ ID NO: 14311 - DNA, 1224 bp, Heterodera glycines
cagtgacgggtaaattttgagaatgggaagcgacactgcttgtttcacccgacaagcactgtcctggaccagtattgcttggtttaccttttcttatggatttgaaaggagttattgcacttggggaaaagaaagttcgattgggtgaaatttgacaagcagagtatcagtgataggcacagaaccaccaaaaccaccgagagtaattttaccaaaaaatgacacgtttgaaccacggacggaaaatattcttaatgcgagagttgatgaaatttttccaactggacaaaatttcttggtaaggggtatacagcatcagtaccctgggattatcattggaaggacattggttgccccaggcgcgaccaaagaagtcataataagacttatgaatgcgggaaatgcaccaattaaaatttacgggaactcaaatttggcagatttggagccattacaaattaatgcattacctggcgatgatattgcggctaaagattttattccacctgaaactcggtggagtgaaaatttgcctaaattacccgtaaatgacatgaatcggcctccttcagaaagaatagatttggaaaagacaagactaagtgaaaaggcacagcattaaagcaaattgtggacaaatattccgatgcatttgtcggtgatgacggaaaaattggtcgttacaatggtccaattgttcacaaaatcgatttgacgcccggggcgttaccattccattttagaccttatcgttaccccccagagactcagaaggaaattgagaggcaaattagaatgatgcttgaccagaatattattcgtgagtcggaatctgagttcgcttctcctattgtgatggtcccgaaagcggacaaaaaatcatggagatttgcggttgattacagggcgttgaataaaatgaccaaaaagagagtttttcatcttccgaatattcaagagcttttggatttaatgggagccaaaaaatattacacttgtatggacatgatgcagggatttatgcaaatcccaatggcaaaggaggacattgaaaagacagcttttatttctcatttgggcatttatgaatttatcacaatgccttttggtttaacagcagcaccggacacatttcagagggtaatgaattcgttgagaagacgattgacagcagcaatgttaatttatttggatgatataattattgggagtgaaacggaggaa

SEQ ID NO: 14312 - DNA, 3885 bp, Heterodera glycines
cccaaacggacacttgaaaaaatcgattttttttgttttcggggcagtccccccgaaccgatgcgcccagatttatggggagaccgaatccttccggaatagcttccctatagcctgtactttaattctgcgttggatttttgctccccataattgtttgagtaccccaaacggacacttgaaaaaatcgatttatttttgttttcggggcagtccccccgaaccgatgcgcccagatttatggggagaccgaatccttcgggaatagcttccctatagcctgtactttaattctgcgttggatttttgctccccataattgtttgagtaccagtagttagagactccattttcaccggattacggtagccccccataggtgtgggaggggtgcatggccaactgagcgccagccatttgagcgccgccaagtgagcgcgggccatttgagcgccagacttttcagtactgaagccaaaacctattgcgcgactttttttgcaaacccaaacctattgcgcgactttttcttgcaaacccaaacctattgcagggggtgcgcgactttttttggtgcgcgactttatgcaaattattttattaatttaaattaatttaaaattaaattttaaacatcttaaaagtcaaaacaacttaagacgttgaatttaaaatcatttaaaattcatcaaaaattccccgcaccgagcggatccgaaccccagagggggcggccagactgacgcactaaccactcggccacattggcaatggatgataaacattaatttgctctcataaagggaaaaattgacgtcaccagcggcgggaggggggcgagagcaggcggcgagaaggggggagggggtcaaataaacaaatcaattaaggaggggcgggggtgttgaaaaggtgccatataaacaaattaattaattggttgcgtactttgtgttgccgccctccttcccgcatgcccattatgtaatttgacaccttcagacaataaacaatttattaattgattttttgtccatttggtaattttcatttcatttaattcactttacggaaagaaaagccaatcaataatccattatcatttatttatgccttaattttttccttctttggcatttgtttacccatttacccattactttttgccatttattatttatgtgccagattggcattattatggtaccgttttttgtgccattttgccgcaattttttggcattgttttgcccccttatttcccaatttatttcttgccaatttttgcattgttttgcccaaatttttaaccctttattttgccaatttttacacatttttgtgccaaatttccctatttatttcttaccaaatttttgcacatttttgtgccaaatttccctatttatttatttcttgccaatttttggcattattttgccacaatttttaaccctatcttttgccaatttttacacatttttgtgccaaatttccctatttatttcttgccaaatttttgcacatttttgtgccaaatttccctatttatttatttcttgccaatttttggcattattttgccacaatttttaaccctatcttttgccaatttttacacatttttgtgccaaatttccctatttatttcttgccaaatttttgcacatttttgtgccaaatttccctatttatttcttgccaatttcttgcatttgttttccccattttctcatttaaaaaatatttaaattcttggcattcttttttttcaaaattaaattatggcgttctgttttttcaaatttaaaaattatttaaaatcttggtgttctgttttttaaatttaaaatcttggcgttctgttttttaaatttaaaaattatttaaattcttggcgttctgttttctcaaattaaaaaattattttcacatcttggcactctgtttttctcaaaattaaaaattatttaaaatcttggcgttctgttttcaaatttaaaatttatttcaattcttggcattctgtttttttcaaatttaaaatttatctaaattattggcgttctgttttctcaaattaaaaaattattttcacatcttggcattctgtttttctcaaatttaaaaattatttttattaattttccgcttttttcttccaagttttaattatttttgctttccctctttaaaatatttttattttccactctttttttccttttttattcattttccccttgttttttttcattttcattgatcgcaggtactttgtactgtcctttctcaccccatttttttcattttgttggtttactcggtactaaacccctttaggatatttgttaagccgtttcaaatatcctgggggccatccttaaaccgaggagtcctgccccggtactgggttacttcccagaggggtgggcacgggcgttcactgtccactgggcttattccgctggtatccagggctgcggcagtgactgaccgaaaccatgtttccgtcatagcccgccgggtgtcacagcgatgtttaagcccagccagatagtcggtctggtgtggacgggggcccttcactcgctggccttgagggtgaaggtgtgtctgttcctagcagcgggggtggcggttcctagccctaatgtgccctgcctacgggctgcattggtacagcgagagaataaccgggactggctggcccggaggaccgcgagtcactgagcagtgtcgaatgcgcagctgctcaaactcaacaccccggattaaaatccgcgttgacggaactcatatgtgctgtgggcgttggcgcaagtgccttatggagggagtaattacccaacatagggaggcctagaccaaaccttgcactttgggatggtagtgccacacactttgagttccatgagcggttccataatcgcttgctatgatagtcatagttggtgggcatgccctccattgtgatggcttgggcaggaaggttaaaaacacgtgtagggggtgacctatgcgcgtttttgactctccaaaaatggcccaaatcatcgctcaggagaggggtcatgcccgatttttttttgggtggcccttttctttgtcattttcgatcaaaattgttttactcttttcttaaaattgatcaaaatcaatttcagaaaaaaaaatgagccaataatccgacgattccctcccccctaccctcgatggaccgtattcccctgttggggatgatgatggagccgaattgatcgacgccgccccgccgctggaagaagtcatcatgcacttgccaaattccgtacgttttgcgaaaatgtttttaaattttttcatctaattttgcgaggtcttttcaggttgtgccgtctgaagtgaatgaacgaaaggcccgcaaggaaccatcaataactcgcgaattggacaccaagttgttcaaagtgatggctttatgtgtttgtccgccgcgcaggcggaagcggggcggttcaaaggtgtgttgtaatcacaactttttttaattttaaaatttctaactttaattaattattcgctttatgctatgaaaagtatattaaaaaaaaattttttttatttgtacattgtttaattgaggtattttaaatgatgtttagcgtttcgattcattggccaatttttgctgagcctaacgttcggcgctgtttttccggaggacattctgcgcaatttattcaccatgtgcctttcctacgcagtcgagggggccgaatcgatgaaaatatccgcggaccacttcattttccttctgacgtcaaaacaccttgactacgaagtggctgtacactttaaaaagttggacaactcggcaacagaaaaaatcctgacgcgttttga

SEQ ID NO: 14313 - DNA, 2337 bp, Heterodera glycines
ctcaatggcagcactgggcgctcggtcgggttcggtcaactccgtcccagccaagtttaagaagccataacttttttcattgttgaccaaccataacatccatgatatcattcgaaagctctggatgttttgaagatatttgtaagctattaataataaacacacagagctatcgaacaacaccaacaatgcttaatttgattgacaatgaacaaagttatggttcaaaaagtcttccgacgacgtttcggccgacgacgttttgtcctgcttcgtcttacccgccccccattgaaatattttaaaatttttacgattatttgataaaattaattgtgcaaaattaaactgctatttccacggatccatctatcaattaatgaaatttttcaacattttttgtaacaacttttttaaaattatttgaattttctcggaaaacctgtaaaaattggcaattttacgaaatgcccatagtgcggaacattgcggcggaagagccaaaaaaaaatttatttttttttttgaaaaagattgtcaaccacattttagaaaattttcgaacttttcaaaaaattagaaaaattcaagaattttgtcgcggaaagcgacaaatgatatattttgataataattaatattttttcctttcattaatttagtatttttctctattttttattttgtgtgttactggttctctccctctttctttctctctctctctatgcgcgtacgcatgcgcacgcgtctctagggctataaaagccgcaccattcgcctattggggcacttcttctcacttctatttaatatttatatttaatcgtcccttctccatttattcacacatttatttgtgactaataaaggaattgaaaaagggagtcaaaattcgaagagaaagctcttctcgcataagcatacaagggaaaggccaaagcctcttcctttgtccaacaaatcaattaacgttccaaaggggaacgttgaaagggatcgaaatccctttctcttttttgtccattccgcgacaaatttgctttttttaattttaaaacaaaaaatttgggatatattttattcatttcttctcatgggttttttcaattcaggacaactatgaaaaaccaggacacctgtgtgcatttttttacatgttaatatgtttgaacattcgtggcaaaatcaaataaaattaaaaataattatatttaggcatttttgcaattttatttctttatttttaacattataagaaattatagaaaaatgaaatttaaattattattattattcctattaatgatcctactatatacaattaagcagaccgtgcaagtgaaattaaaacaagaaaaaagctttgatgaaatatttgacaaagatgtgacgatggagcagaagaaattctctgccgaattgatcacataattcacggagaaattgctgatcagtaatcaaattcaacaaaatagtcgacaatttgatcaattttttgatgaaattttggaagtaaaaaaaaaagatagtgaagaaatgtccaataattgtgatgaattggaacaattaaaattgggatcaactcaaaagaaaatttatgaattgaaaaaagaatttggattgaccaaaaatagttattcaaaggaggaaaaacgcaaaataataaaacaatttgatcaattatatgacaaaataaaatataaattaaataaaaattgaagggaaaaagaaaaatatgtcaaaaaaataatagcaaaacatttgggcacaaatatcagaagcattttttattggaagaaagaattaaatgttgaaaattcgaaggagaatcaaaaaaatgatgatgcaaaacggaaattgttgaaaaatattttaaaataaaaaatgaatttatgaaaaatgggaaacattcacggaaggaatgggaagaatttagagcagaaattaaacaaatgtttggtgtgggttattggacgattgaaaaatgggcaataaattagaaattgaacaaaatgtttcaaaaagtaactttttgaaatataacattttttaaaaatattttgaaacaaattaatttgaatattcacagagcgcaaattttatacaattgctgataaattggaaaagatgaagcattattatcaaatgaaaaaacaaaatcccaaactcacggatagccaaattgcccaagttttgaatgtgtcaagagcatcaatgtacagaattaaagctgaattggagaagttttgaaaacagccgcttcatatataattagtagagaccgactaaaaaggcacgaaaaatcgcgaaaagaggacagcctataataggcac

SEQ ID NO: 14314 - DNA, 1183 bp, Heterodera glycines
atttttatgggagcaaaatacgtataacttaatcaaaaaacttaattttggtcatttaaatgatatcaaatattttataaagtttttttcgaataaggaaaaatttttaaacctaaaattttttatcaagaaaaaatgaaattttggtgatcaatttttgagaaaatttttcaattcttaggggtatattttctgaaattttttcaaatcctttttaggggtgtcttttcccgatattttggagaatttcttgaaaaaagcggaatgttttttcatccctttacaaaaatattttaatcattaaaagcgtctaatgaaaaattttttaatcaattaaattttaattaaatgtttatcttattttaatcttgcaaaaatgaaaaaatatggtaaaaaaaactttgaggtattccatgccaataaaaatattttaatttaatgaagtaatgccaaattggtaaaaataacattttaattattagcaaaaaatttcaaaaaaatcgtcattttttgttgttttatgaaaaaattagagttgcaaaataacctcccctgaaataaaagcccccgattagcggagttgaaaaataaaaagaaaattactttgagagtccttaatttaaaaattgaattggttgcgtattgtaagtgagctaagtataagaataaaatgattttcattagtgtcaaaacatatttaaaaacctcaagaaatgaaaataaaaaaaactttagaaaaataactcttttaacttaattaattaccttaagatttttttatttaattaaaataaagggttcaagaatagcgataaacaaaaaaaattaatccctatccaatatctctccccttttaaagcattatgtcctcatttatgattgcgtcctttcaatggtgtcgggcgaataaagaacaaccggatgccggtcacggactgaaccgagagttatcggacaactagcatttttcggcatatgtggaatcggttcggcagcttcagttggcaaatttcttcatgcataggttcttgctgttgtatctgatcagtctgaacttttcctgcttgacagggaacaaaagaccgaattagtttagatgagagtgatcgtaattctcaatgttgccttcaaaattaaaacgggcgagacttagaattttgcgttctaacctaatttggttttc

SEQ ID NO: 14315 - DNA, 2866 bp, Heterodera glycines
attgctcggcagttggagttccccgagctcagactcatcgaatacgattgtggtgggtgcttagaactggatttaggtacaaacccagttcaaatttgttttatataacactccccctgctcttgacaggtaaactccaaatgttggcccgtcttctcgagagtcttttctccaataagcaccgctgtctgattttcacacaaatgtctcgcatgttggacattctgcaggcctttctgtcctaccacaactacaaatactttcggttggacggctccactcacatcgatcagcgacaggcgatgatggagcggttcaattcggacagttcggtgttctgcttcattttgtcgactcggtcggggggcgttggcgtcaaccttaccggggcggacaccgtcattttctacgactcggattggaacccggtcggtattggcaaaaaatgcgaaatggggagaaaccgacgactgaaaaattgtcctctttagacaatggacgcacaagcacaggacagatgtcacagagtgagtttaatttaccacaacagggaacaatttgaggggaattcatttgctatttctttttcagattggacaaactcgaaatgtcaccatttatcggctcatcagtgaaaagacaatagaggaaaatattctgacgaaatccatgcaaaagcgacggcttggggagatggccattgaccagggcgaattcacgcccgacttcttcaaaaacaccggcaatctgcgggatttgttcagcaacgagacggccgttgccaaaataattgcgcccgttgtggacgaaccgaagaacatcaaagacgtcgaagcggtaaagaagggaatttttaaggttattttgcatatatttaggcaatgaatcgggtcgaggacacacaagatgcaattgctgcacagcttgccaaggaggaggacactgcagaagtggccgaatttgacgagacactgaacggcgcttctaccagctacgacctgagagacattgacagtccctccgagcagtacttggaattaatcagcggggtattacaaaaattagttgaaattttcggaaatcttgcatttgtagctgaaaccggtcgagcgatatgccgtcaatttcatggccgacgagtataaaccaatgctggacaaagaagtcgaggaggccgaggttggctcaatccttcaatcattcggaatgcgatcgtatttcacaggcaaaaataaaagcgaagcaaatggagttcatggaaaagcaacggaatgcggacgtcggactgttgtccgacacaatcgacgaaaatggcagcgccgtcgggggaaggaggcgacggaaagaggaggaactgctcgacatcgcctacaacgcctccacgggccccgccgctgtcgatgaggtagccaaaatggcgaaacgaaagttggccagcgccaagagggtgaggggggcgcagacgacgacaacgacggcactccgttgttgtggcagaagatgtcctccggggaaagtgtaggaaggacggccaaacaaaacaacatcgaacagcgcttattacgagtcacacagtccacaaattatatacctattcaccccacccttcgttttgttgctgaactgttatttcctcccccaaacgcacggcccaacgcatcgcaagactttgctctttttgtttgtaccatagaaaataaagaaaagaataaatgaagaagcactgaatctgctgctgtttttgcaaaacatattgtcgtcaacggactcaaagccttgctcttttttgtttgggcttaacgactaaaatcacaaaatttctctgagggacaaagctttgaggacaaaacggacaaaaagagcaagattttgacgggctgcgggcggggaagggcccaacattttgacttggggtgccacgttttggtagtgccacagtagggaaaaggaattaagttcaacattcaattttatgcaaattgtgccacggattaacctttttgctgccccctttcccaatgccgtcatccaaattctttccatttccatcacttttgttttgttagagcaaattttaagttcgatcgcttgtcccattcgccgcttcccttcacttgcgatgtgtcatccttcgacgacattccggtatttgcattgaaattgaaatccgcctttaattggcccatcctcccggggtttttttcgtttctttctgtactcgggtaccgtattccccccgtgtttttttcgtttctttctgtactcgggtaccgtattcccccccccatcccatccctccgttgtccccattctctgtgcccttcccatgctcagatatggatgcctccgtctccgcccaattccgaggccggtggcgtctgttccgtgccgtcctttgacatttactcgcccatcgacggggctttgctttaccaacccgggccaatggctgaggacgaattgcctccgctgcctccgcttttgccttctttggacgcctttccgcgcggcgtcagtcgttcgcctcgcaaaacggcggctgagtcgccgcttcggacggtggtgacgaaacaacggcggagaagaagcacatcgacgacgaaaaacgtactgacgacgaaggaggagagacagcagcaacaaatgccgaaggacgggcccatcgttggcattccgcccgaaattgcggcttccattcgcggcgaacaggcaatggctcgaacgacgacagttcaccgatgccgccgccgccttcgaacgaccgccctctccgcccgagtcggcgccgaacacttccgatggttatgacgccgctgaacagcgcgtcgacgaatgtgctgccgatgccccaactttttgccccgcc

SEQ ID NO: 14316 - DNA, 1005 bp, Heterodera glycines
gcccaaattggagcatgccgaggccgtcacggatttgtccactgctggttccactcctggtccatcctttgtccttcccccggccgtggcaatgccaacaatttcaactttggacggtaacgaaaggaaagggctgaacggtcggacaattggagcccaaatgggtaccatttgagaagccatcgaatcaacgctgcgcaaaagtcgcaaacgcgtgcaaagtccgtcaacatttgcgccgacagtgccgcgttatttgtcagtgaaatggccaaggggggagggactggggaaaaacaaatttgccatttccaactttcagaattcgtaatttgggcccatttcctcagcaacccttcgaaagggttggccccaacgcctcccgccacattttccgcttggtctgtcccgaatggcgtgccaattcgaacactctcccaatgcctggtcccattggaatggaattggttgattttgaagggattccctggagtgctgcggaagaccagcggctgctgaaggtgaagcggacattcgatgcacaatctcatggccattaattaattcgtccttcccttaggccatttcggataagcattgtctgacgaacgcggctgatcagcagctgctcactcggcccggcattcaattcaactgggaatttgtgtcgcaatatgtcaacgtccgatccaaccaatacaggtccgaccgacaccgaactgattgcactgtccttttctttctccgatcattttacatcaaaccccttaaaatgtcacagatcgcctcgtcagtgtgcgctgcgctaccaaaatttcgttttgcgttgtgacgaagcgtttgaggagaattcacttggccgcagaggtgatcagtgatcaccagtgggattttgaatttggaattgatccctttaaggcccgattcccgccgtccccctctctcgtcggtctcgcccttccgtcaatgctccgccgtcccattcggtgattttcgactgcaatt

SEQ ID NO: 14317 - DNA, 2719 bp, Heterodera glycines
tgcgaagatttgcttgctttgtcctcagacgattcgtacattggtaatttattcgttcaaattgcattttttaaatagtggtttgattggcgcgtaaaatcaatgatcatttcttttaaactttttgaatagttttgttttttagatgatacttctcattttcctctgtcccatgcaattcccaaagcggccatcagacgaatggctatcatcgacgtgtgcaatgttttgtacggctgtgcctttcacacaagcgcgggaaaggctttgaacgagtgaatatacgaaaggggggggggcatttgagaaaattcgcagggttttaggcgatgcgatgccacgggtcttattgtgatggcacggaatttgctcagggcgggcttcgatctcaaaatgttcgtgcccatttcttatacaaatgacaacaaaagggtgcacaacaaattcattatggaggtcagaaaggaaatgttatcatttgcatccaaaaattcaaaaggaactgcaaaaactcgattatcttacggttatcgacgatggctctcacgacgatttttttctgctcgaagtggcaaaatgcaacggaggctttgtgatatccaacgacaaattcagagaccaccgcgtgaggacggaagttccggacggacttcgccaaatcattgacaatcgcagcgtccccttctcttttcattatgtcccaattgacaaaatcggaaaaacaacgttggctgatcccgcaaaattgggctatttggaattggaattcactctcaaaccgccgaatatcagtgagtcatccaacaccaaaatccgataagaagggaaacaaacgcatattttgtattattttgcgaatttaaaaaatgcatgaaaatctatgagtccggatgaaaaaggatcagaaaatggagacatctaagaaaatttagtatcaaattaaattctatagtgaccgttaacttgggatagaaaaaacttgcaataaattgttcttgtgcatccaattaaatcaaataacgatcccaggattaacactttcccagttgatattcactgaaaataatttattatgacaaaaaaattttgaaaccctaaaggccaaactccctttggttattagcggcgggataacaactggaaaagtgtccgaagatttacccccattaccggatttatggcttggagtatctttttgaaaaaaacttaaattaaaaattataattttgctgggggaacaaaggtcgtggacatttgtccttttttcaggtgcaatgttttcactaagtccttccgacccctcttatggcatggtcttctcacaacgaattctcagaagtgagaaacgcgccctcgaaatgctggaaagattggatgtaatgtcggagtaccttttggtgagttatttgccaaaaaaccgcttaaatgtgagttttagcaattaatgtgcgaaaacctcggagtcaaacgctctctcaaacacttaaaaatgcccgaaatggaaagaatgccgatagagttcgaaagattttggcgtttttatgatttgcatcaaaaatgatttggtcattcatatttttaccaaaaatatctattgtttttgttttgttccggtgtattttacaaatagaaatataattgttttctctccctccttccactctcacacaactatttctccctctctctcatttctttgtcagttagcaaatcggacggtctcccgtgtctctgatttccactctgttcaaatgcacttccgcgtctccgaactgctcgcttttgtcgtgtactgccaccaatgaaaagtgtctcaattccgggtccaattggacgaccatccgctccatcctccattcttccaccttatcaaggagatcttcgatattgtggtgacgattggttgtctctcacttttggaccgattagcaatacataaaattcaataggcctcacctgaatcaactgcgctccattgatcaccgacatctatattgataaactcagcaaccgaactcgccgatgtttaattcgccgataaattattgaagaaaaccgaggaaaatattttctttattaattttaaaaaaataaccgaaaaatgttcattgaggaactaattggggtggccggaatctttataatacttttgtgatcattaagaccggatgggatattgtgagttatatttcacaatttgttaagatttttgggattttcacaaaaatgttcgagaaacaaaaactgcaataaactcactgaaggccaatgtttttcatttattctcaggaaattttttgcaaccaaaaattacattttttgttgcaaaacatgttaacaaatcgagccaaaattttatttcttccccggagacgccagccggcatagccaatctcaaatccttaattttaaaatgaaaattaggcataaaatatataaaattgtcatttttgtactctatataaaagtgccaaaagcggctttttggcaccggcaaaaatttacatatgtcagtttcattttcgattgttaatcccaaatatccatgataataataaatattctattaatgtaaagaaagtaaattctatagtttcaaaaaatatttagaaaaattatttaatattagaaaactatttaaaattttaaaagcacaaatcattaaaactaaattagcttcaaagtattctacaatgttaattcttgcagaaccgaaaca

SEQ ID NO: 14318 - DNA, 1906 bp, Heterodera glycines
  unsure (1)..(1906): unsure at all n locations
aatagaaatataattgttttctctccctccttccactctcacacaactatttctccctctctctcatttcttgntcagttagcaattcggacggtctcccgtgtctctgatttccactctgttcaaatgcacttccgcgtctccgaactgctcgcttttgtcgtgtactgccaccaatgaaaagtgtctcaattcggggtccaattggacgaccatccgctccatcctccgttcttccaccttatcaaggagttcgtcgttttgtgtgtgccgtttgtttgtctctcacttttggtcccattagcaattcgcagtatccaaatgccctcagggggtccgtctccactccatttggccccgttttttccattgatagcctcgcgacggtcttttgctgctcatcagggcaaatgtaaagacgagagccgaaggtggacagactcgcttcaagatgcatttccaattgttcgttggagggaaggcgaaagtgacgcgatttgagaatcgcacgacgcattccgcgggagaaacgcgcaacaattccttgacataattagcaactaattaattgcccaccaaatctaaggcccgaaaaaccttcgccggacggaggcaccacaaacggaacatcgccggcagcgagaaaaagggttttgaatttgcacaatccctcggaaccgaaagcgcagttcaacgcctgacaggccaattcagctgcggatgacaaagagcagaagccagagcgagcagctgagaagagagtggaaaagagagtgaatgtgagagaacagagagagagagagagagagaaaactgggagaatagagagagtggggagggagagagagagaactgggaatagagagagtggggagggagagagagaaaattgagagaatagagagagaagggggatagagagaatggggagggagagagagaaacggggatggagagagtggacggagggagagagaacgaaggatggagagaaagaggagggacagagagagagaactgggaatagagagagtggggacggagagagagaaaattgagagaatagagagacaagggggatagagagaatggggagggagagagagaaacggggatggagagagtggacggagggagagagaacgaaggatggagagaaagaggagggacagagagagagaactgggaatagagagagtggggacggagagagagaaaattgagagaatagagagacaagggggatagagagaatggggagggagagagagaaacggggatggagagagtggacggagggagagagaacgaaggatggagagaaagaggagggacagagagagagaactgggaatagagagagtggggagggagagagagaaaattgggagaatagagagagaagggggatagagagaatggggagggagagagagaaacgaggaatagagagagtggggagagggagagagaacgaagaataaaaagaaagaggagagagagagaaagagagaaccggggatggagagagcggacggagggagagagaaagaaggatggagagaaaggagagagaaacggggaataaagagaatggggagagcgagagaaagagagaaccggggatggagagagcggacgggggagagaaaacggatgatggagccttttgactgcttgtttaccgatgcttttgatcagaatgaaaggctcgtggagatcattttggctgattggcatagaattgttgcgttcggcgacaattcgaatgcgaaaggaatgggcggagttaagcgcgacggaccttcaaaaatcagagggattccttctttatttgggataagtttttaaaatttttgaattgatgaatgtccaagtgccattgtaaatcaccccccccccatcc

SEQ ID NO: 14319 - DNA, 2586 bp, Heterodera glycines
ttgcttttcccgttttcattttatgctggtattctttcattattttcttaagagaagaggacatatttctcagcgtgatgccaatgagatgatggatgattgcgaaattaccaattaccaaaaaattcatcaattatttttccaagtttatcaataaagaaatgattaacgcacaaatattcaaatttttttcacatgatcccctttcagccttgatgaagatcaaaactaaatttaggagtgcttttccttcttttgaaaaattagggttacgtgacaaacgcatatgggccaagcttttccaacaacgttaattggattgttatgaggagagttgacgatccaccactaggatagagccaactgcaaatctctctgtgctcattacgaaaaattgtcaacgtgcaatcctgtctcatggtgaattcacgaagaaaaaacaaaattgcaatcacatcaagaccattttggagtttgtgtctcaacatcttcaacaataaaatgcatttttaatggatttttaaaagagtaaaggacacattaaatccttttttttgaagctcacaacaaaatgaatccgttatctctctctctctctctctctctcaatttttctttgtttttttggtagcaatctcatcaacgtcaccatcatcatcatctttttcttttggcacatcactgtcattttttccagggcacttcttgaacaaattgacaatccaatcaaatccagtgtaagtctgactgttcgcctatgttgtggtttgtcaaatatgtaataaattgcaaaaaaaacaaccttaatgttgactttcgcaattatcttcacagcaatcaaatcgtccaaatgtttcgcaaggctctccggctccttctccttggcgagcaattcagcagctttcattcccaaaaactcttcggcaacactcgaaaacatggtgacacgttgagcaatgtctgcttgttcaacatcctgtagcagaagacggacaaacaccgtgtggatgggggcaatggctttttggccgcaagcctcacacatgttatcatcggacaattttcggcgacaaatgagccccttggaacggaatgggcatgcctaaaaacagaaaaattaataataatttaattaattaattaatttggactttgtaaacacggtactgcatatttgtcacttttcccaaaacataaaaaacgccggccgaattgaagttgaccacatcgctgatgtttttcggttcaacggaatccaactcttcttgctggcgtgttccttgctccgggagttgaaagcgtttaagagaattcattgcaggaagatcggaaaaaacgaaggaggatgtaattttttaaaaaatggaacacgaatgatttttatttagaaaaattgtggttaaatagcaaaaaaaaatggaggcggaaaaaagaaactaaaaagccaaaaagcggagtcgtattcttagcaaagcaaaacaaaaacaaatgggcgtgaccaacaagaaaaggggcggagtattttttactttccatgatgacgtcattttttttacaatttaatgaattggattttgctttcccagtggcataaaatggccaattggttagcacagtaagttggtatgggttcgagcccagccggaagaaaagggtttttttgctaatttacttaaagcttcggatatgatatatgcaataggcttgggtttattgattatttgtgtacagtccttacaataggttttgcctttttttttgggggggggctcaaataaaattatcgattaataaattttaacggaattttcatcataaagtcaacaaatatcccatacctttcaactgcccctgtggccaagtggttaagctcctcgcttccactctcaacggttcgagaccgcgaccatgtttttgattttccacaatttatcggaaatagtcgcgcagctctcgctcgtttaaattaattaattaaaatttaaattaattaaattctcgcgcacaagtccatccaataggtttcggttgaagggatcaaagatcatccaataggtatgggggggtcaaataaaattatcgattaataaatttaaaaaaacaaattaaattaaagtcgatttcattagtcagagaaatcatagaatgtactctctctctctctcgaggagaccatccaataggtttgggtttgtggaaggggatgtcagagaaaaaaagtagacacactcaaattatcgatcgaaaatcaatcgataatttgattgggaatattatctactttagtttagcatttctaaaaaattaattaaaaaagagtgattgatctttttggtataaaatgtgggatcagtttaagcctaaagttaagcctagcctaagccattgtacgagttgccttttctacgtgtttcattagatctattttacctattgtataataataataataatgtacttgtaggttttgctaccccccccccataaaaatgtgatggtcctggcaaaggaaagtacttttctaatggagttttaggagctgatcgtgaatctgacgtcaaaactgcaaaaatcgatgatttcatc

SEQ ID NO: 14320 - DNA, 1377 bp, Heterodera glycines
tcagtccagcgatcaaagttatttcataggacacacacccaattgaagagctttcatttgtttttcagcaaatacgctttaattagtctttgcttttgaaatttacctgaagatcagtgaggtgttttttcggctggcttatgacgcgcgaaagatgcgcagaaaagggagaggcaatggaaaaacaattggaaaaggaaagattggtggacgaatgatggcactcggcaaaacaaaagcaggcggggcccacagcgaggaggacaaaaagcaattcgggtggaagtattcctagaatgaataagtacggatttgtggagaagagccccgacatttgcggcccagccaaaatcggtttttgcggccaacggaacgccaaattatcattttttcaatttaattaaatgaaacgatatttagcattctgctggccgcaaaaatcccattttaatttgggccacaaatatcggaaaatggccctgatgaaatgggccgcaaatgtagggacacgattttgggaggagttataccatcgaagccaaagacggtggaaagttcgtaaatttcgtgacaaggattattctggtcggattcagtgcacgacattgagccaaaggcaattccaacgctaccggcaaaagccttaaggggtggcacttccaactttttaatggcattgtccactgataactgaaaagtaaaaacaacaaaatttaagtttaggacagaacataaataccaaaaacgtgcatttttcttgaattcgtaaaccgagcgcaatatgaacaaaacgagcattttgacgaaaaattttttgaaaaaagaaatctttgaccgtcgaacgcaagccagaagaatgtagccgaaaaatactaaaaattcaaaattagtaaaactaaagcagagactatttcggaatgtcaaattaatcaccaaaacccgaaaaaaaacacattaatacaaaagaaatactttattcggagggagtcggtgtcgacgagttcggcagagattgtgacgagtttattgcccaacgaaagaatatgcaacggaaagaccgactaaagaaagcacatttaagccatttccaatgaccgacttgtgcggcttttcttctgccggtgcttacacttttgtcaattgttctgacccaacatgaaactgttacgcccgactcattgtaagaattgtccaatttgaaagtggcggctgtgcattccaatgagaaaagcgaatgatgggttggaagaacggcgactgattcgccaattgcgcattcggtggggtcggaagactcaaacggaaaacaaatgttttaattttggattcgccattttaaacaagaaaagagaagagcatacagtgattaatttatta

SEQ ID NO: 14321 - DNA, 3390 bp, Heterodera glycines
gagtcgaagagtcgacaattgtttgctgaacaaatacttcgataaatttgttaatttataattcatttaccgtcattagagcatccgacatggaaagtcgaaaaaactcgagcagaaattttggttgtgggtaaaagagaaccaattgttcggcaatgtccagcagtgccgttacggtaagttgggaagcattcaatggacgatgtaaagtcaaaattattgtgaaaacatttggaataagctgaataaaaagtttaatttaaaataaaattgaaacagcaaaaaataaaaaataaaccttttcaagacgaacggaggtaaaaaagttgaaaggcgtgaaacaggaggaaacggaacgaaggccaagttccaattggtcgttcagtgattccaacgaaaggcaaaaacatttgaggcgttcaattaaaaaaagctgaaattagagaaaccaattgccaatgattaaatgcgaatctctcttcatagaattagtgacagggctgccaactctgctgatttatcagcattttgctgctttcagtggatcaatgctggttttttgatatgctgattttttggaaaatccttaaaatagccatttttatgtaaaactgttaccaaatcagctggcagccctgataatgacattcaaacgaacgaaactgggcaattacaatacctgcaacactcctaaactgggaggtgtccgttgcgttgtattcgctgctttctctttattttgccccgatttgttcggtactttctcctcatttttcagagagtgttctcctccctcagcaacctcttcactgatgttttcctcattttcggcaatgttttgcactgtttcttcgttgtttttctgtgttccaaaatgggtttctacgatagcaaatgaatgactcacgggttgaaaagaagaggaaatttgggtggagcaggcgaagaacaaatccctcaaaagtaccaaatgcacattagggtcactgccagaactgagcattcgctggaagttttcgtggagaattcgaagttttatctaagaataaatgtaaaattgtttgaatccatttactatttttggctataaaacaaaccgcatttcctttgatcagaatgacgattagacaggagagcaattgggccactttattcacttctttcgcttggcgtgccattgtcgccgtttgcaaaaaatcaacacaaacaacgaccaaagaaacgcaatcggcaaaaacccttttagaatgtgcagaaaattctgaaaagaatttttgagccaaacactcgcacaaaccgaccgacaattgactgcaactctctaaacatgacgaaataactgtggagactgccaaaaacattgtctgcggattggcctaataacacccaaatgtcagtgagggctgagcgaaagattggcgaataattgtcaagcaaaagagccatcaattggtggaactaaaagccaatcagagaaatggagagaaattcaaaaacgaagagaataaacatttctatttgaagaatggacctggtcattgtcggaagcacgaagaagtaacagacaaaaattgaaaaagggaccctgcaaaacaatgttttggatgactgagctgatgttggacgaaattgttgcaaataatttgtcaaattggcttttgttgattggagaagtcaattggagtgttaattgctccaattctttgataaattcgtttacattcgtagtcgaaattactcccaattccatttgggaattaacagattatctgaaaaaaaaaccttatgaatacctaacagcactgcaaatatgcaaaaccgataaaaatcgaatgcgagagaaaaatgggaatttgcaccaattgaaaaaattgattaaaaacagaaaactgttattcattaaaatataatttattacacttctccgtttgaattaaatgttaatttgggattagggattaggcaaatgcctaaaatttctgcgcactttgaagcacgaaaacccagttttccgcttggtttgggttttctacgaaaaacttttattgacttatttttgcctatttcggaatttttgtgcttaatgcctaggcggcgcttcaaattcgggtccgggttcggaattgatcgaaatggatgtcatattcgtgatcagcgactccaaatacccttggaaaaactcttttatcattaaaaaccaaaaatttttatgtggcctaaactgcacaagtaccaaaatttatttatcttttcttacgtataagaatttttatttaaaaattagttactgaaattttcataatatttaaatgcatgtcccgatcactatcaaggagtgataggaccaagttcctacttttttgatcagcaccaaaagttagcttattaggaattttctcagaatttttaacttctctcccaagttttttgcaccagggatggcacggaattccgacttccgaaaatttttggggcctcggaattccgacttccgaaatttttcataaaaagttggaatttttcggaattttttttgagtttttttaaaaaaaattagcaatttttgtaaaatttctgttaataaattgtattgaaattttgaaaatttttcccggcggcgcctatcgacccggccccgcggacccctccccccccccccagttcccctaatcttctttggataaagcgcgccgcaaaaaaaatgggtgtaacggtcccaaaaaaaattccaaaataatgtaaaattacattaaaatattttgaaaatcattaaaaaattttcaaataaatatattaaaaacagtttgaaatcattaaaatttagcctactaaatatttaaaaaattttaattatattcttttattttttgaaaaattccgagttccgacttccgacatttttggggtcggaattccgacttccgaaaagtttttgggcctcggacttccgacttccgaaaaatttttggccctcggaattccgacttccgaaattttttggtgcctcggaattccatccctgttttgcaccactgaaaatgggggagggttgattggtgcaaaaaaatcataaaaatcccaaaaagtagaaaaaagtcaaataaaaatgcatgttagaagcttaaacaaagccgtatttttaaagccatttcaaagctattttgagtcagcagaaataacaaaatttaaaaaaaaccttttccctcatataaatgccattttcatgtggtgtttgttaatgagtcggatcggggttttcggtagtaaaaatttctcatcttgattttcataaaaattctcgcacatctttaccggttaggtgctatgacgaagcgaaaaaagaatggatgtgagggttctgaagggaagtgccgtttctcaattaaattt

SEQ ID NO: 14322 - DNA, 2817 bp, Heterodera glycines
aacatcaaaaggaatgtctgtccgaatgttctcgcttctttaacggtcaaattaataatggattttgtacaacgcgttttgcaactcttcactcttgcgcttaatgtgattgcccgacgggggaacaaaagtgcggcactgaaacgggaacaaaaatattagttaaaatttttcagtttaagcttttgaaaatccatttaaatgaaagattttcataatttaattgatgaccaaccttccgctgctgttcgaccacctgacggtcaatttctgtgcttggaaactgaacggccgaaatgggcgaaggcggcgtttggctgggcccgtagaaatggagcagcacttgcatttgccttccatagatttcgtacggcggactcgcatcccatgagaccctttcgatgcgctcgacagaacagagttccttaacctgcaaaaaaaaaggaaaatcagaaatggttaactagacaaattcacgcaaaaagtgccttttctcccacttcctaccaaattcactgggacatgcgaaatttgaagagaaagttggagaagagaaacaagtcttctattgcatgtacatacagaacccccaatcgatcctggccgggtgcgctaagcccactcctcctcctccccagcccaaaatatcgccgcagaaatttaaaaagaaaatttttcaaagttagaaattttcaagaaaaaaatcgtagaaaattttttataagaaaatttcgatgaaaaaatcattgatattttttttttggaaaatttttcgaaaaaatcgctgaagtttttcaaaaatttttaatttaacttttcttataaaaaaattttctaagaatttttcctttaaaaatttgtttgaaattttttttataaatttcggcggcgatattttgtttcgtcccccctcctcatccccgccccaaatttagaaaactaaaaaattcaggaaaatttgtccagaggggagaagcgaacggccccgatttttctttaaaaaattctaagttaacaaatataaaaaaattctcggggggggggaaagcaattgaatccggcgacacatttcggcaccgacagattcccccaccccgcctatccattttcaggaaaaaaaataacaaagaatttaccttgcaacgcacgtacagtccaatcgccaccttttcaaaatcccttgggccaagcagttgcaaatggatcaaatgccacgggttgaccatacagctgagaatgtcggcgccgaatgtctgcacaaatgacagagccggctgtaacgcgcagtttgccttgtttgcaatgcatttagtcctaaaagtatttcgcccactcatttccttttgcttactctactaaatgctgactatcacaatgccattcttcgaaattagccatttacctttccaatttaatttgttgggcttagccaacaaattatgtttcaatgcgttggcgaacgaagttggaaaattgggcgacaaatgaatttgcaagcagaaaatgccggcaataaatgccaatgatttaataatcgtattttcaattaaataagtctatgcaaaatgtattccaattaagcggtttaataattatttatttttgctaaattacaaatccaacaactaattgacggacaaataacaaaatgaactccaaaatgatctcattgactcattttcattgtttgtgtgagccggtcaatccgggcatagaaatcacactgtccgtgccaggcacatttcgttgggagtgatcaccttaagagatcgcataattaatgaattattgtctcttattagttttacccttggggccgtcatatggcactttggcaatgccaatgccaaactcggcacatttcgagtcaatttcactgatttgctgaccaaactgggcactcaatgcctgccattcgctgttgttgctggcatgggaagaagcggaggcggcaatgacgaacatggcacggtgtaaatgaaaacaattaattacgcggtgccgaaacgcaacattttttccttttaagaggaaattgttggatatttcactggtgtatttcctctgaattttaaataattgaaggctggaagctgttgaattttgcaatatatgcatagacttaaccaattttttccaaaatatttgactacaaatgccaacatcggatatgccattctatggatggcatttttccgactaaaaacgtatttaagcaaaacgaataagctaatcccatcaaccaatcagcatcattaatttattattgcttttaattagttaataattaatcaacaacagcgaatggcaggcattgtatttaaagctaaaataaggaagattttgtccaatttttttcatattacttagaaataagaaaaccaaagtctttcattcactcatttgttcggcactttcttctggcgaattcattttaaactcaaaattcagccgatcaaaaaatttgtgtataatcattttagtgatttcttctgtttcacgggtgccacacttggacacactcttccgcggactgatcttttgccaaaaagcatcattcatattagtagggctgccaaaaatatgtacaaaaatatgtaaataaatttttaaaatggttattttcttgaaaaaggcacaaaatgccataaaaattatctaattagcagggaacggatttatatgtgctaaaaaacgccaaatctgtacatatatatgcgccaaaaatccccaaaatatgtgctaaaactcaaaaaaggctaaaatatgtgccaaaaatgaaaaatatttaatgttaattatacaattcaaatcggt

SEQ ID NO: 14323 - DNA, 939 bp, Heterodera glycines
  unsure (1)..(939): unsure at all n locations
atttcactcattttttccatttcnattattcccatttctctcattttctccatttcaattatcaccatttcncttattttnccactcctcctcttcattttcttcatcagcctttcgcttccgcttttgttcactccaaacttccattttctctctccgctcttcgtacactttttctctgcgtttttcgaattcaccgaacatcgacaaaggttcatccttaaattctgtgaaaattgctgccattttgcagtttattactaattattcgcctttttcttcccaattcttacccatttagccatgtctttgatccaactttcgtaagtttcgtttgtcagttgggcgtcgtccaaatcgtcgacaaaataatgcaccgacgacgaatgcttgaacgaaatgcttttgtggttgagcaactcaatttcgtcaacgataacctaaaaaaaattaaattgaaagcgaaagtaaagccgttaatgaacagttctaagatttgtgcttttttgataattggaaagagaggtcgacgtccaattttgtgaagggatccggccactaaaccgatttttgttgttgtttttaaaactgctttttcggggatttgaatttttaatggaatttgttaacaattttgttcaaaaaatgtctaaatttcacaattcgagcaaattagcgacattcttttttacttttcacgccacttaaatttaaaatatgcacaatttccttagccgaatcaatacaaaattcaaaaatgggttcccgggcggcgcctatcggcaccgccggatcgccccgcccccttccccaagtcttttggaaaaaacgcgccgcaaaaaacggcgcatattcggatcatccccttgcacaattctttttttaagaaaacgccgcaaaaagtggcgtgaggaaaaagatcgtagatttattgtatat

SEQ ID NO: 14324 - DNA, 1595 bp, Heterodera glycines
gaaatccgatcacatccttcaccaatttgtacatggtcaacatttcagtaacatgaagaaaaatgcctaaaaattattttattaaatatttttattactaaatatttaatagaaattcaataaatttttctaaaaacattttttattctaagttaattaataataattctatgttaattgccctattaaaaaagttaaaaaagaataatacaatttttttaacaatttttagaaaagcattttataaaaacgaacaattttggctacaatttcaaaaaaaaaagtgtacatttctaaatttgtcatagtaaaaatcattgtaaaaaggaaatgattgggtgtgatttaaagccaatatttttgcctgaaggatcggacaattaaccaattgtttcattctcggggtcttctcaccaattatggaatgtttttaccggatttcgattgcccttcattgaccgagccttatttttggcatttttttttttgctaaaactcaaattatgtcttaaaaagtgcaaaaaaagttctaaaaatgccataaaagtagaaaaaagtaaaacattttaattaaacaaaacttttaaaaaacaaaaagtcaaacaaaaatgcatgttagaagcttcaaacaaagtgtttacattttaaggcattcaaaatcagcaaaacaaataaataaattcgtttgacttaaattcgtagcccttttaataagtcataaaaatgtcgattaattaaatcattaaaaatttaataattcatttatttttgctcatctataattcaaagattaacaaaataaaaaatcggaaaaattagaaaagaaaaattaaatttattttctcttttgaactattccaaatttgtaattactttatccgttttctattactaaaaccaattatcgcagctgttaactttgacgtacatattggcaaatgttaaaaaattatttctccctaaattaatatatattaaattataactgtaatacatgggcatatgttataatggcatgcatatttttaatagattgttatttaatttgcctattttggcattttgaaattagatgattttataaaccgaaaattattattttttttttaatataatacacaaattttatccattcgaagccaatgaatacaataaacaaattaatcaaaattaatatttttgtggtgtaattggcacagttctcatccaattcgcttcggttgcttcagtgctatgccggcaccaaccggcggcggagtgccattgtttgccggccatttcagcctcaaatgtgccataaactgatgccgaagaactttgctgaagacgagacgaagaattggcggagcaattgactgaagacaaaatctaaaaaataaaattaaaataaatttaaaataaaataaaataaagataaaattacattagcattacggacaaattcgaccatttgccttgcggtccaatgcctccattcataatgcaaagttgacctaaattaatttcattataagaggaatattaaacataaatttaaaaaaagattttttaaatcaataaaaattgaaccatttaaaaaaaatattatttcaaaa

SEQ ID NO: 14325 - DNA, 1495 bp, Heterodera glycines
caatagaatttgggcatagccaactctactatgtataatcaaaaaaataataaataaaatgatatttacccaaattcctttttattacccgatcggttttttaggtcgaaacgttaaaatcaaaggcatcgataaaattacaattttttggtcaatttcagcttaagaatgctttttggtctgatttttaataacaaatatatatatatatatatatgtgtcaaaaatctttgaaattttatctattcacctcatttatcacctttgaacccaaaaaatgaattgggctaataaaaacaaatctggtcaaaaacgaatcagggtaaaaaagaattggccaaatctcttgcattagccactaattaactcaattaatttttagatcaacatttatttctttttctatttaacacctcaggcttcgttgttgcagcgctactcgagcattttttggatgaagtccaacaacgtcgacagcaacagaaagcctttttggctcattagctcctttaccaacggtcgaaacaaattggccattatttttctgctgctgaccattggccatttggccatcatttgacgaactttttggcttcaaaattgctttgaaaaatcgcaatcggacctaattgatggtaattaaaaatttaataatattttcatggtaatttaccgcctttttcgtgaaaataatcacagctgtcgagatgtaaatgagcaaatatgccacaatggtcagcaaattcaacgtcacataataagtgcgggtgcctgatttggcatatgccgaccaatcacagctcattccgtatgttccgaccgtataccaaacggcaacaaacctaatatgttttgataaaattacttttttggtgctagattgtttgtaaaaaacagttaaatttgtaaattctaaattttttattcaattttttacattttgcaatctattagagaacacctaaggctaccatggcataaaatgattcatcacttcttagtcaccaactaatttttatccactaaatacatatgaatgtagatataaaattagagattaaatcagtccgttaaatggaacctattaatttaattttttgagttatcttccatttttttgtttaaaagtttttaattttctgatttcattatgagggtgaggtggggtctgttgtttccccactcattgtgcccttcctggaatggcactaatagatgatcagctataaaacttgtatgtgtgttttaattctgaccatgaagcactgtttgtggccaaagattgagccaatgctaccgcccatacggccattccgattagccaacaagtgaactggcgccggagcatgcgaaattggagcgggaacccacacaggcaaaccgtgtgatcgcgatcaacaggttcatgtaacaaccagcaaaccacacagtatcccgccaaatgtgcatactgtatttccatgccgtcaacgggaccagcaacaatgacacaaaa

SEQ ID NO: 14326 - DNA, 2848 bp, Heterodera glycines
  unsure (1)..(2848): unsure at all n locations
aaaaggcctacaactagagccaggattcgggattcggtactgagtcgggtttttcgctctaaccaaaaaaaatcaatgaaaaagcttcaaaatttcccaaaaagtctttcctatttcagggcgttttccttcaaaataattgtaaggcggggtgcggaaaattcattttttttaaattattaacaaaaatttttccttgagtattttcgagttagtgcgaaaattgcgagtcaatatcaaatcccgattttccgggctctagcaataacatttgcaaatttcaacaaaagtgaaatacgaaataaacaaataataaaaactgagtattatttattatcattttaaatttgctattcatcagcgggattaaacacattaataaatgcgactataataataataatgaatgatagtgctgattcgatggtgatgacccagcacaaaacagataaagcacaactgaatcaattaaggaattttgcgtaattatgtaattaagagacagacatatgtaaaagtgataatattaataataattaagaataatgaggcggggaagggagggataaaaatgaatcgaactcattaacaatccatcaatctattaattaattagtctctctaattagtcctattattatcattgtcgcaattcgcgatgatgctcgcacataatgcggttcatccgtgaggcgaccgccgctgcaactgccgcgccacggccactgccgtcctcgctgagcaccaggacgaactgagggggaattggtgggggaaattaggggaaatattacggcaattgctgcaagcagcggaggttgaactccgctggtccaatttttcggtgctttgaatcctccaggatttggtaaaaaaaaattgaataattcaaacattgtcggcagcgcccacctttgcgcccaagaaatttttttttaatctttgtgttttaattctaagaaaaaaaatttcgaaaatttttttttttcttaaaatttcttattaaaaaacttactaaatttctttttaaaatttcagttagtaaatttaaaaaaaaatctggggagggggcaaaagtagagcacccgttcaaaacagtcgaatttttaccaaaaatgcttaaattttgcttcaaaagtattctcctacttaaatcaacaaaaaagggaggggctcttaaatattttaaattttaggacaaatgtggtttattggcatttaatagtcgaaaaatttaattcgccaaacgccggccaccaaatacggtatgctaccgtctctcaaaaatacagtaatctaccgtatcccctcacacgctcacttcatacttgccctccaccagctcgtcaattttgtggtccaacaggaatttgaaggtgggatggaaacggtagacggacccgtcgacgcccaccgttacggtgggccgtcccatgcgcttcagcagcgccgcaatgccacaggcgcagaagtgggcggcacgcgcgctgaccagcgaacacacgtaggccacgttggcacagtcggcgggcgtcgagttccaaatgcctgaaaaatttaaaaaatttaatttaagaaattcaagattttcaaaaaaaatttttttttaaatttttttttgtcaagttacccgaatgggagtggggtcaaaaaataaaccatggtaaacattggtagatgatcagaaatttttttttaaaaaacttatacgaaaaattaaaacaaatcgttttgtaaaatttccagcaatttttgggaataaattttccaaaactttttcttcttgaaattacactgtttgaaaatttaaaaaattcgggggaggggggggggcaaatttactaaatttttaaagaaaaaaaccagaaagtttttttataagaaaattctaagaaaaattttttttcatgaaattttcagattttttggaaaatttttgaaaaatcttaataattcaccaaagaaagtttcgaaattttttttatgattttcttataaaaaaactttgattttttccttaaaaaatttcgaagttagtaatttttttttaatttctcggggggggggggggaaacgatgcggggggaaacaacctgctcccattttctattagtctgcaaaaaattcccgtaatttcaaaaaatttaccaaaaaaaactgagttttttccccgaaaattttacggcacaacttttttgggatatttttttttcaattttatagactaattattaaacggccccattgaatgttatcaatttcaatggattaaaacaataaaatgtgcaccaatgtcctgcagcagctcctcaattttgtggaacgggttctcctcgtcgtcattttgcatttgcctgcagcaattagttaattattattattttttaaataattttatttaaaaaatacgtacaaaaatccaattacccctcaatgtcggacaccaatttggtcgggaagcagccgggctccgcaatttgtgaatggtcaccgctgaacaacaggccgcgcctcgtcaggtcctcgagcacaaggcggacaacttcaccctgggaaaaatggggtttttttgggctacgggccaaatttaatgctttttatggggaaaatcttaaaatgcattcattcgatgcagaaacattttctcaacaggtatgtaaaaatttgaagaaaatcttcgctccccccccccccctccgtatcgttcactctaccggattttttttaaatttttttttttttttgaaaaatttcagttttaaatttttcttttaaattttcgggtgtggggagacaacatagtgcaaccatttgttggttggttcccgnttttttgtgtgagaggagt

SEQ ID NO: 14327 - DNA, 721 bp, Heterodera glycines
gggggggggggggctgaaattttttaggttttcaaaatctctttgaaaattgcttacaaaaaattgagcaaaaataaagttttcattaaaaaaaaatttttatgggggggggggggaatttttaaaaatgaatttaattgaaataatttaaaaaataattcgtttaccggtgccaacaatgaccccaatgtagcagtacttttcgatgaatgagcaggccaacattgtgccggtggtgtcgttcagcaccgccaccacgtcaatgtccacgtcgccacggcgctggcacgcctcgagcaacagttgcacaacatcctcaccaaccacgccggaggccttggggggttgaaatttttaaatattttcaccaaatttccatactgcttgtggtggatgggttgcattactttcccgcaacccccggaaaaattttgctaaaaattttcaaacatttttttatcatcaaataaaaatttatgaaaaaacttgttaatttcatcataaaattttgaaaaaagcgctttaaaaatgtttaagtttgaaataaaaatatatataaaagttgtgttgtaccggttgtcaatgaatggtagcttttttgaattcaaaatttgggataaattgattgatcctctacaaatcggtatttttttgaaaattacactaaaaaaatacaaaagatatttttagtcaccaccaaacaagtttttgtaacttttaa

SEQ ID NO: 14328 - DNA, 3101 bp, Heterodera glycines
gggtgcatttttcgtttttattgcatttttgttaataatcaattttcaaattgcatcaaattttcaaaattttccacgcggaccccccccccattttctctgtccacgtcccacccctgtgaggtgtagatattcttcaattttaccaatcctagctctgtttatgaacagtctgtatctttgttaggttcattttttagttctacaatattgtcttaatgtggtggtttcacgaaattccaacaccaccgcccccgcaatttcttccaacccaacaaggccgactgaaaatgcgctaccaagggcacgattactacaaaaaatttgaaggagccaatgggcaggtgtactggaactgcgtccgttttccgcagaggttgggcgcgtgcaaaggcaaggcacaggtggtgaacggaattgtacggcaacgaatccgcacaaccatccgcctaacaatcatccgcctgccgaggaatgtaagtcggaagaatgagtaatagtaaactttggatataatttggccaatttttaggacccaaaatgtgacaacacacaagaaacggtggaccgtacgcaaccaaagaactgagcacggaatttccctaaaaatggcattgatcagtcatccccccaattgttatttgtgatcggataattgaaagcgcaaaataaactttaattcacccatccacttcgttgttagacataccaaagttgacccatccctttacatgaacagacatccttcgtaaaatttgtcgtcgaccccccccccctatttaaagtatgtactcggatgtgttcgcatacgaaggattgagttgacccttacctggttggtctacccctttccccaggttttttgaaaaagttcgccacacaaaaatgcggtggggatcgagttgaacaatttttggttaaaaataaatttgaattttcaacttcttgttcgaatttgggtccggggttcgaaatggatgcggatttgtgatcagcgattcccgaaaacccttggaagcatgcttcgtgaaatggaccgggacgggagtcccggcaaaatccggccgggatcccggttcgtccgggctctaataattattaccaagttttgcgctctagatacgaatgagccgaaaattttcagaatacctctaagaacgaaaaaaaatctcaaaaattttagtgcctcttcgaagatttttgtgtctatttaaattttaaaaccaattttgcgattttttgcctaagaaagggaattgaaagtgggacttggcgcccagatggcggcgctcgagtcgcgccggtccacgcttaaatgatgtgaaaagattcacatttactaacgtgaggatagaatttttgtgtacttgaatctcactaatttcccccgataagtacttggaaagtgacttgctatataatcgagagaaagccccgccttagaccgattttttttaattttaaacgttcttagaagctacaaatcgttctaaaaatactattaatttgatttttagaccgaaataagcgtgaatgaaccgaataacctaaacgggaaataccgtaattattaactttttacactggtagagccctttttgtcaatttgaccataatgaatgatctgctgaagatttgagtttactggagcataaaatagtatagattctgtgtgtaaaactgatcaatcaatacaaaagcaaaaaatgcgatcttttgatcactgggaatgattcaaatgttgcataacttcggggaacgtctgttggatgaacaaaattcccgcttgacaccgctgatggggctttgcaatttcgatggtagtggccagagtaatctgatttataatatttttgatggtaaaataaattatctttccggaaaaaaatatacataaaccgggccggacagtcacaaatgtagcaatttaaacaaaataataactaaaaaacaacttgccatggccttctcctctacagattcttgagactgttttcctttgatggcattctgcaaaaggaaaaatgagcaataaataaatttggtatcgaatggcactacgttcccatctcaaggtgagagtgggcacaaagtgaaaaattttgctaaaaatcgcaaaaattggtctttttggacaaaatctgctaaaaaccgcactcaaattcaaaaatttccctgtcggtgcctatcggtaccgcaaaacctccccactggagtacatttttcactgttttttcaagaaaaaatcttatattcccgcctttttcacctgcaaaattccgttgaaataattggcaaatgcatttgcgctgttcatctcgccaaggtcctcggcagggatcagattgatgaaatagctgaggaactgcttgatctggaagattctgtaggcggtcttggcctgcattcccggcacttggaagcagagtttgtagatggggtcgttgttgtacgcaacagtcaattggcccatcactgaaaaaatattttggggcttaaaattttcaaaaaattcaatctccatataaattatttttaattgtttgtcggggcaaatgacgtctgaaagtgtcccctaactcccaatagcaacaaaaagcccaaccttgcgtgaagtagccgatctctcccgaccgaaccgtctgctgttgttgcaccaaaaatgacaaattttttgcgacctgtgccgcctgctgttgtttctgaagctgcaacagttgcagttgtcgcagttgcaatgcgttggagaagtgcgccatgtcagtggccgtgccgaaaggcggctgctgagacgtgccaggaactgcggcagtgccatccatggtcaaaggggatggcattggcagcggcaaaagttgacggggcagtctttcgctctcgtactccttccacgcctcctctcgttcctcaaacaaaaaaacatttaatattatgaaaaaatataaggcaaagccttttcaaatttcattttcccgatttgtcactccattgtaacagtttgaataaacaaatacctctgaagtaagctgttcctcctcaataatcgtcaacagaaggtcatgcgtgtggtaactcgtctacgaagaattccaatacaaaaa

SEQ ID NO: 14329 - DNA, 584 bp, Heterodera glycines
aatgccaagagatccagcacgagttgagatcagcagcagacgttttctgaaaaagtattcacttaaataaattgaaaatttaaatgaactcaccgcaaattcaaagggtcgttaaattcccgttgaattctaaaacaacagaaaataattaaacggagagtgggtcgaacgaattctgtcgttttacctatctctgtctttggatgaaacagacccttcgatgacgtcatagtcatgtcctaaaatggtgaaatgtcatttttatgcaatttgagatattgtcgtctttgggcttggtgtctttgtgaaaagaagtgactgactcattttccacgaccaccgttcgccctgtcgcatcagtgcgtcgtgtccgtccacaaaccatttgccattgtcagcgtaaaaggcgagcattcggcgaatgagtgcaattgagttgagaaattgggagaacacgagcctagaataaaaaaagaagcttattttacattttaaaagtttaattttatatgggtttttgtgctcacagtttgtctccgatggcctcgcattttttgataatttccatcaacaaaatcagtttg

SEQ ID NO: 14330 - DNA, 1684 bp, Heterodera glycines
gaaaatgcgttttactgcaacgaagcagcaagagttacaaaaaattaaatcaaaataaaataaatatggtaatttttaatccattaaaatgaaaatgaattatctcactggaaatcaaatgaattattacatctttgtatgacttaagtaatttaaaaaaaattatgttcattagaaatattttaattaatatgtttattttaatcaattttatctttaaataaaaaataatactagaaaattccagtaatgtgttaataattttaatagcattcttcttatattccatcttttagccgttaatttgaatttgtataagaaaaaatgatgcaataaataaaaaatgaagcaatatctaaatatatttaaaaattccaacttttgaaaattttgaatctaattgatttattaatttatttcgtattggaaactcaaatttaaaaaataatatattctaataaacataaaaattaatttgaagtcaaaattaaatactttttaaaaagtctgattgtttattattaagtaatttgaaatatgaggccaaaataaacaaaataaaactaggagcaagttccttgatcaataaaataggtctacttttaaaaaataaaatcaatttttgacgattttccccgcaaattttgttttttgtttttgaactttgcttcaattacatattattaatccaacttttatgaaattaaaaaaaaaatatttcgttaataatgtatttcttaataatttattggattttttatgttattattttattagcggttcccactcaattcactaacgaataatttataacaaaatctcagtttaaattaaatacaatttttacaaaagtttgattgtttgtattaaatcaaaatagaaaaatattataagttgtgatgtgaaaattcttaaatcagacaaggaataataaaataaaaaataaaaatcattttttcatttttttaattgtattaaattgcttttctttattggacttttaactttttatttctatgttctgctgaagttttttattttaaaacaaaatacatctatcatcgatctactttatagttaaattatatcttattcaaattaaattttaaagaattgtatgcaatttatgaaataaaattatgttaattatataaaaagttgaaattttaaataattttattcatttattttacttaatattaaaaagtacaaattaaaccatatttgaatctaatttaattaaattattttttatgtcccaaaaatatctccaattttgcagcatttcatatactgtgaaaatttgtttgaaaatattaatacagcaataatattattatatcaaataaaatgtaagttttgtaaattagatattttataaagaaaagataaataaatcaatattttaaattttaatttttttaatatgttttagtttaccagaaattattattttccttatataatttttttttatttaatgtataaattttagagccccattttttcctaactgaaaaaaaactaaataaataattaaaattatacttatatgaaaaacagaggaaaaagctaccaaagattttaaatctctctgtattaacaaattaagaacaaaaaaaaagccaataatagcaataacaaaaaaaaaggatttgtaaataaaaactaattaaaaaccgac

SEQ ID NO: 14331 - DNA, 1819 bp, Heterodera glycines
tctatctgtttgtcgatgtccttgacgaacgcggccattaaagcagctctgtcgtagacgttccaagacgcccaaactggaccgcatacgagtggtctccggacagagttgagaaatcagtcgattccatcgaaagtgtgaggagtcgactacctaaaatattttgatttttttcattgctgcttggttaaaacatacgtattgtatttgaagacctgctcaagaaggaaatgtgttggggctcaaaagacacaaaaccgagcctttgttcagcttgcgtgagaccaatgaacgttttggctacgtacgacagccaagcctgcatacccagtggcgccatttctgttgttaaagcaaacgctctgcgcacgtgcatgggtggcagaagtgtcaatgtcaaaactttcctaaaaagaaaaaccaaccaaaattcgtgtgaaatttttaaaaggtacctgaaagtccggtggacattcttcctttcctcttccgcttcctcatcattcccattgaataggttgaaaatccctaacgatttcgcctttctaaacagacactgcgcccagtggaaattgcatccgctctgcaaagcctccggaaagacttcacgcgcggctctcatcatgctcctttcgaagtcgctgattactagataagggggggggggtgaggagtacaaaagaattaagcgtaaatttttgcgggagcagatgcgacggcgttcctgatggcactgagcgcttctcgatagaatcgactgtttttccctgggagtagcgcttgtgcacagaccaccatccgtttgtcaacgtacgctccaacgatgaagacttgcgtccattgtgtgggagctgaacgaaaagtcccgtccaaactccaacggcgattacgtctcaatacgtcgagaagctacaaacaaacaaaaataaataaagaaaattttaaacaaaaaacttttgaatggctgaacaccataacaacatcctcctcgtttactcgcgccgtccgactgtcgtatatcagtattgattcaccgtccttattcaataactctggcgcgaatcgaatttcgagcggatttgctcggtttacatttcagactagcttgtttttgactctaaagttacaaattattgaaattttccattggttgtatcaatgaccgaactttgaaccatcctgtctaacgcatcatttgtgcccaactggtcaaacgtctcatctgccgttcctgctctgacttgtgctcgcatttgagatggcctcaattgcggattcacctcgatggcttgcttgatctgtgcccttcccgcgtctgctgattgttgggtaaatacaacgcaatgattgtgttcctttgagcccaaacgaccagtcaaatgttgctcatcatcaaggcggacggtagcttgacatgtcttctgacaacagctgaaccaaatgcacttcttttgacaaatttgtaccctaaaattgggagtaaataagcgaatgctctaaattactgactgacctctctgccaaagatacagtgcccctttttgcgttgtccctcgttcaaatttcactggctcagtgttctcttcgtcgctgaatgcgctcgcatctgaatcggctgtggcagcggctcgcatttctgcctcccgcgcgtccgctatctcatcagctacaatgctatcgtcggttaatgccatgcgtggtttcttcaaattcatgttcctttcaagctgttcacgacgactcattttaacaaaaaaaaatggctcgttgctaaattcatgacataaatgttcggtgaatgatttttataaaacaaaac

SEQ ID NO: 14332 - DNA, 827 bp, Heterodera glycines
  unsure (1)..(827): unsure at all n locations
cgggattttgtcgggccgggattttgtcgggcgggattttgtcggggcgggattttgtcggcacacgtattttttttatttaataaggaatcaaaataaactagaaatttaataaaatttatattaaaatcatttaaaaaaataaagaaaatccgttaaataaaaaagtataatgagaaaaagtaataaccgaagctctacctaaaagtaaaagagagttaaaaaaggtaaaccaaaaggattaattttttctaaacataaaggagttgaaaaaaacctaaatccatattagttaccaaagctaaatcaaaaaaaaatcaaaaaaactaaaaaaaaaatataatttcactaaaaagaaaaagtaaaaaaccaaacttaaaactatcaatagaaaaaaaaagaatgaaaaccaactaaagcctcaataaaaaccagaaaaaatcatttaaaaaaataaaaaataattataaaaaaaaattaaatttaaaaaaaattaataaactagaaaagaaaaataataataataaactaaaaaaagggtataaatgaattagataaattaaatcaaaagctataaaaaaccagtaaaaaaactccgaaatatcaattcagtataattatattttaaaaataacaaaataatatgtgtttaactaaaaaatgaaagaaattaaggaaagatatctctctaaanctgattacaatagtaaattattcaaattaaatataaaataaatgtgctgttaaaggatattaaagttaataattaaaaaatgttgaactatgttgggggttcaaatttagtttaaaataattattttctgttt

SEQ ID NO: 14333 - DNA, 1545 bp, Heterodera glycines
  unsure (1)..(1545): unsure at all n locations
ggtaatttctgaaaaattttggctaatttctatcaaaattcataaaaattcttaaaattttcnccgtcggcgtttatcggcaccgccggcccccaaaaaacctattattttcttaaaaaattacccaaaaatccctaaattttggttatttttagacaaaatctgtgtaaatttatgtcaaaataaatagaatctaggcgatcaacgaatatgcatttgccggatttatggacaatctttatcgagaatacaagaagaatggaaaaattggtgagtttattgcaaattcaaaaattattattatgtttaatatttattcttttaaaatatatcctaataaattgaaaacttaattttttaaattattttaattgtcagcatatagcaattaaatcttttataatcaaggcctggatttatatttattaaaaaatgctagttatatgtaaatatatatgtgcccaaaagtccaaacatttggcgaatttctggacgatctttttcgagaatacaagaagaatggaaaaatggatgagtttattacaaatccaaaaatatttattatgtttaatatttattgcctggatttatatttgttaaaaaatgctaaatatgggtaaatatcggactcgctcagttgggccggcacggttgggtcgcagcaatgcttttccttttccactatagcttttttctttgtaatccaaatccaacattgttggtatcattcgaaagctcttcacatgctctattagccttacaaaaagcgaaaagattttcaagcctggaaaacattttattaagaaaaaactttttcgcaattttcatgtataacttttttggaaattgtctaatcgcgaagcaatagcttagaaaaagcttttaaatatattaaggtttcgactcacagatttttcaatactatcctatatttcccaatttttcaaaaacatgaaatcgaaatttttctttgttctaatttttcccgcttttcctcggcttttccatttttgaagggatttcgtcatacaaatggactcatccaattcggccaaaaatgtaaaaaacgtttgcaaaatttatggacaatctttttcgagaatacaagaagaatggaaaaatggatgagtttattacaaatccaaaaatatttattatgtttaatatttattgcctggatttatatttgttaaaaaatgctaaatatgggtaaatatcggactcgctcagttgggccggcacggttgggtcgcagcaatgcttttccttttccactatagcttttttctttgtaatccaaatccaacattgttggtatcattcgaaagctcttcacatgctctattagccttacaaaaagcgaaaagattttcaagcctggaaaacattttattaagaaaaaactttttcgcaattttcatgtataacttttttggaaattgtctaatcgcgaagcaatagcttagaaaagcttttanatatattaaggtttcgactcacagatttttcaatactatcctatattntcccatttttcaaaaacat

SEQ ID NO: 14334 - DNA, 1123 bp, Heterodera glycines
cgatgccgaagaatccgtgaaaagtgaaggattgagtccctgtgatttgaatgcataaaaactgagtcccggtgattgaaatgttggtgtgttgagtcccaatgatcggaatgcataaaaactgagtccgggtgattggaatgatggagaattgagtcccagtgattggaatgctggtaagttgagttccaatgactggaatgctggtggattgagtcccagtgattggaatgcataaaaactgagtcccagtgattgaaaggcaggagatttgagtaccagtgattgaaatctggtgggttgagtcccgacgattggagaaaaagcaaaaaaaggatgcgaggccgcgaagcggccgagccagtcgattttatcaaacataatcttacaatacaatcgtattacctagcgggggatgcgccgaaggcgctgaccccgctagtttataaaataaatagcaaaataaaaaattagttttgtattattttcacttggaatttttttgaattttctctctctctctctcttgatctcttgccctctctctcttgctctctctctctcttttgatctcttgccctctctcttgctctctctctctcttgctctctctctctccgtttctccttctcatcctttctctctgacattctctctaactctcttttttccattctctttttctctgttttcccgtcttcctttctttcttcttttgccattttgccagcgcattatttcccatcaacatatgtgggtagaattgtttgtgtgttgggctgttttgcttgcatttattccctttttataaatgaaggatcaatcatatgtacatattcgccgttttattgcctttttatgtgtaatcagcacgactatccattaattgtttgaaaaaaaatcattaagaaaacccgggtattttatattaaaatctattaaaaatttaaatttatgaaggaagggctgccaactgaaagtttacaaaagcctcaattgggctcaaaaaaaaaaccagtaaaaaatcattcaaaatattttttggtaatactggggtttgttcccccccttttttggcaaaaatgtcaaatttttaaaagtcacgtaaaacattttttctggg

SEQ ID NO: 14335 - DNA, 1211 bp, Heterodera glycines
tctagagtcaaatttgcttaacactttgttaaacggcaaaatgcagccctattctgcgcctgtcaacaatgactgctccaacgaccccgacgcgtacttgcgaccgtcggccgactttaagccgtggtacccgagcttcaggaacactgtgtaaacaaaaaaatatttattttttagtctttttgaactttcctattgaatttcttctctttttccgaattattaccgggactttgatgactttgagcaaaaagacaattcgattaagcgactctttcgaatttcacccaaaaattctcattaaaaatggttttagcatcactaatgaacgtcgtccggggcgttacacgaagagagaaaagcggcaaatccgtgccagccttttgccggtgctgccgaatccggacgacgggtgagtggcggggcgatggctgggcaatggactcgttttcgatttttgggtcactttttacccatcagtagtggaacctttattttggcatttcctgaaataaaacaaattctggggtataactgcacaagagcctctggtgtcctgctccccaagccccaaaatgcctcaatccgggaactcgtcataatttttaaaacgcatttcattaaagcaaagactacgttttgggcggaaagtatgccaaaacgccggcgcaagtggacgccgaatttgcggagcagctgaagttagagaaggccatgcgggaagaggagaagtgccggatgggaggaatcgtcgacacttccgccgccgcttcgtcgagcgccgaagaaagttcctccgaagggaacggaggcggcggcgccggaaggggtcgcggcgctgcgccgggcgtgcgcctttcgtacggcggaatgcgtggcattgcccgagggcacagcggtttttcgagacaatggaaggcaccgacggagcggacggattgaagtcgagaagaaacaacgaacaattgatgaagaatgtcacttatgcaatttgttgccttgcttatgatccttttttgccattcatttgaattttatttgccgggggacggattcacacttataaaatgtcatagtattcagcttgatgaagtttaactcttttttacacattaaattcaatttaaaatctgcatcgattgatttagaaggttttttgtaaaaaataaggcaaagctcaataaaaagtaaaatgctgactaaaatacaaa

SEQ ID NO: 14336 - DNA, 1566 bp, Heterodera glycines
tcgcaaatttggttatttttttttactcagtctattaacatatcacaattaaatttccaaaattttgtacccctccttttctccaaaagtttttgaaaaattacaccacaaaaaagtggtgtgaaaggcaaaaaaaaaatttggtcatcgatttaggcaagtaaaaatgagactggagtcccttcgcactttttgggttacccccccccccctccctctttttaagcaccaccgaaccaaaaagacaagacattgattaatttgatctatcaaactgaatatgttaaaatgattttgcatgaattggttggtgttttttttaaatttttcacatgcctaagaccctaatgaatattcaaagaactaacatctctgctgggctaaagccaaccccacatttggcagcctttgttttgcgtaatttacccgctaaactttcacgggcactccgattaaaacgatccaaccgccgcaactttttaaacggtttttcttttatttgtacaattcaatttgtgaaccaaagatgaaattattgtacaaaatatcctctttttctttcactctcttctcactgtttattgctgtgccctttttaaacattgttttgcccgcgttgaaataaatgcgttttattgggtcaaacggacaaaaaaagaaggggcgactgatctgaacggacaaagtgtaatcgtaaagttgggcacaatttacgccaaaatttaattggaaacaaaaaaaatggaaaaataaatattcattttgttccaatttgaaatattttacatttttgtgacgttctgagaccatctcgggagcagtttcttcaaatagaaaaatgagcaaatgcgggggagggaggccatcaaaattgatcgacggacggacggacagtcaccggattttctcatgcacatccgtccgcccacatattaaacgcatgtccaaagatcatgatcggatcgccctctcttgggcaaaaacaaaaaaattccccgattggtcgaggtgaaaaccaatgtacaatttcctattttagccaattccatttttgtatatcaattagaaccgaaacaacaaacattgtaataattaatgattaattagttaatgagtgagtgagtgaagtccgtgtcaaacaggaaaatgtgatcagaacaacagaaaaaagcgaggagaaagcgggggaggagggagaaggattgaatggaggaaaaagaaatggacgaaatgaattattatggcgaaattgaggggaaaaaatgcggggaaaagggaggaggggagggaatgtctgctgaaatatgatgggtttttgagtggagcaaccaacagctgaagcagcaacaagcgaagaattgtgcggggggggggggggggagacgggagaccgggctggcccatcgccaagttggactcgggcacaaacgactgcctttgcttatttgttagctaattgtggttagggtgcggtggaatggagtgaaacaaacgcaatgttgttcatgaaaattctattgccttcattaacgggaaaatgccaggggggacatgccaacaatgcca

SEQ ID NO: 14337 - DNA, 2634 bp, Heterodera glycines
  unsure (1)..(2634): unsure at all n locations
tgcaggtnnctgctgggcaanagtgagtggatgagtgtnngtgtgtcgagccttcaccatgtggcggccaaacattttttttaaaaatgctggccaattttcaatttttcattattttttttaatttgatccttaattagtgggtttgttaaatatatgtacctacacttgaatgctgctggatgcctttaaacccataatcagaacttttctatgacagccatacaataaaacacatttccctggggcttttcagggtttctgatcacggacatgacatcctctttcattcaattctgaatcccccggatacgaacaaatagtcgaagtctttttcccaaaattcacatttatattcatttctgtatagaatgaccattggtgtcaagcgattgaacaattcgccaaaaaactacagcttggaaaccacgaaaaactcagattttttaaatttttagtgagtggggcggcaactaatggattatctatcccctcttctttcttaaaaaaacactaataatccatgaaatttacactcgtttaaaattactccaaccaatgtgtttcaaaaaaaaacaggaactcccactccgcggccaccttctcgaggggtcggcgcccggtttcaatcgccgctggctgaagaaccgccggatgccacagtggcggcaaccactgatcacacgactactgtaccttcattaccagctactgtatcggagtccactgcagcattacaggtccattcattttacatttttaaactgaattttaatacaaaattttgaaattaatttccttttactcattttcaaccagttaaaagttttgtaatttcataatcatttttaacaaattttgattatttattttttataatttcatctaaaagagatttataattagcacaaattcgaatttaaaatatttcaaaaaatccatccaattttcaacaaaaggttcccgtgttggcctcgtcggtggtccgtcggcaacgcactcaaatggaagtgccgcgcgtggtggagcagcgcggggcgcccttcttcaccttctcgctgcggccacggctcatccagaagaacaatccgtgcaaactgttgtgcacagtgacgggaaatccgccgccaaaggcactgaaaatagggccagccacaaggaatggcataaataattattatgccgagagaaatttggccaacattttatttttatacgaatccaaaatttgagctaatgagattatttggacgagactcattctcggcacaatgaaattggcggattaatgaatgaatgaatggcctcactcgtaaactgatctgctcataaatctcagattgaatggttgaaagatgggcaaccggtggacgaagagcgcgtgcaaacattgtacaaaagtggcgtcgcctcattggaaatattcaacacgcggccacaagtccgtaaatgctttttcaatttggtcaacatggacaatcaaaatattcttctatcctgatttttataatagtattcaaattaatgctttaatcgtttatggctgatctttgttggcaaaaaccttaacaaaaaaaattttattagaaatttcaagaaataaaatttttgaaaactttttctagcgttttttttaaatttttataatgaataatcatttttttctttaaattttattttaaaaaaatttctaaaaaatatttgcttgtaatttctttttgaaaattttattatttttcggagtggcggggcggcatttaaatgacaaatcccaaaaattatacatttcaaaaacaatttgaacaggacgccggcgtatacacgtgtgtggccagcaacgagttgggccaagacgaaacgtccgcaccggtggcggtggagacgcgacagtccagcaccggctacctgcagcagtcgcatcagtccgctgcgcatgccatcctggccaggtcggcacgccgttcctgcacccgagcagcggcagcgacgacggcacgacgggcacaaacaccgggcgctgtgcccgagcgagacgtcggcatgccgaggcggagcagcgaaaagtgcgtaaacataattaaacaaattttttttccgccaagaaaattttttctaaagcctaaatagaggccatagatttaacccataaattaacaatctctgatttaaaaatcagtcagttttctttgataggctataattaatggacacaaaatttattaattatttccaaaataactgtcaaaaaaaccagaaaacttttgcctcttagcctttcaaaattttgatttcaaaaatttaattttcgctttgtttcatcattttatgtgtatgtgtttgtttggtggtgttgcaggtacgcctcgttgttcccggcttcgtccacatcagacattgccagtgcgctttcaagtgccgaccaaggacggcaaagctctgtcgacgaagattccagggaatggcgatcggcaagcgtcgccagtgacagcagcacatccaaatagtcgcctggttgttgatcagtctgatcagtgtcaagaaaaacgaaattcaagaagcaaaaaatgatcgcttttcagttaaaccatatatcaaaaaggtcattttaggaacaattcgcatttaatcacattt

SEQ ID NO: 14338 - DNA, 1079 bp, Heterodera glycines
tttttgcatttttaaatcaaacttttttgaaatgttaagtttttattaaaataaaaattcataagtgaaagtggtgaaaatagaaacacaataaacaaaaatgcgtgtgataataaacaagatggggacaaactttgggtgaaaaggcaaacaatcaacaaaatgagttgtccgtaaataaataagaaaacatcatggcacatcttgcggaacgcgcaaactttcatcagattcggcaacgaactgaaaagaattggggagaaatgaaataaaaaaaacaaaattagaattttctcttctttctcgcctgattgatcctcacacaactcggcgtcccagtggccagcagcagctgtgtgccacggcttctgcaatcggtggccaacttgtgcagaagggcaaagtttggctgcgcagaagcaccggcaatggagaaaggcctaaaaacatttggctaattgtttttgtttgcttattgtttcaattataaatttaaaatgttcccctactcaataatgagcacactgtagattggcttcgtactggcccgttcatcagggaagagttcataggcaaaacacgaatcattgaaactgaaaaaacaaaaatgaatttttttaatagattatttattttattgttaatccaaaataaccataacccaattttgcaaatttctggtgccaaatatagaaaaatattaataaaagtccatctgtttgccaataaaattagccattattatgtagtaaaaattgcaaattcatttggcttcatcactctctctctctcacctacgcgtcgttgtcgtcggttgtcgattgttttggcggcgtcgcttttgcagcagcgcttcacgtcgcagtgcgtacacgcgccagctgtccaagtagtgcaatgaacgcagcgatggccaccaccggggacgacagatgttccacggctcgttgtgctgtcggcggacatcgcgcagcaaaaattgttcattctacaaaatgagaagacgaaagtttgcatatatgtataatacatttttataggtccgtaaccagagaaaaatttcggggggggggaatccg

SEQ ID NO: 14339 - DNA, 1952 bp, Heterodera glycines
ctaatgcctatttttgtgattattttgttatttgttctttctgagtagaattttgaaaaaattccttaaaaaaaacgcacaaataatgaaaatatacccatagaacaaccccgaaaaaatttcaggaaatacaccttagaattgaaaattttctcaaaaatttattccctaacaatgagtttttttcttgtcaaaaaattaaaaattgtctatattcgaaaaaaggttcggaatattaaagtatttcgcttacaaatcaaatatgtttaaccaaaatttctccaaagtttcctaaaaaacattctttatataaatttaattaattcctgatatcatccgatagatctaagtgttctctattagactgcaaaatttaaaaaaattccgttacttttattaagttatggccagaggaactcataaaaaccagcttttcgaacatttttagtcataactttttgttaaagtatgtgggaaatggttttaattttggcaagataataaagaacatatagagctactgattgctatttaaaattaaaaatttggtaatttttagcaaagtttaagcaaaaatctttttattttatttgatgctttttacaggaggagggggcgggggcggcgctgaatttagttcaattttgggatgagttgaagtgttacgggtgaaatgatggcattggagagcaactacttccttttataggaccaccctttgccccgcggggaagcggcgccaattttcggtggttttgtgcgtttgaaggacaccggatttgggggaggggagagcaggagtggatattcggcgaattgtgcgcgaataaacggcggggagtgtgcacacccccaggggtgaggggggggggcgggtgggtgctgctccgattgggcattttgtgccctgtccgctgatcggagtacgtcatcaccggctggtgatcgctggctgatcagctgccgcggaacgtgtgatcagtacaaatgaaaggcgaacacatttaaatcagggattttttttgctcgtcgcatgaaaggggtggaaataatcaaaagtgatcaaacggtcacgggattaatcctccggtcttgcgccatgcattattaccaatgatggttcatcctaattttgaaaacgatgatgatgaatttatgttccctgtttttgcgatttgttggcgcagaggtaatttgcattcatttgcgcgacagttgatcagtcactattcggcgaatacaccaaccaaaacagcaaccccgaacaatcgctgcctctgaggtaactttttaattttataaattcaatttttagtcttttgttccatccgtctaccgcctcaaagtgattgatcggtttgtgatgatgtctttgatcagattcaatatcttcatcagtcccagttccgttcttttccgccccttctcctgccgcttttccaagtagcagttcggcacactgacgcgcaacgactcgcgagtgatctgaacatgaacagtgcagtgccattttataaggggagagcctaggccgttgattctaaagatcacaattgtttttaatttttcggtatatcctagggataaattctctgtcatgacaaaatgccgtctttcaccccagctaagggccatagatagataagggacagaatcattggtgcctggacacatttagaggaagcaaaaaaatgtatatttgtaattggtaatgatgctcaagatgacgaattttcccgagactcgagaccgacatcgcgactcgatcccgaaccaagactctcaagcataaattactaattgtcgcttgataaaccaataaaagacaggaagttaagtgtgggatttaaaacaaattttaataatttgcttctttttttaataaaaaaaacaaatttatttaagtaaaaaaattgttttgaataatcctactgggtgaaaaatcatttttt

SEQ ID NO: 14340 - DNA, 3321 bp, Heterodera glycines
tttgatgtcgtcaaacaccgtataacagccagttccgctagcacctgccatactgtagccaaaggatggcttcgtcgcggcgctatggccgatgtgctcgcgaaacaaatattcatacaaaacatccaaacatttatggaaatcgcgacgctcatttgcattttgaactttgtcattggcattggcactttgccattgcttcctcatgcggtgcaaaaggccaaggtgtgtgccataaatttgtgccaacatttccttgctttgtgcattagtgatttctttgtccgcacaaaatttttcaaatgcggcaggccctttcacaaaggcaaggaatgcattctcatcaacctggtaatagaggttaattagttttgttggtgtggataattagcttttaattattgccgtctctgcccgatcattaagttagaacaaatttgacacaacttttgcaaagaatttaaatataattaaacaaaaaaatttaaaaaaaaaatatcaattttccttgtcctaactaatttgaaaattgggcgatttttaaatttttggactaattctgaactcgaatgagaaaatctttttagtttaattatgttaattctaaagaaagtttcgactaattatttttctttttacaattttttcactttataaaattcgagtcactaaaaatttgccttctataaatacaatatgcttcttttaattatttattaatttaaatatataattaccgctgatgcaaaagcaaatgaactgggcaaaattgacgaacaaataaaaattagagcaaaaatattggaaataaaaacatttctttccatttctaggggaataaataataaatgaatatatattttttctatatcttacccatttaatagaactatttcttatgtaataaagcataaaaatattttatgtaatgatttgctaaaatcaataaaagaaattaaaaggaattttcttttttcattttacatcgcttcttctttataattgacgtgtattttataattattccaataaatcaattcatacataaatcataatttaaatgaaaaaataatttctttttttttgtcttttttcaatcaattaattttcgtaattctaacagataattattactttttaaaaatttgcaaaaaaaagcacatgggttttttttttgctataattaggaattttttaaaattttgcattcagccaaaaaatgaaccgagaatgtcaatgaccataacatcaatcgcccaagacaactttatatgaatagtatatttaaatctttgcaaattcccaagtcgcaacggtgtatgacgtcactcaaaaactaatgaataattttctgtcaaaaatttttattttgatgattctttgagcaacgatccggcacatcatttaaaaaaggaaaaaaaataattaaaaaaaaataattaaattttaaaaaactcaactgcgcaagttttccttgcttctgcctaggctctccttttcgttttgctttgtggtgtaaataatttagatggtagaatatgaaggtctgagtggagacaaaaagaatttatttttaattaatttttgtgggaaataattcaattgaaattttcggttttttttttcttgggaaaatactcggttggtcccatttgaaaacccagcagctctctgtactggatgtcttagtcccggttttgcccaaaattatcggtcccgttctatactaaattaaccaaaaagctttattatttttcgcttgccaaattttatacaattttatttatttacaaaaaaattaatttattcttcatttatgaattttcttttctctcgttattggaaagtcaataaatgcatttgatggacagcacaaatcacttacatatttagtcattccaagataataataaatgtgatgattcagaaatggatagcaaaatgtgtggggaaatcattcaatgaattaatttaatttcgttatttcgcattcacaattttgaaataacggataattactataaaatttgcttcttcaaatttagtcacaaatttcaaaataataccaaatttatttctaaaatgaaatcaatgtcagcatactgtatcatattgttcagtgctcttgtgttggcggtatatatttaatttaacacacaaaataactaattgttattttcctccagaaacgacgaaagccgaagagccgaagatgggtttgtgggatttgttgtacataaacacaatttaaattcaagttaggcacaaaatcctgtgtttcctggacaaaattttagaattaattatttcaagtaacaaatattccatttaaaattatcaaaaaatgatttaatagatttaaaaaatatatattttgctaattaatttagattttcctaagcaattaattgattttttcaaagatttatttgttttttaaaacaaaattcaaaaaatccatgtccaggcctgtatccaaggttatttataagtagggatacgatttttaggcaaaagcctattttttcctgagatccccgtggcctgaaacgcacgaaaaacatgattttttgggctgttgttaagctacttttcgacttattaatgcctattttctaggcttttatttttaaagcctaaaaagcaaaaaaaattttgaaagttttttctgactattttggcgtttttccaaaatttgttaaccaaaatgcaataaaaatgaaaaagcacccctaagaatcgacctaaattttttgaatcgacctgaaaatttttaaaaatacacccttaagaaatgaaaattttctcaaaattcatcccaaaataatttatttattttcttgacaagaattttgattttaaaaattatttagctcaataccgttttccctatatttttttttactttttaaaataaattttgtcattttataagcctaaatttgagacttttagggcctattttccattttttagagcttatttttggggtttttagagcctaaaaatatcatccttagtaataataaagtgaatttattaagaataagaaaatcagaaaaaaaagagaaaagaaaattgagaatgggaaaaagacaaaatcgccgataaaaattggcctttttcacttttttttgaattttttataaggagtattaattaatgttaaaaataattctaatttttaaaatgattcatgagtgattattagagtgctcaattttcagcacgaaaaatcaccgattaagcactgtaaactgcaccaaatttacccaaaataagcaggaaaaaagcacaaaaaggcaaaatcagcacaaaaaa

SEQ ID NO: 14341 - DNA, 1088 bp, Heterodera glycines
ttctgaaaaaattcctgctagtttgtaagctaactccttttggtgatcaaaaaagtttttacagcaacaagcacattaaaaatgctacaaaacggttaagatagttgggctataaaagagctaactaaaattttattaaaaattattattggaatcggaaaatattataaacatatgaccatgactgtactttaattacgggcagtggatgaaaaataataattatttgaattaaaattaattcttttttctctcccaaaaattaatattattggcagagaaatccgatcgaaatttccaaaaaaggaatcattggtcaaaaaagattttccattcactgctcatccgccgccctcttctcagcttcgtttctcaacttgcgcatttccgtcatcgattgtcccttccctttttcctttcgttggattttctccggacaaatttaaattcataataaatccaatcaatcggaggatttttgtccattatcacactttgtttgtttgtgttggattctccattaacagaagccctttctcattaatcgccaattcattaaatgtttttttgtcggagattttatcaacttaaaagggaaagaaggaaaagtgagagactaacgaccaaacgaaaaccatcgattcgatcgtaagaaagaaggaacgcatttctctctgttcttttgccgtcccttctccgatttttccctcctccccatttattcatttctcctcccaatttcttcctcaaaatgccctcctccgttggcccctcttcctcttccgatttgctcatccgtcttttcctcctcctcgactcggccgttcactttgccctcggcgctttcctcttcttctgtccgtccacctgtgcccatttccttttggttacccccttaaattccctcaaatcatttcttacaaattacaaactaaaaaaaaataaatcaaatattataccgatttatatatctatagtataacatagagaagattcattgaaattattttctaatattattatttagaattaatcaataaataatttcattacaaactacaggattaatgtctaaaactcaaaccaaa

SEQ ID NO: 14342 - DNA, 1738 bp, Heterodera glycines
ggtcggtttaaatcccttaatttctccatttattgcgcaataatggattaaattgactcctctcccttgccaggtgataagctttttgctgcgaaccgttggggcaatgtgctgtaccaaattgatacaatcgcttccattagcatcggaatggcgtgggtaatggccccgcaatggctgttgcacagacaagtcccccgattgccctttcaagtgctaatctcgtgccattgaaaaggtgcgcgtgcccatggaccaatcgcacgaattctgtggccatttgatgggcgttgtgttcatcgcctcccatgtaatcagttcacatgcggtcggttcaaaaagccaacgattcccttggagaatgaatgagctgttggctctttctctcttttgtacagctccattggccaactcagtcggaccgggcgatggccgctgagacgcgggcggtgctttgtgtgttcatcctttccgcccaaatttggtctcaaatagcctatggccaacattggtccgacaaagtgggccttttgccattgccctttttgtttgtcattcatcgcattatttagcattgggtgggcattagcctgttctcctcctggacactcatctcaatcatttaccgcacttacctatgggcgtcgggattggaccagccgaaatcggagaaagatgtcagctgtgccaacgacggaagtgggacgaaggcgaatgggacatatcagcagaagaaaatggcctagagaacggtttttgctgattgagacgagcttttgtttccaaatgatcataattttgaatttatctgtcaattggcgtaacgacagtctgcccgcgtcccactcaaatttcggaccaatgatattcgatccgcaaataaattgatcacacaaactcgcttgatccttccgttccttcccttcaaccgctctcgaccgctttttttgttttcctgaatcgattggttacgctttcccatggcatattgatcagcaaaagcatgggtctgaccagcggattcgccactttctctttcccttcgtcttttcttgcttctttttagctttcatctgacaaatgttttggcccaaatccattcactaagccgccagcattttatgatttcatctcggcatatttgataaatcattcgttttaatttttgataaattcctaaaatgtctgaagagcaatggagcggcgagtcgagcaacagcaacgaatcggagggagtgcaccacagagaggacccccattttgaacaggtcgaggaccaaatccgcgacattcaggcgagccgaccttcccctgtcccaatctctgctcgctcttaagacccaagctgaccgtttgctcttcggttcagtatttttgcggcggcccaaaggattggctgaaaatgccgtcggtaaaactttgagagtaatgagttaaaaaatgccgaattctttggacatttgttttacagtccccgaaacgccatcggaagtggcggatttggaggggacaacgcgccaaatcgcagagacaatcgaacgcatcgacgatttggaggagaagctgaaggaattgttggagcacaaagacaacgtgatgggagatgaagtggacagaaagtgggcaaccaatgcaatttaggcaatttacgaagaccaaattgacgaataccttcgtgaattggaggactcgcgaacgttaatgacggcactaaagcgggtgggaatggggggggggg

SEQ ID NO: 14343 - DNA, 2607 bp, Heterodera glycines
ggtgctatgacgttagtaaaaaaccatcagaatgggcgttagtcaaaaaaccatcaaatgaaaatattttttgatataacattgttcaagagcatctaaatttttaattcttgatatcattaaatagcactaagtgttttctattagcctacaaaattccaaaaagtttcgttaagtttcaagaaagttatgactaaaaatgttcaaaaaaacttggttttttgagcttctcaggtcataactttttttaaacgtaaagaatttttttaaaattttgcaggataatagaaagcacttaggctatcgaaaaatgtcaatattataaaatttgatccattttagacgaaattatgaataattttctgtcaaaaattattcatttgatggtttttgactaacgtcccagcatcaaaaaatcccctctactctaagaccaacaattagtttaatcgtgttcattaaatggaaggattcgcaattagtcatcaatttgagttatggcatttcccccaatttggccctctgatggtggcactcacaacatttattaaaacaaattaaaattattcattaaaatgggccaatttatgctttttctcgattagtgtgcttatgtaggaggtgggcctcctgttgtggggcaaaaaatgtgacacaaaaaaattcccatttttttctaaataaaaaagacattcaaagaatttgactcacagcaaattatggtgaatagtaattagccatattatgctgatatatgaattataatgcaaaaaaacaaaacaaaataatatttatgttttttataaaagtcacgttttgacatatgaaattccagggaggacgacaaataaataaatgctaacgaagtggcaatcaaaaaatgaaatgagtaatcggaaaataaaaacggagcacagaaaaacggaaattgacaaggattaaacataggcgggggaagcctcattaaaaaagtataaaatttaattttaaaaaggcacaaggattaactttaaaataaaaaaaatggaattgtattaattagacccctcggatcattgattgatcctttccaattttaagcgatttatgatttgattcttaaaagtttgaacattttctttgaaaactttaattgtttcttttatcatcgcaatgattggctcaaaataattgggttattttattatatttaaaaattttggttttaattggtccgtccgttcgaaatgtctgtttttaaaaacaaaataatatagaaaaaaaacagagaaaatctcgatacaaaaatgatgaaaaatgagatggattaaaatgggcaaccccaataaaaaaagtgtataaaattatttgtgtgaattcaaataaaaaacggaaaattttaattgccacaaacaattaaatttattgtatgattatcaatttttttttgttgttttagattggttcggctgaacaatcctccctaattatatggaatttaattggttctcattatttttccaattagtaggttaaaggttgtgcgatcattcgctttattcggttttttcatttttagtcatgtcactctgatcatgatcaaacagaaaatcgttctctgatgacattgaaaaattaattgaatagaaatacacatcattaaatgtataatttaaaaataatgatcggtttattttattcgattcagcttttcactgatcactccctattaaaggggcgttttctcaacaacgcatttaagatcagttcaaagttgatcagatccattctcatttgatcagtatacgtcattttttggcttctgatcaccctaattttagctcgaataacaattgtgaggtccgtccgcttaaattaagcagtttgatcactctgctgatcagcaaatgtctgcccttcccaatttctaagttggttcccgatcacttcatcaccgccgctacactatttttgtagcccattctgatcaaaaagcactctctcttttttttcctcgccaatcgttttccattatcaatttgttattattatggtttgtatattgttacatatttgttcaaattcactcatacccattgtcaatttcgtcgttatgttttgtcgtttttgtctaaaaaggctcctccaaacattgagtcgatcacccatttttactacaaatattcccccccccccccgccgacgccccactccgatcacttttattgtttcgccgttgctcgccgacatcgccgcgccgcgcacattttcgcgcgcgctcggcggtgcccatttttgtatgtttttgtatttaatcggccaaaatgaatcataaaatggggccgagggaattaataatgataatttaaccaaactatttatttgaaaattattgcaaaaatttaaagacaataataataataatggaattaatttaaatgatgattacccttattaaaattaagcaaaatataaaaggcattgaaaatgaatggccttttcaggtgtcttagactgaacaaaaaattttaataaaaaataattaattttaatgcgttaaaaatggagacgaagaacaaattttttttaaatataatcattcctaaaatattaaaaaaagactctaga

SEQ ID NO: 14344 - DNA, 1010 bp, Heterodera glycines
  unsure (1)..(1010): unsure at all n locations
gtaattaaaaaatngantgataaaatgaaatttattattttaaataatgttgctgttttatggctggctggcctttttgtaagaaatcaaatggttttttgggaatttatttaagcaaggccacccgccggggggggggggggctatgcggggggggtaaaagcccgcgggtgtaggatgccagcaggagccggcatattggagccgcggaagccaaaatgccaatacaatgatcgataaacgtgtgtgtatatatacttagatataaaatgtactccaaaccggcttcttccgcgcttcaaagatttctcggaagattggcaaaaggttgaagaatgaagaatatacatagaagaaagaatggactatgtaaaaagaggaggtgggggggggggagatgctgcgttttgttgtgttgttgctgagattgtgctgctgctggctgatgatgcgcctcgccgccgccggcgacgggtttgctcatccattctcattaccactaatggctggtccgccaacaacgcttcaaaattggttgcttgcgcgcaacccgctcgccgcaaccaaccagtcccatccgcgcagcgcgcgtccgtcgcccagcagcagcagcagcccatcgaatcgacgaccatttctgatcgatcggacgaatatttggcgcagagaacacacacaaaaacgacaacgccaaaaatggagaaaagaaaatgattttggttgatggaaaaagggggacgaagagaaattgtgtaatagagaggtgaaaaagaaagaaagaaatgcctaattatataaattgagatatggcagttctgctgttagaacactgacgcggtaagccaaagttgccgggttcaaggccgtcccgcctcatcgttttcccacaaacgcttccccagttcataattatacaaatttctgctggggattaaaaaagattttatattctttatccaccggggagaaaattgtttggtgaatttcaaaagaaattaaantttaatttt

SEQ ID NO: 14345 - DNA, 1427 bp, Heterodera glycines
agaagtgaaaaatatttttccacaattcctgatcactttttggcaacgtttgaccaatgagatgatttatttgcatttgcatgttaaatatttacaaaatggagtccacccacacctttgaaaaatgtgatctgtgatagccatgtcgcgcaaatcacataactgtgaatgagaacaatttcagggaaaaacggcaacttctccaagaaaaatcttttttttggtccgatcacttttttactaacaagtgatcagcatgattcagcccaacttcattatggtatgactgaattacgaaattgcattaaaaagcaacatttcgaaaagatctcgccattttttcacacaaattgatcataaaaaggaaattaaaaaattgcgtgatgcataccaatgatgatgactttgcgagggtggaaaatcgtgaaataaatttctccaaaagaggaaggcttgatgggactgggttggcatttcaaaagtttatcaaactaaaagatagacaaatattgcaacgcaaaaatttgcaaaataatggcatagaccataaaatagcaaaatggcatttaaaaatgatatttttataaccaccccagggttcggtttatcaaggatcacttttcgctatttgaattcgtcattttcggtaaaggattgctgtaatcggacatgaaaattctggcaaactcggaaaagtgatgccgacaaaattctgctcaagaatcttgacggtcgcacgcacctgtttattagcactaattagttaccaaattagttttgtcactaatgaatgaacatatcatcgctcctaattgcccgttcgtttctgttcgccgtcccatcccccgggggtctgtttcgtccgtccgtttttcaaatggtacaaagtcgtcctcgtcctgctcaaaaatgttggcgttaataggtcgcgccgtgatcagttggttgtgctgacagcagagaaaccacgcacagcaaaatcaagtttaaagggtttgtggtcttctcgacaattaattcatgcaatcgcaatcattttttgaaggattttaatggctggtaattaattagttattataatttttgtaatttaaagggaatatgcaaaacggaatgtcgactaaattaaatgatgataggaggagaacgaaatgttaaatgtttttttttggatttggttttgatttttggcaaatattttcgccttttggagtttttcaataaatattttgctgtttttttggcaaaatattatagcaaataactaagtgatccaaatatgtacataaatatgtaagaaaaattccaaaatatgtacaaaaaaccccaaatatgtaaataaaatttttttttatggtattttttgggaaagaaattccccgtaaagtatgaaatagccacaaaatgacataaaaattacttttttt

SEQ ID NO: 14346 - DNA, 975 bp, Heterodera glycines
  unsure (1)..(975): unsure at all n locations
tggtcagtgtttttaaattaccatactctctgtttacccaccatcgtccgcctgtttcattttccaatgcaatatttttcttctttcggatgcttcggtggcatcgccgcaactttctccgccgtccgttccctctcctacacccatttcgtccctccctgctatttgtcgtcactttttgctgatgcaaaaaaacccaacgaaggcggacatgtaaattgttgcggacatttccaaaacatttcaatcgccgcctcaacgaacgaaaattgttcacctccgaatataaatttttatgaatgaacaacaaaatacccaaactttttaaaataaattttgtcatttgtttatttatggtacactgacccaaaaaagtctgaacaaccatacatgttttttctctgcgttcacaaacgctaattaaataaagcgtttcgggcaaatgtctctccatttacaattagtggttcattatgtcagcttcacattagcaacaaaaaaaaacccccgaaacaatatgaaatgaatgtggtatggtcaaccaagtgagaaatggtcaaaattcagacccaaaaagtcttgccccccccccccatttttcgaaaaaaatttttgttttcaaaagtgaaaatatatttttaatggttttcgggtttactgatncacgaatctgacatccatttcaatctattccaaaccccggatccgaattcgaacaaaaaatagaaattcaaaattttcgattttccatttttagtcaaaattagtttaaattgatcttttttgaagcagtgatgactttgccacttttttgactttaactttgtttccgtgaatttaaataaagttgtaatcaacaatttgaattcaaaaattttgaattttctactttttgttccaattcggacacggggttcggaatagttcgaaatggatgtcagattcgtgatcagcgaccctgaaaatcattgcaaa

SEQ ID NO: 14347 - DNA, 3065 bp, Heterodera glycines
ttagccaaagtgtgcagattttcgacatagattttgacaaaagttcttttcgagtgtcgactgatttgtctctcattgcacttcgttctgacctcacagaaattgttcttaatctcggagaccgtaataatttatattatcaacataaataaaataaacaaaacccccgctgtttttgtattctcaagaatcaaaaacctcttcccacccctgctgaagaaaagccataatctaaatctgtgtgtatagttaaacaaattttcagactgcattcttccaaatcagcccaattttaaaggagaaggacgcgtttcaattaatgacattgatgctaattatttgcgaagacaaacggtaaaaacaatgagcaaactttcataggtacctaatctaaacatttttcattttaggcattgaaagaaaccacggcacaaactattcctgctttgatggatgcgtggaatgatttgcttcgggctcgtcagggctgtttgattgtttatgtgccaaaagaatgtctttcccaaatccgtgaccaaattgtggtatcgctgcacattgatattattgtttgttcccccaaacaagtgagcttcgtattttatcgttttttaaagataatttagggaatcaaatttgtgtttacaagaaatcaagaaaatgacgatggacttccttccggcgctcatctgttcacttatcgctcaaacccacaaagttcgacgaaggaatggttgccatgttctgaagaacccctccaattgtgtgtttggcgttttgagataactgtgccaaagcaattgacggccgtgtgttgtggcgatttaattgttagaattttgctatagaattttgggtacttatgcagtttattacagattaccaaagattgttaataaacaaaatatttctgacaacttaaactgcataagtgcaccgcatcttgagctaattcagttcctttcttcacttaaacttatattttatgatacaattccaaactccgacgatgattcattgaagacgctttgttatcagctgctcgtgccaacttctgctgctaatatcggtttcgcaatcggtgattttcaaattcacgtgcagccagaaatgcccgaggcatttatttgtttccgtaacatttaaattcctaagcatttttcagattattaactttgtcgttccggagctcattccgctcttaaaacacacaatgaaatcgctgaatagaatttttgtctttttcgaagaacttttgtcatgccgatttccgtatagtacctattggcaaatttttgtggatcaggtccttgatggagtgtccactaaaataataataattttaattcaagactcccgatgaggtcacctctttcgccggacttacaattttttccattcgtctcctttatcataagaaaattttggacatggttcaaggcactcgaaaattgctcgccactgcaattgctcagcagttttttggctgttttatcgcccaaagaagcttcaacgaactttggctcctcagaggactctctgggtttttttctattcaataatttcgtgttttttttttttttgcagttttttgacaggtgtttttgttgaacgattttttggtgccactgaaagcaattaccaactgaacaaattgctgaaggattcgtgtgattacgaagctcgttttggtgctattgctcttcgtcccaatgccaatcacagccaatttttcttcgaccccaattgtcccgaaacgtgttctccattttatttggatgcgctcttccgcaaaggccatttggtcattcgaatgttggagaaaaggttacccaaggagcagttcgttaaggtcatttgtgtttctttccggttaaaaattcatttgaaggttttgcaacgaattctttccctgggggtacagtacagtcagaatttgtatcggcctgtcgaatggacgcacatgctaattaacacggcgatgtttttgcgggttatgactgatgttactgggaaggaattgccttcctttgtcgaacaatggatcgattttggtggatttgttaattttcaggtctgggatttaattgttgcttatgtaattgacataatgctttaaggtttcccacattttcaaccgcaaaagaaatatcattgaattggagttgcgtcagacagttccgcttcaaaaaggatgtcagaagtatgttttatttatttatttttgcacttttccatttattgctcttttaattttttcagttacaccggccctctcacaatcgttgttcaagagcttgaagtatcatacgttaattcttttctttcaaatagttcattttcagggtcattttgctcacactatccaaatagacgccgccgtttctcgccacgacatccaatgccattcaaaggggcgtaaactaaagaagaaacggataatgctcgggaccggagaagaggtcgacgtcgacctaaactcgatggacttcgattcgccagtgctttggattaggtttaatttaaaaaattcgatttaaatgctttcttacaattagagtcgatcccaatttattactttatcgtcaaatgtcaatcaaccaaccgttttatcaatgggaacttatgcttctccatgaaagggatgttctagctcaacaacaagccattgaaacactttgccgtttttccgaacacaaaacaaagatacttttggaagagacagtccgaaacgacaaattcttctaccggttggtggactttcatggcgggtgcaccccaaaatttcgccgccgaaatttcgccgggaaaaattacgccgccgaaatttcgccggacggaatttcgccaaaaatttttttgaaaaaatttggaaattttcaataaaaaattagaattttttatatggaaattccaatgaaaaatttttgaaaaatttttttagtgattttttggaaaatttttcgaaaaaacttactaatttatcataaatttcaaaaaaaatccttaaaattttttctaatttttttttgaaattttcttataagatattctatgattttttc

SEQ ID NO: 14348 - DNA, 2350 bp, Heterodera glycines
ttcaccaaaattcacgtttattgcattaaattattaattaaaatatatttattatctattctttctctctctctctctaggcaaatttactttttaactatttaaaaaacattaaggtaaccaatattcctgaggttacaaattttccgtacccccctccccgacttttttattttgccaattttgcccctattttgggacttttcgcccctaaacaccaccgggccctaattattcatatcattaatgctctttcgtttcgttccattcttttttttctatttttattttctctttttttgcaaaaacaaaggcccgattttgatggatttgcataatttttttgctttttgctctttgaagaaaaaagagatcgaaaatagcggcaacatgtgaagccaacttttgcatattaatgttttggcgtcgttgggatttggccaaattaaaattaattaatttattgtttctaaattttctatttttgctcatttggcccaattaattaattaaaaactgataaaaaaaaaagtaaccaaaactgctgaaatgtgcttaatgaaagtaagcaaacatttaacaaaaatactttgatgttccaaactttctgactagaataaatttggttgaactgataagattttttaaaatatttttgatgattttatgtaaataaaatggtcaaagattgatgcccaattgaatttgcttcgtgcggaaaaactgtgttaataaaagtgattagtgaaggtcacaaatcggaaacgcatgtgatcatttgcaaattatttgggtaattaaatggcatttgacttttatcggcccacaaattacggtaattgtgctaaaaggccaaagattccattcaaatgattgattgattatctgtgctgattaagcgaattttctccgtaaaaaagccctttaaaaggcatgccaaaaatggaaattcattcaaaataatttaattttctctgttttccgaattacaaaatgccttcttttctgccaatgcttttcctcctcctctccgtccaattgctctcctttttgccctgctccttctccgcttcgctttctgttgctcccgcttacaccaccaaagacacgtgcctttccgagtcgagtgccagcgattcgatcagtgcgcagctgaacaaaccgatcaccgggggccaattcactttttacggaatcggcggacaaggcgcgtgcgggttggacattgccacggtatggacgatgatcggacaaaattgtgaattgactgatcaaaaatagacaccgaaaagtgatcagagacaggcatttggggcaacaaatttgacaattattaccgtaattagcaaactttcgtgccttttagcttaattaatgcaattacatagaaacaattggtgcttataatttatttcttcaaaagtacatcaattttaacattgaaaggtcacaaatttgaattttccgcccaattttagcccacaaaatctgccgctggctccggcacacttttcaactccgacgccgcgtgggttgagtcgtgtttgccggacgcgcgttacttgctcaacgatttggtgtgcattaaccgatgcgtcaaaatcgaatacaaagggaacacgtaaacattgaaatttggggtttaattaattgttcaattgactcaatttggcttaattagtttgactgttccgatcaacaacaaatgttccgagtgcgcgaaagaccacgtggatttgtcggaggaggcgttcaattggttggagccgggcggcggatcggtgggagtggcgaaaagtgaaaaagcaaaaacaaaattggcattaattttcatcttaatcattttagatgctacaataacctatgtgaagtgttaaccatggggatatgattgatctatgaatgctcttaagtgatattcttctattttatttcacatttttttgttaaaataattattaaatttattcaacaattcttttgtttttaataatatgccattgacagaagaagacgcaatggcaaatgtctaaaaagaggagtccgtaatttcacaccgatccttttaaactgctaataacccatataaatgggtttaatatggcataatttccttgcaattttcataaaaacatcgtgaattaagccgaagcccccaaaaaaaccatatttgcgggtccatttcctagagttgaaattcgaaattcttgtccaatcaaatcccgcccccccccccaccttaaaaatgcaggattgtggatttggatcccgtaacatccggcatggatttgccagttccgcctatgaacgtctaacattgataattaattgttattaaattttttcattt

SEQ ID NO: 14349 - DNA, 2118 bp, Heterodera glycines
tttcgatttaatttttttttattcgataatttcctaaaacaaatgttaagcatcattcgtgctaatccaagcaattctaattctaatggtcaaaaaacgttcagcccatcgtcggaacgaaaacatggccgccttgaacgcagctgttggtggtaaggaagtggcgtcagccacaccgattattgagtttttggaagtggcgtcagccacagagcaaattgaattgattgagacggagactattccgcaaaatttggagtcatttgaagtagcgtcagctatacagaaaggagtgataatggaaacggcgttagccgtcgagaaagtaattgaaaccgataagactcgtggtatttccgcaggtcttgaagaagaatttgaacgaggcatggaattgggagaaggtcagctgtggaaagaaacacagaaaatattgaaatcgaaactattcaagacttcactgcgactcaattctccaatgtctcgtggtcagagccacgtgccatcgcttcgcctgtgccaatgtcttcaaatgaagaacattgcgcggaaggcggtgttttgaagtatttggtgtgtcaaaccgacgtgaaaagtgtcgtgggtaggaaaaagagtggacaaggtccattttttatgggaattcctgatattttggtaagtgccgagagacgccttcaaatgggagacacagttgtggtcagtaagtttgagtggaagtagggatttgaaagattgtcctatgacttaaacccggttgattcgttgcgctcgtggttcgtacaaggcaggatcaacgttcaagcggttgccataaaggtggaggtgataaaataggtcattggttcatttcaacctggttttgtaaccgacttaaaacgatacagaggtggggatttcagatcagccaccgtcatatctgcgcaaatgcttcgcccccaaaccatctatgcccggcaattaaccgaaatcagtccaggttgaattatgcttaaccaactcctttaccttaatttggccaaaatcacaagtccacaagcattggttccacttaattcttcgtgccattaatcttaattttaataatttttatttaatttaaaaaatatatttaccaaaatgcgttcacttcgcgcatttttataatttgttattatgaaattttttcatttcttattgcaatgcatatggaaattaagttaaaattaatgcgcttcataattcttcaagaaaagtaaatgtgtttaattttacaataatttatatttaaaaaaatattatattaaatttgtgaaagtattttttaggttttaaaatatttgcttgagttgaattggtttgaaaccctctacaatttattttattcaatttgaatttgtttgccattttgtttaaaattcataacacttatatttttggttttctatcgcattttatttcatttttcaatgatttgtttttgatatcaattttatttttaactagtttaatgtcagattttcagaaaatatcaatcatttaaatttggtagtttaattattttaagagatttttatgttaactaactcacttctttttttatttagataaaatttccattaaaattaatagagccaggaattttgaaaatgccgggcccgggctcgggcttcggcaattggccgggcccgggccgcccggtcaaaaaaagcccgttttaccgggcgttccgggcccggtccaaaattttggccgggcgcccgccgggcccgggcttttttcaaaatttttggaattttgattaataaagttaaaaatattttagcttagaattatattaatccatctaaattaacttttttgcttttttaaaaaactttttaatggcgcatttttttcaaaaaacattgaggtacaagaggggtctggcggtgccgacaggcgccgccggggaaaatttttgaaaatttgtgtgtgatttgttaacagatttacaccaaaaaatgaccaaattttgaaattttgagctaattttttgaaaacaaaataatcattttccagaatccgacgctgaggaaaaattttgacttataatgaaatttattaagaaaagtgttgattttttcataaaatttggaa

SEQ ID NO: 14350 - DNA, 1663 bp, Heterodera glycines
tttcctttgttgcgtatatggtgttggttctccccccccccccccatcctgctatttgccttttcgttttaattttgcgcagcaatcatttattgatttgatattttttggaaattttacccgttttaaatgcttacaaatattttatttaaaatgccgaaacaattaaaattttatttagaatatgttaaacaaaattaaaatagctccctataaaaatatttgttccgaacaaattcgcaatggagagaacgaagaagtcgaaaattttatgaacacaatttcggaccttgttgttggtgagaacatcacaattgattcggtaagaagcaggtcaactgcctgtttttatgaagggtcaattcgatttttttggcaaatttaaaaaaaagacgaattcttcaattttgaaaattttatagaaaataaagattttgggatggaaaaaatacaatttgttaatagatttttactaaaaataatttttttgtgatttttaattcaagcggtgattttaattacacggagaatgagccgatatttaatgaacaaatagggccacaagatgacaacttgtctgaattatccgtatgtgcggcggacaaaagaagccacgggagggcttctcggttagaactgctcggttctgacgtttaaatttattcttgagttaaagggcacgctcaaacagtagtgtcagtgtggcgtcaagcaaaagtcagcgaaaaagtgccaaccgagctgatcggaagaaatccggagggcgggtgaattaaatttaaaaaagcataattaaatgaaaatgttaaaggttttcgcaaatcggaaggccctaccgaacgaattggcacaaataattgaagcagaaagggacgcatttgaaatttcaaacgtttttgcggtttatacccatcagaacggggaaaaatggaaaaatgctattttgtacgatggttaggtacataaatgcggggtatttgttggttaccgaattaaggggaagtctctctctctttctctctctttcacctttctttctcatgaatcccgacccattggattatctgagttatcatatcttttttagatatgcagagctttggtaattcagtttttggggaaggattctcatcccgacccattggactatctgagttatcatatcttttggtatgcagagctttgacaatccagtttttggtgaaggatctctctctctatttctctcgctcgctctctctctctctctatcattctctctctcagtttatcataatgatttaatttttacaaattgaaattcaggatatgacgagtcgaaggatagttgggtgttatcccaggatacatatgcattggaatccgtggccaatttttcaattagtgtctcagcggagctcaccttgacagcattgctcggggggccagtacccgaaagttttaaaaagatactaatggcgaacgataaatttgcgcagggtaataccttttcggatacttttctaaaattttgtatgtgatttgctaacagattttgtacaaaaaagccaacctctttacacccccccccccccaaaaaaaaaatatgaaattttttatgcttttttaaatcttttttcgttttaaattaacgataccatgataaatgtaaaatttttatctc

SEQ ID NO: 14351 - DNA, 1458 bp, Heterodera glycines
catatatgttgtcagttgtttaatattactggtcacacactatacatctttgtaccttctacatgccaatttaaagtgattttggtagcaaaaattattaaaaatattcggttgcatttcgaacacacaattggttcagaattttctggtttacaaggaaaattgctccataaaattttcttttaacttaacaacattcatttcataccccatctaccacaacgctgacattttattacacaattaacagtatgttttattttttctcgaaacgtctgctcacaatatatacaataataatgtttaatgttgaagaattgttttacacttttcagacctagattataaaattaatttttcaagtgattaaatttaccatcccacagtgtccattttcaagaaaaacgcatataatgaattttttgatccatcccccttgtatattggttttaatgcccattcctgaattttaatttttttgtaaaaatcacttttcatttcaacctttgaaaaagcggctggtaagaatttccccggaaattctctgtcgaaatattttcggatttggttaatgtcgtcaattccataattctttttggttggatctattttggcgtttttaattaaatcatcagcaaaatttttttgtctttttccgttgctataaattttcctaaattgagattatgaaatttcagtccctattatttggtacaatttgctcaacattatactgtaaaaaaagacagtaattatcagaatttttgactaacaatctcccgctttcttttaatccaaacaaatgatttattgattgcgctaaaattaaaaatgatttatactcaattttttttaataccagatccttttggggctgcataagtagttatgatcaaagatatttcctcattcaataaatcaatttcatcaaaactttgctgaatatgatagaaggattccagcactacatctgcgttattttgtaccaaatccctaggcggaattattagctgatcactcagagcttcgcagtatagatcatacgaaattttttctattacccaacccttttcattttttcccattgctttatctgttaaatattcaataatttttttgaaattttcttttgaattttcttcggaatttttaaatataaatcttataacattttcttttatgccaaatttcttgttttctttttgcgtgtttgctatttccgtataaatcatttggaatattttttttattactgaaataattttttttatttctcaattgtcgtttttcttttggggtcttcaaaaaggattttccctccatttttaaagtaaaaataaattatctaaatgaaaacaaaaaataatttctttaaataaattaagatatttaaagattttccaattaaatactcactaaactcagaatataaaatgaaatattacaaacgtcagtgcc

SEQ ID NO: 14352 - DNA, 910 bp, Heterodera glycines
attttataaattttatttcacatttttataacttttttcttttatgttataaaaataaaagtgatttttggtttcgggaccaaagggggtggacaggatttttgtgttgaaaatttttttcaccaaaaatcttccaaaaatatgtcattagggctattttatgacgctgatcacgaatacgtgatcagattttacttttaacatcgataagacctcagaatccctgtgtgattggggattctgagcatcattttgaggggggagggggcaggttcggatccggacggtgtaaattattttcgttatatttatggttatttttaatgtttttaattcatttaaaagagtgtttgttttataataaaaaataaattttttaatttaaattaaattatttttttatgaaaaattttattaaaattaattatttttttaattaaataatttcatatatttttttttatttgagtttttcagaaattaatttaatttcaatctaaataaatttaaattattataagcttcaaagttttttttaataataaaaagaggcatttattttacaatttttaaaaattattaatgcattttttttgtcctcttctaatcactgttgttcctcttttaatcactgctgtacctcttttaatcactgctgtacctcttttaatcactgctgtacctcttttaatcactgttgtacttcttctaatcacttttattcctcttctaatcatcttccaatcatttttgtcctcttctaatcacttttgtacctcttttaatcaccgttgtacctcttttaatcactgttgaacctcttctaatcactcttctaatcgctgttgtacctcttctaatcactgttgtacctcttctaatcactcttctaatcgctgttgtacctctt

SEQ ID NO: 14353 - DNA, 2236 bp, Heterodera glycines
  unsure (1)..(2236): unsure at all n locations
tccacacatcttccaacaatttttgtacctcgtctgagctcaacaacatttaaatacgggcgcgaagcgcccgtttggcctcaacaaaatttaaaaacgggcgcgaagcgcccgttcgaggccgcgaagcggcctaaaagtcccagataattttttaaaaattccaaatctccacaaccagagctaatattccatccccctattcactcgcaaggggacggatcccatccccctaatcactcgcaaggggacggatcccataccctaatccaaatctccacaaccagagctaatctaggtagcgaagctcccaaagcgcgaagcgctttatccctgtgccagatccgacggttcacgcacccgctagttacattttttatatcaacaatcgttttgttattttcattttgcttacactttataaatttttttttgaattgtttttcattgaaagcattttactaacatgctttttgactaaaaatcgattgacaataaagctatatttactagtgcttttcgagaccgaaaatttcccgatatttgacccgagactcgataccgagacccaaaaaaatcgactttttccagaaatttttcttacacttaaaaatcaatttgaggttttttctcacaattttttgctttttaccttatttaagctaccatccattttagtaaacaaaaaaagtccaaaaatgacatatttttacgattttaattgttaaaattatgattgaattcccatcgaaaaaaacattatattgaaaaattaaaagaaaaataactacttgcaggtgaactgatccaacgcaaaaatcaggaacgggtcacaaaaagttaataaaatattataaatttaagtttagcaaaagtcaaccattaggggtgtattttacaccttgaaaactcgattgttaggggtgcatttttcacgaaacttcgggtaaattacccgaagttcgaagcccaacaaatacgaagttttcgaagctcgaagtttcgcccacccctggttccaatcaacaaatttgggacaaaggcacggatttgagtctgcaggttattgctttgtcacacaacactaatgtccagccaatttgggatgttttgatccgacaaatttggcccgtttttgcgcaaaacattcgcaaattgcaatttagtttatacttagggcttagacttggcctcattagccagcataggaggctttcaaagtgtgatgattcctttcaattggcaaatctcttcgaataaaattaacaccaaattaattaagcaaaaattcaatgtgactgccgttgatttctcataaaacaataatgtgcaaaatttgaaattcgttaaaacaatgccaaactgccgagctgctcacncaaggcaattatggacattgttcaaatccttacaatttttgtaatccaaattaatggcccaataatttggcttcgcttcatttttcgtgcgttcattggttccccaattcaaatggcacaattaacacgtgtgtttttaattgaattttatagttggcggaagtggtggcacggagaaatatcaaacaatgaaaccgaaaatccaatgctaatcaatccaaatattttgcaaaacttttcggtttaccgctcggtcccatagcttgacgaatttggtgagaggtgaagctgatgaaaaaaagatttttcgcttttttcttaaatttaatactttatgtatcttcaacaatttaacccaatttatgtcagtcttaaaatttaaaaaaacacttggtaattagttaattgctcgcttatctccgcttgacagtatcatcaaataaaaatattgtatgccggaattttcttaaatatcaatttccgggtttccacgtaattttaaagttcggcttcagtcagcttttggccccatttgcaattttataattaagatacgaaacaaatattctgttgaaattaacgaaatttaacaagttttgtagtcaatcacataccgtatgccaagctagaattttttgctacggaaaacccaaattggagatgtgatgtaaattttgcgaattatcttcgttttttggattttggaaaatgaaaagttttaatggtaattttataaaaatttgcaattttacaaaaatattccataatgaaaatattcacaaccgtttaattaatattttttgcatatttttttaaattcactaaatacaccaaatgccctcagtcgaaatagtcat

SEQ ID NO: 14354 - DNA, 2135 bp, Heterodera glycines
gaactggcataggtgtgggaacagatttcattctcattcttcgaatggaagaccttgaaatgagcaaaatttagactgatcaaatttcggctctattaaaaatcaacaatcataattttgaacaagccgtgaaaaatgttctcgggcgcactaatcacgaaaatttgtattaattttgtttccatgactagacattgtcttaatttttttctgtcgaactaaagggtccccaatttggtttttaataaatcaaatcgtcccttttaaaatagcgtccgaatttctgctattacaataaatgaaaaatgaaattacagtgattatgtaaagaaacttttttaactttgctttttggtacaaatcggaagagcgtcctagaaagatagtaacccaatataaacgccaggaaacatcggtttttatgttagtttggagaaaaatgaacctgaagttttcgcgtgcttttcatcgacacaacacaggtcaatgaactgctgtacagcttctcaacaatgcatgcgcgttcaggcactgaaaacaaaaccaaaaataaataaataaattgaggatggggatgtgaatatcagaaggacctcgcgagtccgaaattttctccagtcgttccaatgagcgcaaattgtagaagctgtacccgtcgtcgtgtccgaccacaagaatggtgcagtcttggttgaatgagacataataaatctttttagatgaaggcgactgtttttgtgtgtccatgccgttctctgaggtggaaatgattttgaaaaggctgtaaaagatttcaaagttgttaacagatgacattattagttttcaaagcagccaatatgttaagatgaaagacggaaaatgaaaaatttaacaaaaaaacaaaacaaaatgaacataaaaaagacaagttgacatttatttacacttccttttttcctttccctgacctgctgtcggtgatagcaggtaattgtgcaccaaatattctgctcgttgtaccccggattcggcaatgttccaaagtgcacttgtgaacgcttggttagctatgaattcagtggcaccggaaaacatgggaacatctgacaagtgagaagtttgtgcaagttccgacaatgcgtttttgtgaaacttgggagggggcggggcaggtgagaaatgagaagaaaaaatactatttggtatagaaatgtttgatttatatttttaatttttatttattttttctaacattgagttacgcttgatttaaatgtatcaaaaccaattaaggtgctgtaattaagtttcttttcaagtttcaatgccggttttactgttgggtatttcaagccaaaaagcccgtaaaaatttaatgaaaaataattcgccaaaatttgaaaaaaatgaatttttgacatgaacatggttcaaattttttcatgtgtgtagcacggtgctgttagttttcgatagtagtgatctcgacagtgttggtttcgatagtaaactttgtttaaaaaagattttctcacacgattcgagaatcttatataagaaatttttgtttgtttttttgactacagtccagtagtagatatttgtatacaaaaagagaaagcgataaatcttgacaaacatacctaattatcagggctgtcaaaaatatgcacgaaaatggccaaaatatgcgcataaatatgctaataaaatcgtgaaatatgcacaaaaaccgcaaaatatgcaccaaaaaaacttgaaaattaggggtgcaaattaatttaaaaaattttattccccataaattttataggttgtttttgcaatttcaaattaaaaatttcacaagattttcgggtaatagtgcagtttatcccccccatttttcgaaaaaaataaaaaatttaaaaaaaagttgtgtaaaacgcttttccttggggttttctggggcgctgatccacgaatctgacaatttattttgactaattaccaaaatccccggacccgaatccgaacaaagtcgaaaattcaaaattttttaagtttacacttttgctctaaaattgattaaaacaagctaaaattagtcacaaaatcattaaaacaccagaaaatgtcattttgtacagattcgaaaaaaagtaaattttgaa

SEQ ID NO: 14355 - DNA, 830 bp, Heterodera glycines
atttgcatattttatgacagccctgcttataagttattaaagacaaagatttagcttatcactttttttcttgcacatataatgtacagcaaatatggcgatttccatacaattgactggcctcgagatttggcccgtgatcggatgcgacacaaatacataaaaggtattttgaaatgaattagaatctatttaatggaaaacaaccaaaataatgcatttgctttttccctaaaggctatcgcgaagactttcccttcggttccgcgtccgccgtttgggacgcgggcagcggttggatttgtgtgcttttggtcggcttggcagccggcgctattgccggagtcattgacattggcgcgcgatggatgagcgacctgaaggacggcatttgtgccgaccgattttggctggacagggagcactgctgctggtcagccaacgacagcgcatacaaaggttgttttgagagtttggtgttttaaaaaatatctggaactggatcctttggaacaaatccgggtcatgaaaaatccaggttgccaaaaatagcctcgattttgataattgccagattctatttcaagccatccccctttcatttacgcgtcatattgattggttttagaacaaatccgggtccagtaaaaatatttcttcactttgatattgtcatgattctattgcataaaaggcgcccccctcacttaatcggaaccttcgtgccatccttggtatacattaagggttaaattatataattttggtattttattggttttccacgtttgaccatttttcagacaacgaatgcagcagttggacacaca

SEQ ID NO: 14356 - DNA, 1846 bp, Heterodera glycines
ataataaaaatttgaatttttgaatgtttgtttctttgtttttttcctccaaaggattgagcggcgtccaattggtgcggggactgctcgcccttttcggggaagtcagatgtccaaaattggcaaattgattaggaaaagcagaaatttggaggcaattcccgagtggtatttggacacgaagcacttcaaagtcgacgtttgccccaattttgaaaatggaaaagttgtcgacacttaccgaggtttgtttatttatttattgaatgtcagcactttccaaggctaattcttttttttcatcaataataaattatttaattatttttgttttcttcagataccgatggaatcgaattggtcaaaatgtacgaaggttttctggaggacagcaaattgtttctgtcaatccatgcgaaaggcgtgagcaaagaatcgctttttggggaagaaacggtggaaattaaaaatgaaaatttgaaaattgtgaaaaaggcagccctttggctaattgacaatttcgttgatgaatttttagcctatttggacaatttttttgaatttggcggcaaccaaaaggaaaaagaccgaattttgaatgaaatttggcaaaaatgggtcgaaacgaatgcaaaaatgcaaacattcaaggaacaggggcaattgttttgccatatttacgttttttcaatgttttttctgagtacaatttggcaaagattgggagagaaggagcgaaagaaaatggcaaaagtaatggcggaaaagcgatgggatcaaattgtaagcgaaagtcactttggcacaatgttcggttttttgcagatatttgaggacaattttcggaaaaaaacattttgaaaagatttaaaacaatttatttttgtatttcttttgacattataagtcgtcaacaaaagaccaaagaacttaatttaatcaccaattaattttaaattgtaaaaataagctcgtgttgacgacttaataaaaaattaaaattattattttttttattaattttagaagtaaatttttctgtgtctacacaaaatataatcctttttaaagaaaattttatgttttccggaaattgtccgcaaatgtcccactgcgtttaaagtgatttaattaagtaaaactaattaatttataatattctttataaataattaatttttttacatagaccattttcgcgcttcgctggtacggcaaatcgtccttagaattcggccgttcgtccgcggcctttgcgacttgcgattattctcagtgggatgaactgcttcatcaccgcaacgcacaattagtgcacagtttgaccctttttcggctcatcaaacgcttcaaaggatttgcgcattttctgtgccaaatgattaaaaaagatacagtagaaacaaaggaccgtcttctgctgctgttccgatccgtggccgaatttgattggcttgagaagcaattcccaatgattttgcgcatcggtaattaattaattattcatttgaatgaccctaattatttaattaacaatccctttaatatgctaattaatgaaaaatttagaggaattaaactttcgttgtcgtttacatttctatgaacaaatgttcaaattcaaaagttcaagtgatttgcacagatacagcgaattccgaatggctttctccgttttgtttaaacaattgtccgttcgcttaactgctaaatcggccaaattggcccatccgatgctcacagaagtaatgtttgtagttcatgaagacattttccgagaaatggcacttgcgttggcattttgtcgctgatgcttctctttaaaggcattgagtgccgacaaaac

SEQ ID NO: 14357 - DNA, 1738 bp, Heterodera glycines
aggaagaaagcaacagagtgaaaaagatgaagaggaatcttctcagggaaaaggaaatgaaagggatggatgggaaagaggtggaagaagaggaaaaggtggaagaaaagagtaaaagagaggacgaggaagaaggtaaaaaggaaaaggaagaaggagaaaggaagaatggatggctgagagagaaggaagaaaggaggaaggaaaatatgagggaaaaagaggaaaaggatggaggaaaagggaaggatgagagggaggaaaatggcgaggaaggaacggaggagaaagtggaggcaatgaggaggaaggccgaagatggagagaatggaaaaaaacatagcgacattcccgtggcaaaatgccaattttttgggatgaatggcaaaattcaaaaagcgaatgaaagggtcaaaaaggaaaaaaatgatcaacggaaaggaggaaggccaataaatgcaaaaagtgcgaagaaatcagagacacatcaaacaaaagaaggaaaagcatcgaatgaggaggaaaaagaagcaaaaagcattgatttgctgatcgaaggttaattcgggaagatcttcttggccagtaattgccaatggttaacttcgctcttcagactagtggggtccgatactaaaaatcccgagactcgaaaccgagacgaagacccgagaatcgagacttgaactcgggactcgagacttaacccgagacttgagacttagacccgagactcgagaccgagacttaaccccacgattcgggagattttcagacattaccacggacgaattccttttggaaaagcaccgcaaaaatatgaatgccaacaatgatcacaatttggacaacgaattgttggccaatttgagtgtttacgcacacgaaattaagcaacagatggaaacgtacaaacaattgtcaaattatggcactgaatttcgaaattgggcgaaaaatgtggcgaatgaatggcaaaataaaatgagagagaaagtgccaaaggagagaaatgagcggattgaactaatgaacgaattgtgccgaattttgcacagaatggcaaattttggggagaaattttatgaccaaaattgggacaattgcacagaacaaatgcaaattatgtgctcagaagtgaaaggacagctgcataaaaggcatttgtcacggcaaatcaccgaaaatgaccaattagagaaggaatgggccgaattgactaaagagggacaaattaaggcaattgacacactttggggggagaaaaatgggaacagaaaagccaaagggaacagacggaaagaatttgtggcatttttggagcaatggaggaaaatgagggaccaaatggaattgggtgagggatttagttaatgattgggcaataaaaacaccaaatatttaaacatttaattaagatgaaaatttacgagaatatttcgccgaaaaaggatatttggagcaaaagcaaagcgaaaatggcaacaggacaaaccaagcggaatatttgcaggaaatagaatttgagaagtgccaacaaaagggggcaaaaacggaggaacaaatggtaaaagaaatggcaaaaaaagtggatgccctccgtgtaataatctgttgtcgtttagttggacgaacttttgtacgattatggcattttggaaacaaatgaaaagcgcaacgacaaaatcaaaacgaaaaagaagagatgcgacggattgtgaaggaatgggtgggtttg

SEQ ID NO: 14358 - DNA, 3392 bp, Heterodera glycines
gaaaacttttctacatgaaatattcatgtgccatttggctgtaaagccaagcctcgttcagaaatgatccaattggttaagacgttggcatttttatacatgcaaataccgagaaaaacacattgttttcgcttgcgttaatgcttcaacggtgtacacactttcatttttggactttaaaaactttaatcggcactttttaagtaacaggctcagcagaagccagacgttttttttgcccgattttttttttggaaaaaatgtcatatcaattaaactaaaagcatcgggcaaaatgcccttcatataatctcatacattttttggtactggatgatttttaatccttttttgcttaaacgtcatcgaccacttttcagggcggatgtccggcccctgggcacgtgacggcctatgtgcgcgttccgctgcgcgttgtcggtttggtggtcggtccgaaagggaacaccatcaaacgaattcaacaggtgctgatttggcgtgcgttagcattttgccaatggatggaacgccaaaatggcgccaaatttaaaattttgaaaatttgctctgtccggcatttacaaaagcaaatgacagtgtggagggacacgcattttgaggctcggatattgaaatttgttgtgtgatccaaatatagtggggaaaaaccggtgccaatttcacaatttaattactgtataccattattcaaaaattttaccgtatacccttcgagtttggtgttatcgtttactctccccctgcttctccaaggacacgcacacgtacatcatcacaccaagccgtgagcgtgagccgatcttcgaggtcaccggactgccccaaaatgtggaggcggcacggcgcgagattgagcagcacatctaccagcggacgggcaacatgccgatcaccgactcgagcgcgtccatcgccaactttgatctgcatgtgtgtcaggggtcatggtcatggagcccgaacggaaacgcagtaaatatgcctctctctcacacacaaacacggagattttttagaaattttgcttacctctttcatggaactaggccattacgaaatttgaaatgagacgcgcaattcttcaaaatttgtgccgaaattgtttttttttggaaatggccatggcacacccattttcggccaattcatttttattaaccaaactcatatactgtttttgaaacttgaaaatgggtgaaatttttgtttttaatcggttttaattgcgaaggatcataggagcaaagagctacttccccaggacttttgaattgtttttggaaattgaatctcaaaattcaccgcgttgacttcatttttcatgcacaaaagaaaaaaaaattagttggaaaaaagtttgcctagaaataagaagagttgtcattcaaaaattttggcacaaaatcccattcaaaattgcttttttcttaatgaaaataatgattgaaaaaatcacaccgcataaaaaacgtaaaatttttttgcataaattatgccgttttcccccgttcagaccgctgcactgcaggcgcagcacgcggcattgcacgcgaactcgacgaatcggccaaattatggtgcgcttgcggtcacgtccacgacgacggcacgccaatttcagcagcagccgcaacaccaccatcatcagcaagcagtacttatgccagcaatggcggcggcggcagctgctgcacaacagcaacaacaccatcaacagtttcagcagcaacagtcatccaatgcatgccatcaacaaatgcagcaacaacagcaaactcagtaccaacaacagagtcagcagcaacacaacgccaatcttggtaggtgttcatgtggacggatatgattgaaatcttgacaaaaacggagacggaaaaatcaaataagttgtcaattgtcccaatttttttgaaattttgcattttttagcccactctatttttggaaatttctaatcaaactaacctaggagaagaaaaaaaatcgggcttggttttcagatcgattcgactaaaattaagacaaactgtttgggtcgcaattttggttaacttaacggcaatctgacacgaaaccgccaacatagccaaattaaatgtaaaaatggtcatggcagattatccctaaatgaattgttgatcaatcaatcaatctctatgctctcgctgaagttgcttctcctttttgtaggactgagtttgggtgatttgaacggatgcttccgcagcaaccaaccacaacaacatcaacaacagtcacatcttttgcatcataatgactttgtgccgtcatcacatgacatgatgatcggtgctggcaccatcggcacgaagctgtacagcagcgcagccgcttcaccaccgccatcgtttggcccaattggtggcactgcaggcgctgtggcaccaccaacaacaaccagcacagcgacaacggcactgtcagcgctcggcacttccgtgtccagcaacaatttgcacgcaatgcttggcgcgttggagttggacaatggcgggacacctccgcagcagcagcagggccatgtaagtttaccaatttattttacattcaaaagccaatttttcagggttaaatgggatttttaaaatttaatttaaataggtaattattaatttgcaacgaatttatgtatgtatatacaatcattcctttttcgtcatttttagaaattttacggcattttttgaatgctaaaatttcattgttaaggacttacataaatttgttcaatgtaaatgcctgttttttttttaattttcatttaacttaacatttttattgcgcgttggcatcgatcgctaatggcttagttggttaactgtttgttttctctattgttttcatgccggttcggtccctcgccagtgctcatgattattacaatgttttggttgtctgtcaatgattatcaaaaagatcaagctcaacaggcttgaaccgaccctgtagacaaccactttaactctctctatgagacagacatttaaattttttcaaaattagaacctttttttcaaaaattgtttttggtaactccgtcactcactctctctgctctttcagttctcttctgccatcagcaccgatttcaagctgggcggcggctcctcctccttgcttctgttgcgctccacctccaatggctatggtgccggtgccggaagtgccgtcattcaacaacagaatgccgccaacaccaacaccacgagcgctttctcgccatggcgtatgccgtcgagcgctgtcgatgcaatgtcgcagaatgacttcctggacattctgtcatccaccagcccgtcaccttattgtcagcttccggtggtaatggtggtggtagtgcgggaaat

SEQ ID NO: 14359 - DNA, 1329 bp, Heterodera glycines
ctttaaatcttttaatgaaaaaaaaaatttttttttgcggagactggagtgcaccgcctgcagtgcaattagacgtcgcctggaattttacaaaaatatccttaataaataattgcactaaattttgcctaaattttgaaattccattttacaaaaattaaaattcgttttttaatttacaatcagtgaccaaacttcgtttaaaatggacgaacgcatggaacggtctttggttggtttcttcgagcacattcattcgctcatccaatcgaccgagtacagttcgcttagcaacttaatgatcctcatttacgtgcacactatcaccgaaaatggggtggatttggccgcgttgctttcgaatgttcttggaagaaaggtaaaacaaacaaaacaaggccttcaattagtcaatgttttcttggttattcttgccttcaattgtttgttttgggatggcgttcggttgcggagaatacgaaaaacttcttcatttttgtttgtattccgtccatttttttcatttctccgttccatttttcttttttttccttttaggtgcctaaaacgctgcacaaacagtcgctggttaaaagtctttacgttacccgggcactgctcgagaaggacgtggcggagaaggcggccagcatcagtgtgacgcgcgacctttgcgcacacagcagcggctatttgccggtccattgcattacccacctcctccattggcaatcgtttgccaaaaacggcacgcaaattcaggtgtttgccattgttttgagtcaattgtataaatatatttaaacattcaggaccttacccagaataaaattttggggaggcacagactgacaaaacgaagattttatttgtttttcgtccatacatggaaaaggggggggggtcaaccagaatttttgtgaactggtctggggggaggggggtcagtggccaattttgcaaaggggtccagccatgtaatttgacatttttttttgctgtgcgttttcaaaaaaaaatagaacaagagggccggcggtgccgataggcgccgtcggggaaaaatttttgaaaatttaagtgcaatttgttatttgattttgtctaaaaaatgaccaaattttgaaattttgggctttattttttaagaaaaaagaggttttttttgggggccggcggtgctgaaaggcgcctaaggggaaaattaagaaatagcaaaatttttcagaaacttcgctacgacctctccccacctcttttacagagaccctcctcgatgcgaaatggtcccacattttgggcttttgcgggcgaggcgaaggggggggg

SEQ ID NO: 14360 - DNA, 2429 bp, Heterodera glycines
  unsure (1)..(2429): unsure at all n locations
agtcccgtctgtgcatgcgnttgatcgcgctcacttatctgctcgcatcactttacaaattggacacccaccagccccgggacccttctctaatcgctccgatcagtcgtgatcaacacactcatcgacttgcacctcccaagccgtactcnccgcagttgtggaaatgcatacccatccgttatctgttgatcatggccgaccaacgacacaacgacttccaacacatcagacctgtgcttttgcgttatgttgtgttgagcatgccccatcttttgccggaacaagaccatttcgacgcgttcagaaggtcgacaaaaagggcaagtggggatcactggatgttgatggtctcgtattttatttttgtctcatttttctcgatttttcatccattgttgttacccttccccttctttttcgtgcgggtctttttgttttttgcaatttgtgctttttgtccttttctttcatctcccattcattgtcagtgcccaccaaaagggtgcctttgcttcttcgccccgtcgtcctctgctcatttccatcgacgaatgctccgtcgctttggaggaggccagcatttcgcacaatttcagtcgcctttccaagtcactcgacattctcttgggccgtgcaactgtggagcagcaattctgctactacgagctgatcctcaaggcgatgagtctctctttggacggaaaatggccacgggcactcgtcgacaaattgcaattggcctgggaacgttttgacaggtgggccaaggcagtgtcgaggattttgtacaatttgcttcggcagcgttattccccgtcgtcttcacgaggattctgtccgtctttggttgtcctccgctaatgccgccaaaatcagtgggctcgaccagcgcgacaactcctttctcattgcccacacgccgttggttctgttccgcgttgactcacgcattttccgcagtcccccgcacttgcgttgcttttgtcgttcgttgtctttttatttggccgcttcacgcgacatgaacacgctgcagttggtccgttcttctctgaacagctccaaaaggtccctccctttcatttttcattttaaagtcatttttaaacagcgaaattgaggagaaagaagctctgctccgttcttttggtggcactcaacgattggccgttgttcaaacatacattgaactttgtgacgacgaggacggcaccgaaattgatgacattgaggagattcggcagattttatgctcacaaatccaccaattgtttattgcggacacccatcttccaaagctcgtccatttcaatgttcttttatcatcgcccgattgatttggcattttcctattttcagatgtatcccctcaggcttgtccctgtcattgtgcaacgtgtaccctcagcgcatgtgctgatcaattccatcaacgagctgatcactggcagcaatttggagaggcgtatttttgcgattgtgctaatcactgaactgcttgaacttgtcagttcccacagctttgtgtcaactttaaccttttatgttttcatttttcagtataaaattccgagcgccttcgctgctctgtcgctgatttctgacatgttagatgccatgttggtcagcttggtcaccgacgaatttattgtcctgatgctaaacgtcgtcccgtctttggctcgcctcgttctcctgtcaccattccatgccgaacagtttttgaccattttggaacgcacgcggaaactcgcattcagtcggatggccatttatagcagtttaagccaggcaagaaaatcgccagaacggaaactgtttgaaatggtcaacaggacaatggaagatctcccaaaattgacataattatgcataatttattttattttggcgaagttcgcattttacaaattcatattttccaattgttttgttttggttatagtttttttttattccgtttctaaacatgaactataataatttgcgctttcaaaatggacaatagcaaaaagaaaaatgggacaaaaattatgttttttcttgtggtgttaagggagggatgaaagtcatcgttgtcagccgatttgtgccgtctccgtcctgccgtcgctccttccgccactcatttcccttacgcttccgtaatcgttcgccctttgccctccgattggtcttttttgttgctctttcgttacgattgttttcggcactgttagtttttcgctgatcaatgcttccgatccgttcggcattccctcaatgtcttgccaaccatccgccgaactgagcatttgcgtgtccaagacggagtagcgattgggccgaaagttgtggaggacatttcggagctaaaagggggagggagggatacggtgataccatatgcaattaaaaatgtacgatgggcacaaacttttcgaggg

SEQ ID NO: 14361 - DNA, 1637 bp, Heterodera glycines
tgaagaaacaacagacactgtaagagtcagacactattaaaagttaatgaaaataaagtgaacaatgcaccaatgaaaaaacagacagctgaggttagacactatttgttttatcattgtttttaattaaattttgtatgcttctaacttagtctatagtaaaccaaaagattttttttttctgctcgttttgaaaggaaaattctaaagaatatttctaatttaatcaaaagttttaaaaaattgtttattagcaaaaaaatgaatatgtgttattttatatgttagagacatggaaatagtgcgtcaaaatgagagaaaaagaaaaaaactttgcccttggaaaaaattttttcctattggtaactttttttgaaattttgcataggcccatagtttgaccccctctatcgaatcacagtttatttttagctgtctagtttttaactcgagatcggctcttccttttttacaagggaaatcttgacaaattttttaaattaacggggttttttggcgtttcgtctgtgcgcacttttggtcaaattgatgatatatgcccctgcctcatttaccagcgccatgcaatgccgcaggtgtttgatgctaagctggcgaatgtccacgccgtccacacaaattgagccacctgaaggggatttttcgattcaaagactccgtccgtccgttcaccgattggatcgtaatgcctttccagcagttgtaccaccgtactcttcccacatccgctgggcccaaccacggcaattcgcttgcccaccgacgctgacaatgacagtccgtccaatgccaattgtttttgcccatttggataggcaaattggacggatttgagttcgagacggccttcgatgggctaaagttaaaaaccacaaaataaaaactttgaattaaaatgtgcatgccgttttgattcctttgtcggagagactgttaatgcgcggctttagccgtatcattgcgaacataagcctgaaagtgcgctatttcatgcccccttcccaaatgggcgcaccccgcagaaaagcgtgcccttaaatattcggggaaatacgctgccgcggccattatcatgaaggaggccatgttaagagcttcgacaacttggaacagtacaaaaggggtggtgtgaccggcacggatcagaagcattcccaggcaataggtgaagccgaagttgaagctgacgaaggaggaagtgagggcgaacgacagagaagtccaaaggcctaaaggcaattgcttctcaatgaatggccaaaagggagcccatcgaagtgagtgagtgcctcgggtgatggccattcggtggggctttcgcatcgcctcggagaatgtccggtacgcttttccctgtccattcaatgcttgcactgtccgcacatattacaaagattcggtgcccattttggaggcttcttcagccgcctgaatgcgttgggatcgattggtgaaagtgatcagtgcggtcggaattctctagcaagtcgagcatgccacgacgctttaagtaattggagacgaagctttggaggatggcgagaataatggaagtgccgactccaatcgggtcgtaaaggcaactaaaggcggacaagtgccacggtcgcacccat

SEQ ID NO: 14362 - DNA, 1673 bp, Heterodera glycines
agtcttattttttggctatttttctcgtccggcgacgttttgttggctggccaaatggccgactgaccacaccgaagaatacaaagggcatttcgggcccagcatatcgcaaaatgtccagcggagacgcaggtcgagctcccatctcgtgcagttcgtcgtccaatctgtcaaacaagaacaaagtgttctgtgctgtgctatgtttggtcattactcctccaatttcgcttcttcgtcccctccggcggtgctcgtcagcccaacggatttcactgaactaatcgaacggcgcattctctccgacatccgcgccattttgcgttccgatgcgttttcgctgattttgcactgagtttcgacgtctgtcaaagtcatggccaaatttcataatcttccaattattaccaaaagcggcttctcccgcctcggctccctttggcttttctttttcaatttgttgggccattacctaaaatgccatttaattggcccaattgaatttcgctctttctctgttcttttgtcccccccccccccactttaaccctttttcatttttattcggcaccatttgcttgtaaacggagttgggccttcccatcagtttctcgtggttgcccatttctacaattcggccatgctcaaaaacgactattctgtccgcatttcgcactgtcgaaaggcgatgggcaatggtaatggtcgtccgtcccgaggaagcattgtctgaagaagggaaaaaatgccaatttgagtggtgccattcgcatttatcaggtgcacattggcacaattcggaaatggcaaaatgccaaccgaccaatggcttcctgcacaatttgttcactttcggcatccaacgcggaagtggcctcgtccaacaacaaaatgcgcgggttgcgcagcaaaacacgcgcaatggccaagctaattgtaaaacatttacaaaatgggatgggcaatccatttgtgctcttcgctgaccgttgcttttgtcctccggacaattgaatgccgccttggcccaccagcgttttgaagccttggggcaatttgttgataaatccgatggcatttgccatccgacacgccgtctccatttcctccttcatttcccttttatgaaatgttttccccgcttttcgtcctccaccttggtcgcttcttctcttcccatgcgcaaattgtcctccaccgttgccgcgaacagaacgggttcctgctgcacaaggccaatggtttggcgcagccacggcacattcaaatcgctcaaaggaacgccgtcgagcgaaacgcagccctaaaagaacaaagagaaccttttagctttctaccgtatcgttcggaccgttactgtgtctaccgtaccctgcagcatcagcagcagattacctttgtggcttcgtagaatcgcatcagcagtgccactatcgttgactttccacttccactgtgtccgattaatgccaccgattcgcccgcatcgatgcgcaatgaaacgctcttcagcactttgagttgggggcgcgagggataggcaaagtgaacgtctttaaattcgatggcgccttttacggcactcggacgaattccggccgaatttgtggcgttgagggagggcttctgaagagaaaaaccaaatgaatggacgaatttggtctgattaaggg

SEQ ID NO: 14363 - DNA, 951 bp, Heterodera glycines
  unsure (1)..(951): unsure at all n locations
tcaattcgattccatgggaaaggattatcattctactttttgtacctcttattggcaaaagaaaaatgttcccattaatggcactgaaattcatagattttttcaaatatatttgtctcaattttctgtaaattcagagcggttctcgtcatgccgtggccatcaaaatggagccgccgtccaatgggccgttgttcaccgaaatgcacgtgtacatgcgcgtgctgaagcctgaacacttggacaaatggaagaaggacaaaggtggggttggccgcagatttttgaggaaaattaaggtatttttagatttgtggaattttttggtttcttaactaaaactttgacttgtctataatttttggacttgtatttgttaggcataggcttacggatccgtttgacgccttgcggaacttttgtatttaaaaagtgcggaatttggaaagaaatctcccaattttgggtagcattttacccccccccccatttttagggcttaaattcctcggcttgccccacttcatcagcaacggctccttcacttacgaaggccaacaaattcgctacttggtcatcccaaagttcgccctttccttggaatccgtccgcgcggcgcgcactccgtcggcggtgctcagttggaccgaagtgtccgccgtggccaaaacggtggtgcacgcgttggcgtacctccacgaccaggggagttgggctctgttgtaaaatggaaaaacaaattttttttaatgctatctctttgggcgcttttgcattttctttttaatttttttattatcattttttaaatgtctcatttcctcctccattttgaatttcatttcttcagaattatgtgcacggcgatgtgaaggcggcaatctgatgatggagtccaaaagtgatttttcccggntcgtgctcatcgacttcggcctgggcaggcgattg

SEQ ID NO: 14364 - DNA, 3211 bp, Heterodera glycines
agatttttgggaaaattaagtattttcccccccccgaaatgaaaatttttaaaaattttccagcaaataatggaatttttctcgaatttccccccaaacgaaaattaaaaagtttaataggcaaatttcgtaacaagtagcactcaaatttccaaaaaaattttccggcggcgcctatcggcaccgccggacctacattttccactatttttacaagtttttttccttaaaacggccaaaatttggtcatttttagtgaaaaaaaagtgcagttgttacccagcagtggaaaaaaagtaattggttaaatagcaaaaaaaaaagaaggtctccaggtcgtgtccccccccccccccgaaaaatgtttctagatacgcccctgttgggtagcattttacccccccccatttttagggctcaaattcctcggcttgccctacttcatcagcaacggctccttcacttacgaaggccaacaaattcgctacttggtcatcccaaagttcgccctttcattggagtccgtccgcgcggcgcgcactccgtcggcggtgctcagttggaccgaagtgtccgccgtggccaaaacggtggtgcactcgttggcgtacctccacgaccaggggagttgggctctgttgtaaaatggaaaaacaatttttttaatgctatctctttgggcgcttttgcattttctttttaatttttttattatcattttttaaatgtctcatttcctcctccattttgaatttcatttcttcagaattatgtgcacggcgatgtgaaggcggccaatctgatgatggagtccaaaagtgatttttcccgggtcgtgctcatcgacttcggcctggccaggcgattgcccgacgcactggtggagaaagagaacaaaaagcaaggcgaggagagcagttgccattgtgaatttccaattcgcctgaattggaaattcacaatggcattttatgccatttaaatgccggcattttcattttcgattttggcatttatttgtttcttttggctgttcagctcacaacggcactccgctgttcacttcctgcgacgcccaccgcggctgtctgccctctttccgtggcgatttggagattttggtgcacaacatgttctactggacgaccggcacattgccgtgggaagtgagcacaaaacgggcacaatttgaattttcctaaaaatattttgagtctttatacctcctttaaaaactttttaaactttttttgccggagaattcgattttaaattatgaaaattaaaaatttcaaattttgaaagaatttccgcggcggtggggcgggggaaggggaggcaaaatagaaagagcactaaaaatttaaaaaatcttaaattcttcattccaaattcacaatttaatctccattttccgcagtctgtcgagcaaaatttggacgccgtgtacgaggcgaagaagtcgctggtggcgaacgcgcgccgggaggtgccgcgactgatggccagcagcagcggcagcaccgagcagagccaaacgcagcaaaagcgacgggcgaccgccgccacggccattgcggcactgtacgcacactgtgccggcatggaattcggcgagaagatggagctggacacggtgctgcacgcgctggacggacgatgatttttgatggcatttttatggctggcagcggcggtcgacgggaaaaaccaatcattgaattttgatgattgattgcattgaaaaataccacaatttttattttatttattgtttaatttgttttatttatgtatgactctcttttttggtgtatctcaacatggaaggaaaggggcgacgctttctttcctcccctaacaatttgagcattgtttttttttcatttcctttatttttctttttgtttatctctgttgtgtatgataaatgacgtcatatcccctaaatttcaactaaatacagttaaaatacttaattttaatatctccaaaagattttgggggctaattatcatctttatagtgtttttattgttttggcattagtttttgatatatgtttataatttgccttcaattcattctcatttacaaccaacccaattttgccttttgcccttcccaacaaatccctcccccggggggtcaacttccttccgcccccccccaagggctgaaatttatgcgggagaaatggggcggcaatgaatggattggatgtgtggtgccggtgattaatggcatttatctttttgccgggagggcgcccttcccggcaaaatgtcggaagagtccggcacaaatatttgtgtgtttggtgcccgtttccctcccaccgcaggcggccgattatttggccctattcgaatttatgcggcggcggtggcccaaagacgccgccaaataaactgtgaaaatgacctcaagaagggcatcatcggaaaagccaattcgaagtcgaagggggtggtcaatttgggggacggcataattcggaaattatagaaatttgacagtctttggactacatacctaattgagctaataacggaatcctaaatcctgttcatggttgaattggatcaacggattgccgagatcagtccgagactctcggtcctggcacttttccataaaaaagtgccggaagttcgggtaaattcacagtcattggactgtttacctaattgagctaataatggactcataattctgctcctgcttgactggatcaacggaatgccgggaccagttcgagactctcgaccttggcacttttccattaaaaaaatgccggaagttccggcaaaatgccattgtgagtgtctgtatgccttctcctttgcccgggtccaccgttctctccgaattatataattacaatttatttctcatccaatttcaacatcaaaaatggtgttaaatttgctttttattccccccccctcaattggtccccattttcaattgttcttcaaaatgttcctctgtcgtcgtcgtcgtcaaatcaaattcctttcccctcaattaatttttcacttcccatttctcctgatcacattccgtccaatttgatttgattaaaaaaagttgtgtgaaactcaattttattccgtccgaacaaatcacagagcccaaagcccgcaaaaaaagagagagaagggaagtgaggagatagcgatatgaaccccaaaatgaaattcaaaat

SEQ ID NO: 14365 - DNA, 1313 bp, Heterodera glycines
  unsure (1)..(1313): unsure at all n locations
tcgtctctaattgcgcattatttcttccctttccatctctttccgtctcttcaattgttccaatcacttttttctctctttctctctctttctctgtccacctctccaattcagctaatctttcccaactctttttccatctatccacgtgtctgttgttctatcctcctcaatttagcgttttgttcaaagggaaattgagcccattttcagtgtcccctcccccggccccgtctcgtgtcgtccgtttgttttttcgtccgtcgggtctattcctcatttaatttccgtccgtcgcccctccggcattggcaccaattaattgcctccagcgagtgccctcctcgacgacattaattcgcctcccctccctcggccctttcgtttgtcggccctcgaatttcatcgctcccaaaaagggcacgcataaagcagcacaggtaaagcattgaagatgggaacgatgtaagcctgaaaatacttcttcccccacccttaattggccattttctcatccccccccctttagggcatttcctccggacccctttcttttttttgtgcccacctttgctgcgcttttgctattagcataatttgtgcccttcggtcgacgccaaaccctcaaatccttcaaataaataataataattaccgccgccaccggcaaatctccgcggggcaaaaattggcgacatttttgccaaaagcaaatgaaacgaaacgacagcgaaatcgacattaattatcccattgttgtgctgttgtttgtgctgtgaatgactttttacgccgttggcacaataacaacagcagcaccagcaacagcgtcggcatcttcgcgcaatggcaccgccggcgccgaaaactcagactcaccgccgtcgttgttggcaccagcggatggcatgggccacatggtcagccgatgagtccatttttcagagctcatttattaatttaggcaaaaataattaaagtttcagttttaaataataatggatggatatttttttaattatcccccaccagcaccaattaattttcataattccactaattagttcctttaattgttgttgcttaatcatttgtttaattcccgccctcacatgacaggagaacaacccgtacgcgttggcattggcatttgtcccgctgatgaccattttcggaaatgcgttggtcatttttggcggtgtgccgcgacaaatccttngcgcacgtcaccaatttgctgattcagtgaaggtggtggntgatcaacactaattataaatttaaaattngaaatgatcagtccatttatctga

SEQ ID NO: 14366 - DNA, 3127 bp, Heterodera glycines
  unsure (1)..(3127): unsure at all n locations
tgatgagttagctttttacagtattcctacagttacatcgccatttcccatccgttggcatactgtcaaatcggcaccaattcccgtgcctatgtgtccatcgctttggtttgggccgtgtccatctccgtggccattccgctcgccttcggtgggttggacaaatggctctaaatttgatcacaattctgataaattagcaaattttgttcaggtgccaatcacattgagagtgaacacgagtgcgcattcacaaacccaggcaaatgatgaagcccaaatcaagcatttaaaaacaatactatggacaatatgaaacatataatagtgatcaacccttctcgatcattctatcatcactcatccgatcagtttttgtaaataagaatcgaaaaattaattaattaattaatcgaacttaaagacacccaaagaatttaaaatttttgaaaaaaaatcgaacgaccctcactcatccatctgatcaatcctttcccgatcacctctcttccttatcaacatcgctcagtcactcttatttcgtcgctaactaatcgtatctgatctgttttccttgctgggtcaacatcctgtccaatcatccatattctccattttcactccgataattctcccaatcatctgatcagtctttgccagatcacttccatgccccaatttgtacagtgttcatgatcagctcctcggtgttgtccttctttttgccctgtttgaccatgattgcgctgtacgcggtggtgttcaggcgattgcgcgaacgcgaaagcgcacgcaccgcgcggaagcgacacgccgcactcagcgggactgagacggcactgatctccaacgcactgatgggcggcgcgaaaatggcaccatttttaattaaaaacaaatttatataaataatttatttaatttttaaggcacgccaaatcgcgcgcagccatctaaaggatcagctgctgttggagctgagcattcaggtgggacattggcattgccatgcttaattacttttttgaattgttggccataaataattaaatttaaaatcgtttaaatttaattactttcaatttcattggttatctccaaatttgctgcttcattggtgctaatttcccccttctgcttcttcagacttcctccttcccaaccgccagtcgttctgatgaggaggaagacgaggaggacgatgacgaggaggaggaggacgaagaagcggtggacgcgggcgaatccgtcgccggacgaacgcattggcaccgcaacgacaagcgcggtttggcggcacaagtggcgcaagagtgccacaaacagcaccagcgaaggcccaccttcggcctaatgatgaacggcggcgcaatgccattcgcgacggcaccgatgaatccactgcaggtacatacagccgagggaggaacagaaggatgaactgacacaatttgggaccgttcgggtattacaatcctcgagcattttagcacattgacatacagatagactaattaatatatatcaattagcgaatgtttcaagcttttcttccctgccgactcaattcattaatcaatgtttaattaactgtttgtttaatcttaattgcttctgaccagcagataatcagtcaaaaattttccttttaattaaaattggcattttaagcgctaaaagattcaggccaaggaatgttaggtgatcagcaagcaaatccaagccctattttgatcagctgtgatttaagccatgcttttgatgccctttcagttgccttccaccgctttgacggacgcggagcgtcgcgtgaaggggtggcagcgaaagcgaacgctgcgactgatgcgccgctgcaacactttgccctccaccgtaatgcagcgacagacgacgacgacggcgccgcatgggacgacacaaaaggcaacgaaaaggacgacaatggcacggggggaaagcgatgcaacccaggaacaacagacaaagtcggacacgacaaaatgccaacagcaaaggcatgagtcaccaaaacggcaaaaaagtccaatcggagacatacaaaacgcaagcggtgttagtgttgaacgggtactgctcgaaaatgatggtggccgggagcaattctgtaaagatgttgttgccacggcggatacaaagggccttaatgagtgggacggcgaggaacggtccccttcgcccacccttgtgcatttgtgcagcagtttcggcgatgagttgggggagtgcttcccattcatcgaccaaaatgagcaacaacaacaactacccgaggaccacaataacaacagcaacaaaaatgccgtgagtgtcaaactatacccaaccaattaattaattcactaattaccccattagttattgcttggtgacgagtcgactcccgacgacacgcgccgctgtgttggcttgtcaaatggaaaagcagcagaatcggatgacccatcgtcatttaatgccgcggcacttaaaatgcaacagcgaaatggcagcagcaaacgcggcacagtgaggcgaacggcgacgacgaaaaagctgcagaaaggcgcaacggaaaagacgtgccatcgaaacggtgatgggcagggcaatttcggcatgcgacgaacgcactcggaacggcatccagcggacaccaaaacgcagcaacggattaggcggttgtcagccgatggaagcgcgtgtgcttcttgcgcgggatgggttgtcattgtcgggaacgaagacgaaaatggtgccaaaaacaatggcaccgacaatgatcgactaaatggtgccgaatataataattatcgtaatgataatgacaatggcactaccgctgcgggatcgccaacgtttggcacaaacattgagcaacggaaaaagaaaagcaccgcgcgacaagtgacgaaaggtcggcaaagtggcctttcttccacttcaaagcacttttagacgctaaatacgggtcaaaatgcgccgctttttccacaggtgccactttggcacttcgcaacggcggcggatgcagcgcgacaccgccgctcctcctgcaacaacgacagctgcagcagaagcggcacaagcagtgcggcgcaaatgttggcacgaccnntgcaggcat

SEQ ID NO: 14367 - DNA, 1971 bp, Heterodera glycines
  unsure (1)..(1971): unsure at all n locations
tgaaaattgatagaacaaacattttcaaaatgggaagaaacatttaggaaaagaagaaaaaataaaagatatttgaaaaatatgaaattcgattggagcaaaaaatgaaaaatttatgaggcaaaaaaaagagaagaccctaaaatgtatgatactgatattgcaaattgttgaaaaataaaaataaaatttttggaaaatcgatcctaatttgtaaatcataattattggcatatttaatgaccaccaaagctttataaatttttgtcatgttaaattttttggctttcctcacagatttttaattcagaatttaattcaaaaataaagaaaattaaagacgacacaccaaactttatccctgaaaccctaatcaatgagcccattgaatggtcagtctaacggtctttggaagacaacattaatcagcaaattgatcaggctgatcattgtctgacaattcgttttcttttaaacaccgttatctgacaagaatctatccagtcggtattaatggggtaaaatttgtcaaattaggaaatgcttggtcagtttatcaacaaaataataattgttcttgaaataagaaacgtttcaaaaaacatttcggtgactgaatggtttaattgactcctgtaattatccctctcgtcatttgtccaagttcattgacaacagttatctcttggctttgctggttataccccaaaatttttaaagttgcttgttgtccagtttgacttctaatggtcacttcaataggactagcataatgattcgttgaaataattgttgcacggccagggtttccgcgtgagttaattccactaattgtacggccaggttggacttggaaaattaattaatattaatttggcataggacaataatagatacgaaaagcaaaaaaaaaaaattaaacgattaaagatttcgaaatttaatatttgaacaaaatttaatataaaaaaattagttacgctaaaagctaattcattttataccaaaatttaaaataaaaattcaataaatatttatttatttcattacacaattacaacttacgcattcctcgtggtattggagtaggttgtgctgttccatcttaattctctgatttttttttatgtttcacaatctcagttcctatttatgggccagtaggtccaagcgaaagaaaagctttttcaaggccttattaagccaggcacgagtttttgaaatttgttttaaaaaataagtctaggaaaaatccagagaagcggttttcgggttgcggttcgagttaacccaagaaaaacagtgtctggctttacatggtccaggtcaagctctagaatttttctattttttataagcaattaaattaatgtttgctaaattattcggtattactgcttacgcattgcatatggtcgcattggaggaggttgtgctgtgccatcttaattttttctaattttatttcgattcccgtttgtggacctggaggtccacacgaaatccacgattttcaaggcctaaagccaggcatgggttttttgacatttattttagaaaaaggtaagcccaggaaaaatccatggaagaatccaggttaccaaaaaagatcgaaaccttaaatctgcttccaaggaaaatccaggccactacacctggtctggtagagctctattaatttactaatttttgcaaaataaaattaattaaattttatcctaaattattcgattatacaaatttagcttacacatttcatatggtcgcattagaggagaatgttctgtatcatctgaattttgtaattttttttaaatttanataaaatttttaagtaaagcaaaaaaatgtataacgcaaaatgattatttgaatgaatatttattgtctctgncaaattattacaattggagccaccaaacgcccaatttccnagattntgtagacctttgaccatgctactcattatgc

SEQ ID NO: 14368 - DNA, 2695 bp, Heterodera glycines
gatttcaaaattttgcaattagaatttcggtcaaaaattctgtgttctgcgatccattattggtataaaaatttcgtaaatactagtaaaagagcattggattttttttattaaattttattttaaataagtatttaatattttaattaatttagttttagtttttagggcaagaccgaaacagagagactcacaaatatttgttttaaattttaaccctaaaaacttcataatatgaatttcggccaaaattccggaatctatggccatcacttataagctttcataaacatggatttggtattatttttataagcttttataaacatggatttgttattatttttatttcaaattagtatttgaatttatattcataaatgggcattcaatttgattttaatatattttaataataattaatattattcattcaccataactatgttgaaagttatcgggaggaatgtgaacaggaaagtcatccattcctgactctgaaataaaataaaatattttttaacaattttgaattcaaaataagtaattactaacgataatgaggctgatggtatccatgtggtggtattcctcgcactggtgatatatgattatcagtcttaaaattatatatatataatactcaaaatttgtgagactatatgttttttcttaagaaacgataaaagtgcaaattggtaaagtctcatgtcatatttaattcatttttgagctttttataaacatcataaaatgatttaaatcatttaattcttagtatcatttgatagctttaagatattctctagaagaatttataatttccaaaaatttgttcttttcaaaaaaatacaattctaaaaaatcgaccctttgaattttggttttgtaacattttatttttgcaacatttcttgaaattatatattcggaataaaatatttataaattttttaaacaatatcaattttgaattgatctagccaaaacccggaatgctaccggctcaccaatattagtttttaaattattcaaataatagaaaaaaattacgcttgatgatcctcctgacgagtttcgtgcggatgacgtgccgccgccgcttcctcccccaccaacgctcgtgcgacagaccgggcaagatgggttttgagtaagcctaggtaattaggtaattggtgtcctgaacagtgggcaatctcgatcagtggacagtccgtccgtcagttaatttattttttggcaaagatccaagccaaaataataatttgattaataataatattaggctttttacaaaatttcatattttctaaaccttgactcattttttaactaatgttttacaaaaaatcatccgtcccgactttatatatcgagctctaattaataaaaccattattttatgtaatttaatattattctcaccatctatcaacgcatgcagtgtgaaatttgtgctaaaaattaagaaatgattttgatattgtgaaatttgtccataaaaaaataaattaaaagtacaatataaaaattaaataaatttatattttaaatttaatgcttaattaagccacttaaaatatttaatgatgttagggttgggacccaattggccggtacccattttgaccctttgctttattgtatttcccttttcccttggttatgtcacgcccctttttccgcccataaatacccgcgatgttgaccctccccgttcacttcattcatttgtgttatttttccttcttgttatttaaaaattcctccccatttattttgtgtctttttcccctctgctccaaataaatattgattatttgtttgccatcggccggcataacaattggcgacgcccttacgtattgcactgtgggcttatttattggaaatgtggaagcagttttggatttgttggtttgcttgaagcaaccaacaaactttttccaaactttggactcttaattggagggagaggtcaacagcaatcgaaagtcatcgctgctggactacatttgtttattatctaggcgataataaacaacatttttgttggacctgctaaagttaggtactgttagtagttgaaaatttgcgctgctgattttgtgtcttggcgacacttttcagttcatccacgcgcacccactctgttaacaagctaggcgctgttagcaatagagtggtgaacggcaaaaatgggagacgcatcaatccaacgattgacggatattttgcagcagttgttgactgcacaacagcaaaacgcgccaccggcacagaatgcctctcaattgccaacacttccggacgtggaatgttttgatgctagtcagcatagtggctgtgaaattgaggactggctcaagcgatttaagttcgctcttgactgtgccgcgccgaaccttcaggacgagttgaaggtgaagctgttgatgaccaaattgtttggtccgacgttcagcgaatattgtaagtccgtcttaccgagagaagtgaccgacttcaattttgtggagactgcagagaagctgaaggcattgttcagccgacctcaatccgtctggattgacaggtatgagtgtctctgcgtctccgctcggtgaaagacgacgacgaggattttggcaattttatcaaccgtcaaaagaagcttctgcgggatttcaactttaagaaattgaatgaggag

SEQ ID NO: 14369 - DNA, 1688 bp, Heterodera glycines
ctaaagttgcagcgagtagttcatcttaatttgctttacaatgaattaatgattttttcaaatttttaaattataaaatttaataaaaaaaattacggtaaagcatttgtatttgtatttgtatttctgttgctggtattccgtcgtccaactaaaaatggtagcagtgacattttgattaaaaatctgccaatttcttggtcataataattgttttcgataaatgttatgattttttttaaggaaagagtaaaattttttaaggcaggaattattttgggaagaagtcatgcgttttctaatattaatttttacaattagctacatttttaattttataaatttatatattatatgctataattattacaaataaaatgatttattgagaaattgtagaactagttgtaagcagcatgtcaaaaggattttcgaaaattaatgtgtgatttgttaaagttttcaacaaaaaaatctcttttaaaattcgcaattttaaatgatggctccgaaacaattttaaaaaagtcatttaaattgaaaatatttttattgttaatctctcttacgaataacaattaatgaatagtcggctatattcatgtttaggcgtccaatgattgaggccgctcacgggttctgaaggacacaacttttttcgtacttggccagtgccaacatttttcttaatgcatttttttcttttcttgtatttaaaaattcttaagaccttaagttttcgtattattctataagaatgtaggcattgaccaaataaaaaaagtatggcctaagacattgacaattgtcattggttgaacaaataaaatggaacaaagccgaagattcatttttattgaataaaatttatttttaattaaagcaaaatttaaatataaaaaattgataaatttaatggaattaacaaaacaggcatttaacaagcgatatccatgtaatttatttcgtttttatcccctcccccctttaaagttgctcgtcttaagtgctttttattactaaggaacgagttattacaaacactttttctagtgccttatttggcagaattaaaaaaaaattttaagaaaaattatgtgagaattattatttaaatttgaaaatttcgagattttgttacaaaatttggtattatcgaggaaaatattgaaataaaaaaaacatgttacataattttccccatcaaattgtggttcaccaatgttttaaaacaaaatctgattattccaaggaagagattttccaatgattgctgaaaacgaaattccttcgaaaaattttcagttttaactaaatttcctttttactcgaaatacaaattgccattttatgcaaaaaaaccatttccaataaaaattttagcatcaaattagcaaatctcccacaatcattatataggctaaattcgtaaaaaaaatgtctactgttgcaagtattggttttgatttggttgtagaacgcgcagtattcgtccagtattcaaatttccttcattgtcccgtacagtaatataattgttgtcggttccaaaccgttcaatgtatacagtttggatattgcgaaatctgtcagcaactgtcatataaggtgggttcatatgcaactgtacatctacaacttgtacagaatatcttcgacctcttatgtctatcgcatcaataattgag

SEQ ID NO: 14370 - DNA, 1315 bp, Heterodera glycines
  unsure (1)..(1315): unsure at all n locations
ataaattaaatcaataaaaaattaacataaacantctttgaaaatataaaataaaatactgcagatcaacttcttctaagcattgcatatttaaatgcaattacacacaaaaaaaacataaacaaaaatgacaaaagttcaatgtattttctaacaaattttaaataaaaaactttcataaattttaaaactatttgtataaaattattccatcaaagaaaaatagtacgagagatggtgagcctctagaaaaacaactaaaaattatgataatacatttaatatataaaaaatatttgtatgtgaaagatataaatttaataaaatagcatttgagtcctagtaaaattttaaggaatctaatgatatttaaattataattactcttgtattaaacggtgctatgacgaagcgaaaaagtatgagtgtgggcgaagcgaaaaaagtatgagtgtggggtgatcggagggggcgggtcatttcagtacggaagagttgttctaatgatcaattaattatttaaatttttaatctattaattagatttattgaccataattataatttcgattattattttaatatttcccaaacaaattgcatttttgtgagagaaatacagtgccacaaaaaagtcttgactcaaacctgaaaaactatcttatagttcatttaaaaacttgaataattcatgcttgtataacttttggtgctgatcaaaaaaggctcttataccaacttgatcagatcactgcttcctagtgactgggataccccaaaatgcactgaaaatcgggaaaatttaaaattcctagggggttgggaaatcttttctagaaaaatgggcaagcccactgaaaaagcaccaatttgttatcgaattgcttttggaatggttggtctacgatttgtatatggaaagttatacttggttgaagaattgatcacaataaaaatgaactttgcctattttgtgcctatttaatgcatattttgcgattgtttttctgcctttttaggtgcctttttcgtgattttttgtgtctaaaaacgaagccctacttattaccgatagtcttacacacgcattattgtaatggtgtttttaattaactaaaaccaaaactgcgacagaagcgcataaggtcattaggcaagtgtggtgtgactgattatataaatgtgttattcccgtcatttttgaacttttgaagtgaaaccctgaaggtaaattttttcaactccaattcaaatgaatttcgtaaaattatctttaaaatacgaaactgctcaaataaatgaaattaattttact

SEQ ID NO: 14371 - DNA, 1469 bp, Heterodera glycines
acgatcgatgcgacccaaaattggtggaattggccaaaagtgttcgatgggataagctgatttgtaggtgcatatattataggaatttttaataatcaagacggcttttggccagacaattcattggccaactcagtccctctggctcgttttagccatttaaagaatcgtttaacctttatttaattgtcaaacccactcaaatttggtgtcattaaaaagctcttaacaggctctaagctaaattaaattcaaacgcaaatatgaatagctttaaagttaatcaaataaataatcttggtattagcgataactcaacgtttcctctttaaaatctagcaaatatttacagagttgtaactaaaaaatctcttgaaaaagcatcactcaatattatagaaaaatcctattaatattttctaaacattgagagttttcgaatgaaaacaaattggttacaaagaataaagttttgggtttaaacttgcggacggacaaactcagaatttagcacacacttcattgctcagattcggttcctccaaataaggacaatcataaaagtttgaaaatttaatttgacatccgttgtcccctcctctcctcagccataagctaattgacatttcatttcaatttattaattggccagaaattgcaatgcttggcttcccctgcgtgcgtcaaattgccgaaatgtggttcatccgatctccgaaaacggaaaacaatgttgtcaaagcctttataaatggatagtttgtttgaatgcttattgttgttgttaatttttttctcaacattgttcagccaatgtcaaaagcaaatgaatgtgcggcagtccccttccttggttttctaccgggtacatccacgcaatcacttcaccaaaaatctttactttcgttatctgattcataatcgctttcactttcaaattgaaaactcttactaccaaatctggtctatcaattgatgtctgttcatgaaacagattctcagagatctcctcccattgcgggttacatgtcatagtcaaaaatatatcaggcttgccaaaccgtcgaacaactgccatagcatcctgaaaatgcttttcaacatatctcggactatttgtcacacttggaggaagaaaaacttccttcccagtggcaaacctctttcttgtgctcttctaatcaacatattgtcaatattcttgtaagcatcagctaaaatccttttctgattgttctttatccaactcattctgtctccttcaatcttaacatattcatcaacacaatactgttgaaagagctttcctccatataaaatcggattaaattctctttctctaattgccaaactataacacaaatactgtagtcttgtcactcttctgttacagttctctgtttcatttcagggtgtcaaccaagcgtaccagaaagataaacagtgggtaagtcattggagtcaccatc

SEQ ID NO: 14372 - DNA, 827 bp, Heterodera glycines
tccggaatatgtactgaacaataactcgctttgaatcgacctgcttcaactccttgtggtgctgttgtcgcaaccgtttgtagccgcacatttgctcgtacaaattgttctccgcttggtaatcctgcacttcctgggcaatgattttcgttgtcctcagagtggaaaatttcgatcggcgcaatgtgttgatttcatcctggaaatgaaattaaatagcaacaaaccaaaaagtaacaactcaatcccaccacccgtactaccttaacttgttgctggtccaaaacaatggaaaacgctggcgctccttggcgctgtgcttccccattttggtcctgccccgtttcgttgttggtgttcgacgaggtcagcgagtcgtcgtttccgttcaggctgataattgtacggttccgagtcggagataaatgattgtgagccgtctcgacgccgttgttttggcactcttccgccgatggctgtcgattgtggcattcttcgccattgacgggctccttaaagcgccaaagagggtggcatttatcaaccattttgaatttggggacttcaaaaacacctccacgctggcctcgacactgcacgtctccgaaaggcgctcattgtcattagactcctccagacagaccaacttgcgcagttttccgtaccgcgagtggtcctgctccttggccgcctctttcattcgtttgatcagatcagaaatcacatttggaggccgttctctgacaacgaaaggatgctgaaattgaatggaaaattgcatttggtaaatgagtaaaccaacaaaaaaacaccttttgacatgcact

SEQ ID NO: 14373 - DNA, 1716 bp, Heterodera glycines
  unsure (1)..(1716): unsure at all n locations
tgaaatgtaatttttgtcggtattttaaaaaccaattattattaaagttggaccaagttcaatgcaggtgatgccaaaggaccaaatgtcggcacgttcatcgtaaacaccgccagtgtcttgtgcgattatcacttccggtgccatcctaaacccaatttccgagaatttaagtgggttttgctttttaaatgcctaccaatatggacttccaacaaatgtttgggctggcgaactgagagacgcactgcccaagtcggccaatttgacaacacccgactcggtgagcagaatattaccagcctaaatcagtttatttgagcattttgaagatataatacatgttcaatgggttctattggacagatcattttttaaaccgaacaaatattgcgaataatgggcaattttgtcacccaaaatgagcctaatttataagtccgtgtccattcgaaaacaaacggtgctcattctcaattgtttggtgttcgcttgcctttatgtcgcggtgtatcctcttcaaactgtgcaaatgtgcaatggcgttcaaagtttgctcgcaaatcgctgcaatttccacttccaggaaagcctttttgtacacctcaaatttaatggaaaaattattaaattggatttaagggggagagaatcaccaaaaacctttaaaatatcggcagtcgacccgacacaatattccatgaccaacctgaaaataatatttagtgagtgacgagccaaaggaattttcgcaggcaaataccagcaagagtgctccttgagaaaggaggccttgtaacagacaatgttcgggtgccgaaccgacttcagaaagcgcacttctctgatgatatcgttccatttctcgaccgattgtttcccagagaaattcattttctgaattcattcagaaaacgtcccaaatcccaagaatttgttgttacttttatcgccaccgtttcttgcgtgtctttgtcaagtgcctaaaaatcgaagaaatttgtttcggtaacgtacttaattgcgaacacacacataaaacactgatccgaatgcgccatgcccaatttcgcggaggtcttcataacgctgctcggggtccttcaatgagaataattcggcgacctcgggatgctttaaatttgctggtttcaattttgtgtttgagggcatagcatcaagcttaaaaatttacaagtttataatatatagggtccgaattactatagtttaaacaccctgtttttttcctgagcttaatttgccaaatcccatcaacatgccatcttcatcttcataccaatgccaaggctgccgcactaaccccgacaaccgaaatccggttttttcccgatcagaatttttgtcggtcggcctacccaactctcgagctctcgactcgcggcaaccctgctattcggtttacaatttgcgatttcgatattcgaaagagtgtcaaaaatatttatttggcattatgttttatgagcattagacctgctgttaacggttaaagcaaaggatcttgccaaaaaaagcagaaaccaaatttcgggctcctttataggaaaaagttgaaacttttcgaaaagttagaaattcttaaaatcaaattacaataacttaagaaagtgcataggtatgtttaatcggaggttncatccatttttacttnacatttagctacatgtgattggacattgattttaaatcaaa

SEQ ID NO: 14374 - DNA, 800 bp, Heterodera glycines
tttgcaaaaaataaataagtaatgaaaaagtcagaatttcgaaaaattgtagacgagcaagcgttggcattttttcaggttaagttagtcctttacaatggagaaggcctgcaaaatttggagagattatatcgattttagtgcgctaggttcgatgaaactttttaaaatataagcctaaactttttggcctgttttaaaaggaattaaaaatttttaaaaattttattcatctcccttttgatagaaaaagcatcagagagccttatttaacttttaatgaacatttggtgcgtttcagagcagtttgtgaaaaaataaaaaaatcgattttttcaagtgtccgtttggggtactcaaacaattatggggagcaaaaatccaacgcagaattaaagtccaggctatagggaagctattcctgaagtactccggtttttccataacttttgtctcttcccccccccccccctctcctcccccctcttttgccacccctctctctcttccccccccccttttccccagccccttccgtttccccggtgtttcttctgcttcttccaacttcgcataattttctgcctggcttctccttgcccaccccttttttgactgctcattcatttgcaaaatgttgggacttcgtcgacttttttggccgctgtctctttcaaataaatccaattgttcagcacatttttgccttttgcttcggtagtcgtcgtactttttgcccccgggggttgttctgctgtaaaagatatcttctgtttctgctttttgttgttgttgtccgc

SEQ ID NO: 14375 - DNA, 3147 bp, Heterodera glycines
ttctatttcaaaaaaaaaaaaatttcaagggcagggcccctccttcccgaaattttatttttttaaaaagaaattgaccccttacaaaaaatttcggttgaccaacccacatgcacaaaaaggaaaaatactacaaatggcaacgggtgtaaaatcgccaaccgccaggaaaaaaaatatttttttcttttttgaaaaagtgtaccgtgatgagatcctggaagcccacgggcttgtgaaggtacggaatgcgatcggcggccatcatctcaacaaaaaattccaccgaagccaacgagccaaactcgacgatcaaatggccactttgtctgtaattccacgcctaaaacaccgacagattatacagagagcaatgtgcaccagagatttcaaatgagcagcttcgcccaaaaattaaaaaaaattcatatcgttagattttttaataaaaaacaattttgaataaataataatatagccttaaatttaatattatttttgtttgaaatttttttttcaattttcgatgtggggatcgtaatgcacccgatacagaacatatgcagttcaattcttaaaaaaatagataaaactcggtttgttttttaaattctaaaccgaatacaatctttggcacaacaattaaatttccctatgaaaagggatttttttttattcgattgtaaactgtcaaatttttttttttttttgctgcagcccaacccaaccccaaagcgcataaacgcacctcgaacgtttcaacgaaacggacctgcaaaatggggacaaaatcatttaaatattttccatccctttttattaccggcccgatttgctgactgagtttctccttgagctcgcgcccgcgcattcccaccggcacattccacatgtaaacctggcaaattggaaaatataaaatttcatttgcataacaaattggagatacaagagtttagcacaaacttgaaaacttaagccgaggtgaaaataatttttgtaacatttttcgtttttttttgaggcagggggggcatcagcggatatcatatcagtattcaaaaattggccagcacagctgaacaaacattttcccatatttttgccctataaatttgcgtttatatgcctaaaaattgtgtaccattttattaattttgtggtattttttggcatatatgctaaattttggaccgcaatttcactgaattcgaccactgtttaatgcttatcaacataggtgaaccaaaactcgtggttttttccatgcaaaaactcaccaagaagttggaggcgacgttcaggtgtggtggcgcccggcgttcacgctcggccattttgtttgagtgcgggtggcagtggtaacgtacgatacaatgctattacaaaatgcaaattaaaaaaaaacaaaaataaaaaatatgaaaaaacaatatgacgaggcattaaagaaccccaacaatcaaatggatacaaattggaacacagaaacccactgtattattatattatcgtatatgcaatgacggctttcaaaaacaaaaacaaaaaaaaacaattaaattttgggtgccctttttcatgttcggtccatcatcagtttggcctgctgttccgactcgggttcgccttcctcctccagacgttccttctccttgacagccagcaccttttgatggtagaaaaaaacaataattacctaattaataagtgctgcaattatttgacagacaattttagctaagaaaatttcgtaattcgctataactttaaaaatgctattcgatatcagtgagcttaaaaacaacaaaatatgaatttttaaaatttctcgaagggcgggggtagaaaacatgaaagtacaaaaaaaaattttttcatggcaacgaatttgtctgaaaattaattttaaaaattctggcagagaggcctactcccccacattcctgtcttttttatcaagcccatcatcaccaccgtccaacctggtccaccatcgacgcctcccatggttcaactcggtgcgactcatggtacactgcggtgagcagatatgcgatgtagtcgaggttctgacgccgcagggggcagctgagattattttaaaaaattgctttcagtaacgaaaaattttaaaatttaacaaatgaaatgtgataattattagggtttgtcgggaccgggaattttgaggttgaaaaaccgggaatttcccggtcatggtcaaactggccaaaaccgtgacttcggtactcagttttacgtgttttggtcacggtcccgaccaactctaatgattaacgataatttgaaaggctggcctttttcggtccagtttgtacaattatatgaaaggagtatttttgccaaaaaaatatgcctataccctcataaaagtttcgtttttcatatttcgtagatccaattatagttagaaaaaccggacttgtccgccttgaaggtcacggtgtccgtctcctcgtcatagcgatcgccaaccaactgacgacatttgttgtgcgcatgagtgtcctaggacaagaaaaaacattttttaaaaaattccactggttgtgaattcagttttcggcgcaaaaactactacaaatccctgcttttctgccccggtgctaaaatttaggaaaaatggagaaaaaatcattgcacggaagagcaaaaataaaaacaaaagtttcgggcgactcgcatgaaaacattttgtaaaacacaagtcatgtatcctaaaacagttcttgacttttgacaattaataatgacaaaattgcattagttgttattttgaatgaccgttatatttttggcaatttttttatttttttgaattttactctcagatttatgaacaatgaatgaaccgccaaaattacccccaaaaaatgcgtttattttggctctaatgcactttatgagtccaatcgacttttatgagagtccaatcaattggacaatcccgggtttttatacaataactttgttcatgttcaaacaaaccctatctggttggtatcattcgaaagcacaaagtctgaataatgtaataatacgagaaaacaagagaattctaacattttaggaaagttacaaacgaaaataatcagcaattaatttattaatcaattctttttt

SEQ ID NO: 14376 - DNA, 3275 bp, Heterodera glycines
  unsure (1)..(3275): unsure at all n locations
aaaaaatatggggaaagactaaaaaatcacgggttttacacaattgggaagaaaagagaaaaaatcaatgatttaacaacagcttttaaaatattaaagggttaactagcctcgatgctggtaaaagcttccttttctcagaaaggctcaggaggcctttacttttacgggtaaagcgccacacggccaaaactcaaaataatttttcaatagaatagtaaaaaactggaataatcttccagtggtagcggtgcaaattaataaggcaaaggaattcaggggtttactaaaagcaatgagttctgagtaggattttccatgttgccatatttacactatatttttatcacctgtgaatttttaacatttgatttatttttatatattttattacggtattcattttgtattttttatttgatcaaatttatttgttttctttttgataccatgtaagagcactaatgtgcctttggtttgctcgataaattaaattaaattaaattagattaagaaattccctggtagaagtagaaaacaacttaacatctttttgaattttcttagagttcattcttctgccaattcttaccgtctctttctcttacgtcctttcggcaccgttgctaccgtattctctttaacatcaaactccgttggaatggtacggtagagttgggacattggggcaataccattgcaagaacattggcatttggtattggcacatttgcgcacgataaaatttattgctaaaaaatattttaatgtatttttagcatcaaaatacataaaaataaaaccattataatttgggattaaataaataaatattattgtatatctttaaaaatgatttttaatgtatctttaaaaatgatttttaatgaagtgtttttttattcgacaatttgagaactgattcacccaccgcctcctccattcactcgccaaaacgattatctggctaaattcccttggctagaagccgagcatcaaaagattagcaattaacggtcctccacactccgccccctttttgcttctgctgccttggccactcgccgtcgcatccctttggtttgattggccatatgccgcgccgctcgaaattttggcgcaattttttggtgttgttgcaattggtttaagctattatagaatggagtggatgacaaactaacttatcaacatttattaatttttggtcaattgaaaatgcaacttcattcaaatgagtgacagttaaaaaaaatcccacttaaaggtaaactttccgtgaaagaaaactgtttttagtccatattttagtgatagtttgcactggttttatgaaagactccggtgcatttagcaaaaatgaaaataaaaaattttattttataatttctacaggatgtttattgggttttcatgtttatctcttttaaatctatcctaatctcttgcaaaatcccttctgccgctgctccatcactgctccgtgttgcccttgaccaatgccaaaagtgcgtctcggtaagctccgctggtgtcccctttgatcgcctcctccaggctcttcttgtgcaacgtgtgaaaagcgtgcttaatgggatggcaaatattattgttaaatctataaataagaattaattaaggcttttgatttcttgaacattcaattaacagaatttaaatttgaaagcactttgatgtcagccaggtcaatctcagaccgagaaatgaccagacgaatcaaatccgagtcgcgtgtgccgagccctgaaaaagcagagagattaataaataattaatgcagttaaataagtaaattgttctgattaataaatattgattgatccattaattattaaatttacctttcatcgaattgaacaataaatccgcaaaaaacacagaagcgttgcggacatatttgattagtgccaagaaactggaaatgaaagcattaacagcaaatgacattaaaaatccaaataattataaacattggatccaattagcctaattagactgtctccccttggttctcttatacaatatcatcactaattggttcccgccccttctcccattaccccgtttcgttgtgaccgctgaattcttgcttaattccctcctcaatctcgtggtgcgcggcttgtcggtaaaactcgaaagtttcccgaagctgaaatttttaacaaattatttgcaatcatattgttaaaactgtgaaacattttcaactataaataattgattatatattaattttaattaattattgtctggtaatggcaaaggctttgataagttttgtttgcctgggcgaagctgcgagtggcaaacacctggttgaacaccacggcgttaacgccccgtcggccctcgccctctctgaacagtttcatggcctcttttttattatttgctttcatttttcatgttattcattattttatttgttttcttgaaataatagttttattttttcaatttgccatttaatgatgttgtttatgtatgtgctaattgattattttattaattttttccaatttgccacttaattacgtcgtgtgccaatacaatgcttgcgggcgcactttcttcgcgagagcagctgagcaaagacaccaacagattttggaaaggtcccttcgtcttcgctttgatgtcctcctccagctgattgtgctgatgccttctgtccaactgctcatacgcctgcttcagcgccgttatttgtcggtttatgcgcgtcgccaaaatttcgattagcaccgccctacggtaacaccgtaatgaaatgtatatacggtaagccatgaggtaaactgtaactagaatccaccatcaattcgatggcttatatgaacattaattccgccaatttttaaaacaaatagctaagtttctcctgtggtcattatggcgtttataccgtaatctatcacttaaacctgttgagctactggcgttcctttttgaagttctctccatgtgctttatcccaattcaattgtaaatgtactcactcattggagccggacaatgcggcacgcatttggttggcatcgtaaacggcgggcgtttgcatcaaagaaatgctttgtaaatttanatttaaatggctgtttttgcattttataatttacatcagttcttcaaagtcgcttttgaactcctttttcagcatggcaatcagatcagtgccngaattgttttttgaactccaagccaatgcttgacgctaaatttatgaattttaattaataatgttaaatttg

SEQ ID NO: 14377 - DNA, 1737 bp, Heterodera glycines
  unsure (1)..(1737): unsure at all n locations
acccgtacnnggttcagttcgtcccaccagcgaccgcaagcgtactcgaagccatcctcttaagcaggcaattagtagccacaattatcaatttgtatcgaactgttcgaaaatgttccgccattcattgccaaattttcgcctgcccagccgttccacgagtgcgataatgtgcatttgttggcccattcatccgcaagtttggccaagttttcgtcccattcaaacttgcgcatgttgcccgcctttggcattttgttgccgcccaatttattgtcggcattgcccagggctaattgcgatcggaatttgttgtgacaattgacagccgcttctttgtcctcattcgttggcgtttttgtgtattgctggacggatgggccttgaaacgattagcaaaataattacccaattatcccgctaatgaatttaaacaattgacttaccgaaaagcatgaaaaagagggcgattaagttaatcaaatgcatttgattttgcttgatttaagttgtaatttatggttttcttctgttaattttttcggcttataaaggccattccgtccgttttccattgaaaaattaaagctgaataaatttgattaaattttaataatattttctcctcataacttttcaatgaattttgacagaaattaaattggcttactgaacaaataaataataacacataaaataataaagttctggtggccatcccttttcatcaaaaaacgattctcaccgctgcgactgttcaaattcaaaatttattgaatatttcaaactttaatattgttggaattatgtatatgtataaatccaaaaattaattttacttaagatatgcctaaaaaagatcttttgactggtcttaggattttcaggcaaaaagtgtgtgaaaagaaaaaaattcggtatttgtaggttttgtcaccccctgaaaaaaattttaaaaaaaaattttttctaagccgatatatgtgaaaactagggatgagaatttaagtcacgaaaaatctcaaaaaagttgaaaaatcgcgccaaaaagtcacgaaaaagtcataaaaatgccaaaaagtcacaaaaaatgccaaaaaagcactaaataaatccaaaaaagtcctgaaaattagccaaatgtaattaatagggattctttttttaggcaaatgcctaaaattttttcgcacttaatacgaatagataagcacgaaaaaagccctttccgcttggtcttgggtgcgtacgatgacttttataatgcctatttttgcctatttcggggtttttgtgtagaacacttttgaagtcattttaaggtcatttagagtcagcaaaaaaaaagtcattagacttaaattcccatccctagtgaaaacgaaaaggtaatagttaggtggttcccccacttttggcagaaattttttgttttaaaaagtcgtgaaaacatgtttttaatgggttttggggttgcttgctgatcacgaatatggcatccattttggcctatttcgaatccctggcccgaactaaacaaaagtcgaaaattcgaatttttcagaaatcacttatattatgtacgaatcttttgagactttttgttcgagttcgggtctggggttcgagataggacacgtgatcagcacataaatcgtcctagaaaaaattatgaaaaaaatttcaaaggggtgacaaaacctacaaataccaaaaattcgtcgctcggcttttaag

SEQ ID NO: 14378 - DNA, 3995 bp, Heterodera glycines
  unsure (1)..(3995): unsure at all n locations
aaaaaattttattttagaaaaatgttcgaagccgggttcgggcttcgaaactgagccaaaataaggccggattcgtgctcggcgcctcagattaccctaaaaacaattttctaaaattttatttaaaaaaaaaatttcgggaccaataacctataccattgccaacttcaatggcctccatgcgaataaaccatcgaaaaccgattccccgacttactattccgacaaaacttcgtcattgctctcattgtctgcctttctcttctaaaataaatttatatcggataattcaatcaaaagggttaaaaatgcaaccaatgttccatttttcttccgaggaatgagtgccattcggtcaatgacaatgccggcgaggccctcaggcgaaagatggccaaattcagagacaatttgcgtcagatccaactcaggaaacatttcaatctaatttaagcaaaagataatttcaaaagtttgagacttattttgcgctgaaatcactcacgacatctctgtgcacaattttcgggtctgtcccttggtttaattccccgtccatttcgaactgttattattactggcgtcactttcacaaccaccacacctcaaaacctaacaaagtgaaaagagaaattactgaattagaaaatgtttgccaaataaaggagagagacagaaaatgtatgacggatttcgtcccagtccaaagttccctaaaagatggacgaaaccgaaatcacatgaagcataactccaaatgaaatttggcataacgtttgttcattgatttaaaaataataaagtaaaactggaaatcggaataagtcctaatctatcagcaaattgatcctctcaaaaaatacccatgcttttgttaccagagtcattagtttaaggttattttttatttcgtttctcccttaaaaatagactaaaaattatatatcgttcttaacaaacctataatatttttaaaaattttgcccttcgtttggacccttgtaaaatgggaccgtttccctaatcccgacccggatttcaaaattccaggctctaaaaaactaattcgaagtttgaaaattttttaagttaaacaaatgaaaatagtaaagatagcattacttattaacgaaatgaaatgagttcataaaagattcaaacttttatcaaaaaacatcatttggtgttattgctttgtgatttgagctctttggtcgccttgtaaactccgttttcaaaaacaaccaaattctgtttgatttttctctgcataaatatttggacagcttccaacgagggtgccatttttccgggacttgtgaagtttttgaacatccgatgcaaaaattgggcagtcagaggttcacaagttgccctgtgcataagctgaaagaaaaggcaaatattgagcttgcagaagaaacaacgaggcaaccgcttaccaaaccctttgtgtagttccaatactgctccaattcctcggccacatcctcaaccaacggcttctcctcctcctcctcgtcactgtacatgtattcgtaaaaagtgccgctctgatggacagcgctctgagaaagattagattctatgcaaattgctctaaaaataatataattgaatttataccaccccttaatacctgcttcaaatagttttcaatggcttccgttgtcgagactaaatagaatgtgtcctcgagagttatcgggtcactgggcccttgggagagaagtcctttggatgtccaccagtccaaccgcttccttaggtccaatatttccagttcggttgcctcggcaagtgatgcgacgtcccaaatctctgaaaatgagttagacagttattactacaactatttaaagagctatttggaaaagaatattttaaaaattaaaataaaaaattcttaaaaaagatgaaaattttcgatatttcttgtaggtacccctatcaagatcatctgtccaaatcgcaaaattcgctggaatccagatttttttcaactgaaattgattttctttgctaatgttttgtcccggcgaagttttgttcttctccgtgagaacttaatgcaccccactagcattaagttgcttcacaaattcaaaacaagtccacttacccttttccgtgaaaagaaggataatttgggcttgggttaatggtgcaacaatttgaacatttctcccatcaagttcaagctccaattccacctcaattaaacatttacttttgttagtatttacgttccgtttacttgggcattgtttgtgtgccaatttatggaccttgccggtttgtgttggataaaaatttcagtgtaacgactaactgcttccttaaagacgggccgaaatggcgtctcgctctgctggccatcattggcaacaatttcaggccaataattgaatgaaatgatccgtggacaaacggaaaatggcaaagatgcattcgcatgacttgccattttacacgactcgcgaatgtcacgcagcataacctaccaaaatgaacagaaattccaccaaccgcagtcatcccgaggtgtgcaaagagactgacctcgcaatggttcagctctccgtcggtgaagcgccgtttcattgtctccaaataattgaactccgactgcaaatagcggtcccatccgttgtgcacgagtcgctccgccagcaagtgctgatactccttgacgaacaggtccttactcccgtaaatgctgaccaacatgttgaacacgtcagccgactcgcgaaaaaggcgactttcttctgcaaaaagggaacaatagcttaaaagattcaaaaaacaaatccaatcaattttgattaatgttaaaacacttcgaggccattttagaaaaatctgttgacaaatcccataaaaaattgccaattgccgtgtccgaatttttttctggttacggatccgaatgaatggaatgccttttccgcccttttgtcattcccacttggatttgcgtctattgggtccggcgtccattccatccaccgattctccaaattgtcgtcaatcatgatcacgtactcgtcattcactcttaatcattggaattttaaggaacataaaattaaagttgttccaaaaatgtaattgaatgggtgaatattttctgttttattccatcccaaactccactcgtgcagttggtcttcgtccagcatcagtgtcagtcggttcgcatttgcaattgccatttgcgaggattggccatcgcccggcttctccgtggtgataaatgttataatcgttcgcattgtgtcggggcgttgtctaaaagaattgctaaatgcacataaattggtttggtgagcttcggtttacttcacatagtcgcgaatgatccgacaaattctgtggacaagaacaaacgaacggtcgcattgggccaaatattcgacgattgtcgcataacccttcaaaatgtcgtgggtattgactcctgtgtaaacacaaaacaaaacaatgaatccacacattccgccaaccaatgtgcagcagtctttttctgaccagcttctccaatttttcggaaaattgttcccgcgaatacgaatcatagtgacgaatgagacttttaatacgcgaaatggccgaattcctatagaaaacatgccggtcgaacatgtcaaaaagcataaaaacaataaaattctattgaaaaaatatcaaacaaaataattattcagcataaacaactgttaggtgcacgaagaaggaaaaggtttatgttgagccaggaattttatccaacaaatgaattgaccaatatcaagcgaaatcaaatggacccgtaattggtttggagttgaaattagaaatattagcatcggctgttcctttcccgggtcgttgtttgcctcgactactccgcgtcaccatcttcgtccgacaacaccatcatcgtattctatagtgaattatgctttattaaaagataaaaaanaagatattggcttgccttggcacattga

SEQ ID NO: 14379 - DNA, 3757 bp, Heterodera glycines
tgattttgtttaaatttctaattgtaaattaaaaaaaaaaatttacggctaggggggggggatgaaacgagggggagggggacgaacggttcctgttttcccccaccttgaatcgtgtgtccggcacattggcaaatgcgtccttctcccactgctttttggtgttggctttggggtcggcattggtgtcggccttctcccacagcttggtgccatgctcgcgtttctccagctcgtattcagtgatcggcgtgcctccgtcccgcaacggtggtgcccaatggagcatgattgagttgtaggtggtgtacagtgaatccggtgggtagggccgccctggcacattgaatggcgcgttggccagcagcggttcgtccgcgcagcgcacctaaaaaattggaaaatattaactcattatttcaacaaagagtaaagtttaatttctgggtcttttgtaataaaaaattaaacacaaaaaatttgagtctaaaaaagctttggattttataaatacccaaaaacggataaaaataataatatttgttatcataaattcgttaattaatgataattatgcatgtttaattaatattaaatcaattaaagttgattaattaaatgttatttaaaaatttaaaaataaaaaaaaatacaaaaattttaattataaaactaaataaattttaaataaaatcaattagcaaattgcattcaattttgcaaaatttccacggggcgtctgcctattggcaccattggatcttaccacccccccccctccaaaaaaaattaaaaaaaaacacagagaaaaaaagtggcaagaagcaaaatttggccccaccccctcccgcctcaaaattattcccacctcaaccgtcgtcatgtcgagcagctgctgctccccctcactgtcggccacttcctcgttcggtgcctcttcgtccccagcgtaagccgctgctgccgcctgtgccggccggtccgccgcggtgctgccaacgcgtcgccttccgccaccggacgcggtccgctcctgttcatgattttttaaaacattaaatatttaaaagttttgtttcgattatggggacaatttaaagcaaaaattttacaaagaaaaaagatcaattttagaaaaaaattttgaatattgatgctttagcggaaacatgatcaacagaagaggaatcattgaaaaaaaatcaaaaaaaaatatttgtaaatattttataaaatgcaaaaatatgcatcattaaaaaaaatttttttttcagttcattataaaaattttaaaaaataatttttctcaaaattcccaataaataattaaaaaaaaccgaatttgcttaccgtatttttgggtcgtggcagcgtcaagttcttgctacaactaaaaaataaaatgaattaaaaactttttttttttcattttttgttttgtttaaccaaccactgtatgtccaagggggtcaattcaatggcatcctttctggtacttctgcgcggctggcgacgacgggcggtggaggacaatggttggcctgctgatgagtctgaaacaaaatgcattattttaataaaacatattctatataaaattatgtgaaaatataattatttaatttgaaaaaaaaaacaataatttattttctttagtttgaaataattatttttaaaaaattaaaaaattaatataaatttaatattataaatatatacataatttaaaaaatatatatttaaataaatgaaaatattaatttgataaaaaagtaaattttaattttccttttttagtgaagaaataatataattaaagtacaaatattttaaaattaaattatcattaaattaaaaattaaaaatgtccgtggaaaatgtttaactattttgaactaattaaaaattataaaaaatgaaacggtttaaattaaaattgaaaaagagacaagcggataatcgtttttgaactaaatgccgaactggtaaagaaagccttttatctaagattttccatccaaactcatttcttacccaaggatggtccgatgccatgtgcagacgaaggttgtgccgttttaggagttcggatttgcgtggcgtccttttccttttcgttggcacgctgcgatttcaacggcacaacactgggcttctgcacagacacttctttgctggaaatttttgtgccatatttaaatgaaaattaattttaaaaaatagtaatattttgagggctcctggaaaatgcgtcagtggaaaaggtgccagtaatacagtatttttataataaagttactactgtagcattaagtattgtattacaaaaggtcgaaattgcactgattcactgacgcattttcctttcacgatttttatttaatcgaaaaaattgaattgtcaataattttcttttgccatgtctttaaatttgtgtcaccatcaaaaaaagaagaggcactaattttttttttttgaaatttctctgctgactttatcacaatggtcgggcaagcgccagccgtctcctcgatgttgatgggcaacgtgtgcaacgacggtggactgcgtccgtgcgagttgagcgcaatgacacggaattcttcaaaaagaaatttttgaaaaaatttttttgtttacctactaacaaattaaatattaaaaaaaaaattaatgattcatcataaaattttagaaaaatcgcacgaaaattttcgaagggggggggacgacgcgggagaaagtgaagtacacatttaaaaacaattaccgtaggcctggaactcgcgcaacccgggcaccaaaaactcggtcaatggacactgaaattttaacgaaattgtaattaaaataaaaaaatctttttattgggacccattaaaatattcgttgtgactattgtatatggaaataccgtaccatatccggtgttgccatctcccattgttcgtgaccccattctcgcttctgcacaaggtagccctccagtttgcagccaccgtcctcagctggcggttgccaagtgagcgtcacacaattaggacctgagtttttgtaaaaaatcaaaaatattatttttggcgttccgtctctaccaatggattgtgcgtggacttgaattggcattcccggcggaccatagcgttgtcgcaatttgattcggtcggattggggcgacggtttgctccaacccgccgcattctttgccgcaacgcggaacacgtactcgccccggtcgctcagattttgcactttgaaatttgttgaccaggtcgcggattttttgcatgtaacctaaagaaaaaaaaaaaaaaaattaaattttgaattttcacaaaaacggggcaatttttttaggatattcaacgcataatcctaatgctatgaaaattttctttgtattttttataaaaattttcgtttttttctaaatttttttttaaatttcgggtgtgggaagcgagctgctcacttcgagaaaaaaaactcaacaataattacaatacacaccaaatactccataaactcacccattcgttcgaatgttggtccttgtgctgtagttcgtagccacgaatttttgccccgccgttggatgccggcagctcccactccaattcggcccatgttcggccaaagttgcgcaccacggggtttgtccggctggcttggcaccgagtacttgacaaccggctcaggcaacacctgtgttttaagcgagtaaattataattttttatttttaaaatgtctatttt

SEQ ID NO: 14380 - DNA, 1681 bp, Heterodera glycines
  unsure (1)..(1681): unsure at all n locations
tttataaaatttgcncaaaaattttccaaatttgccaatcaaaaactatagatataaaataaaataaatacacatntattaatgacaaaataaaattctaaaaataatggattcacaactttcgatgttgatgcacaagttgatcagataccccacaaaattgatatgcagtgactcaattttagccccgaaatctacttgaaaaacgaaaatttgggaaaaatttacatgaatttttcagattattattcgcctcaactgcttagctcataaaatcacattataaaaatttaatttttattacccaattcttcaaaaaatttatttatttttttttttgtttttagacaattcaatccacaaatagtggtccacaaaagtcggtccgcaaatgtcggcgaaccgttcgatcgcatagtcacaggacagtacgtcagaagtttcgacgcaatattgaaggagttgagcgtgttgtataggtgacgggacgttagtcaaaaaccatcaaaatgggcgttagtcaaaaaaccatcaaaatgaaaaatatcgatttttgggcgttagtcaaaaaaccatcaaaatgggcgttagtcaaaaaaccatcaaaataaaaaaaaagatttttgggcgttagtcaaaaaaccatcaaaataattttatgcgtagctgatcaaaacgggcgttagtcaaaaaaccatcaaaataattatacactatacgattatggcctatatgcatgcaacactcaattaatgccaaccacttccaaaatatttgccgcactgattattaattaatgccaaactatcatcaacaaaacaaaaccaaaatatttacgcaaatgatgacggcacaaatttattaaaatattcgataatgccaaccaatctccaaatcaccaaaaaatataaacattttattcttgatttttcattaataatgtaaataagcataaaactctcatttagttattcatgtaatttattaaatataacgaataaaaaattaaataatttctttttaggatggaaattccaaaatctgtttatataactattatttttttattcgttttattctttataaagcgaaattaaaatccatctataatatctggaggaggtagaacttcaaattttgattcggttataaataatgaaacgatcaaaaatttgctgaataaatatgaaaagggacaaattcattcaattaatgaattattagctctaattaacgctcaatcgtcggtgaaaattagtaaaccaacattagagcgctacatggcaaaaatcaaaaaaagtcttggagctgcttattttgtagcaaatcaaaacagaaatactggtgaaaacttcatagttcggcacgaaatgagaacgttttgtgaaaaatgggactataatttcggtaaaaaattttcaaagaaatcctataataaaaaatttagttgaacccgattttatctttggaaacaattttgaatttaatcccagtcgttttggcccgggtatgttggatttatttaaatcaactatacttttaaaataattttaaaaggccaagtgtctccaattattggtgatggtaattgtttttatcgggcgttatcattgttgctgactggtgatgataattaccatacagctaaagaaataggcttgactaatggaatttttggaaa

SEQ ID NO: 14381 - DNA, 1555 bp, Heterodera glycines
tgctatggatgcatcggaacattttaaatgggcatctaatcttgacttcctatgtgctgcaaaattgtcaaattaaatgttatcgtttgtagcccaaatccacaaaattccaaaaacgaaattaaattcgtatggaatgtttatacaccgaattcaaaaaaaaacacggtaaagaaaatattttgcaaaaaataattccttctctaggtattagtagaccaagatccagaatacaagtcagtttttaattattatgatggaagtggttcttttaaacaattaatttgggaattttttatgtaaaatattaattttcttataatttttttgcaaaattctttggaaataaatttgataatctttgattatacggctgtttggaagtggttggcattaattgagtgttgcatgcatataggccctaatcgtatagtgtataattattttgatggttttttgactaacgcccattttgatggttttttgactaacgcccaaaaatcttttttttttattttgatggttttttgactaacgcccattttgatggtttttgactaacgacatagcaccatcaaaactaaggacatcttagaacacaagaatgccatttccaaatcaggacaagtttaaaacattgggacatgccaaaattggcaatgattcctcgaaattccggacatatcaggatacacgattgaatatttctaaatcaggacaaaataaaaaattgggacatgcaaatcggcattgcagtaatgactcattttttagatttgccttgatttggaaatcggaaaactgaagtcttgagatgtcaagaattttgaggaatcatacgaacccagaattacaacaatgccaattttaagctgatgtcctcagacgtccgaaaaaaattcataaactcgctattctagtgtctaaatttttcaattttgaattttagaaaaaattatttagtttaaaaatatagcataattgaattttttctaaaaaattaaaattttccattccgtcacattaaatattaacattttgagtttttctttaatatagcgccaaaaattttctttcgaaaatgtttttgcaaagaattgaaaaccaatgggtcaaaggctgagaaactcttggaatttttaacagatttttaagagatttgcaatattaagcattcataaatagtaaatgccttttcacttataattttaacaataaaataaaaaattttatgcatggagaaaggataatttcattggcatttaattacaatttttgagtgccaaagtcttatgattctcaaaactcatggcattttgaaagattctaactatccaaagtgacaataaaattaacagaaaatgcataaaactgtaaaaaagaaaattaattaatcatttttcatgtaacagttttaatgagatttttaaagagattttcatcatttttcatgtgaaattcataattatatttttattaaaaagttttgaaactttccgtctcacctctgaaagctaataattaatccaatggttttttgaaatagcttaacaaa

SEQ ID NO: 14382 - DNA, 1517 bp, Heterodera glycines
cggtattcatcgatacggtgctagtgagtttcttgaatcgcaagggactcgaaaacaaaaaaatttaatacatcaaatcataacttgggtcaaattcaaccaaattaatatttcatgaaatcattcaaaagctctaggtgttctctatcagaatattaatttccaaaatgctttataacattttttaaatattttttttaattttattaatcacgataaagatatcgctccataatattaatttggttgaacttgagccaagtatcaatttttatgtgttacattttttttccagaacccattggcggaagaaacgcgcaaacccatatcgcgaaatatgacaaagaatctaagtatcattaatataaaatcaattacaaattctacactcatacgaatgattttaatttgatggtgtgggattatttatgaggtcggaataatttttgaaaacgcaatttttatgtcgttttgtcttttgaaataaaatgcaatggattttttgttttaccgcatgtgtggccgagtggttaaggcgttgcgtttatatcgcaaagggatatttcctgcgcaggttcgaatcctgccgcatgcgtaccactttttttgttaaccaacatacaattaaaagtagggaccagtagaattttgctaaggccgaccggactttgaaaatataccgggacgttcccgggatcgggactcccggggccctaacccaacttttgaccgggatctaggactttttcagaaaatttgaaaaaaaagtttaaataattcaaatttttcaatatgttctctacaaatgattagggacaggtatcgaattatatttataccaacgatcaaagtatgtatttaaaatagcaaaaaattgacgaaattattgaataaaaatgaaaatttgcattgcaaattttaaagaaatcaaaaaatttggaaaagaaaaacatataaatttgttgattaattttagaaaaatttctttttttatgtggatggattttacggaggtttttaaatgcatttttgaaaatgagcaaaaatataacaaaaaattttagttaaaaaataaagaaattttagtggatttgttggattgattcgaatatgcggggttttttcttctcaaaaattgtgttcatccttctgagtcgcatatttacgtttattcaatactttgtttttctttacatctcaagtcagtaaattgaaattttcagctgcacatttaattaacattttcattgaattctgtttaccatttgaattaaaaattatatgccattagcgtaaaataaaaaatttgtcttgtcgtacctcagttttttgatttaattaccgtgctgtgaaataaagttaatttaaatttaattattgatttaaaaaaacaaaattattattagcccattattttatagagaatcagtgagactcgccatgctttagggtcttgcttcagatcaattcccgggtttttcttgaaaaataaacaataaaccaaatgagaaaaattt

SEQ ID NO: 14383 - DNA, 2630 bp, Heterodera glycines
  unsure (1)..(2630): unsure at all n locations
tggtctttactttttcttatttgcatacttcaaagtatttcgcgaacagttggcatttntaaataattgttnggaccaaaaaaccaaattctaaaaattttgacacaaaaaaagaaatgattattagttgacaagaagtcagttggcgaaatgtaggcgaaatgaatgtttttggcttagttagcgaaatgtagttgtgccgtcgttctcgcacgaaaataggcaaaaaaagaagcatttttcggcactttttaactttcaacttattattctcaattcaccatcaattcgaattcgactttcttttagattattctagagtgcaacgagaccgggaatttttgcaaaaaccgggaccgggacttgccgggaccaaccgggaatttaaaaattcaaaaaaattcaaaaattttttaaaaattcaaattttaatttttttcaactgaaaataatacaaaattaaatttttattttgttttttatttaataaaatccaaaagttaaagctaaattaaattaatgaaaattttcaaacacatttctttaattatttcaaacaattaatcattttttaactcaaatgatcgaatattattagaaattcagatttgcttttcacatcactttttttcggcgcgctttttccgaaaaacttttcgtgaagaagggggtccggcggtgccgatagtcgttgccgggggaaattttgaaatttgggtgtaatttgttaacagattttcaacaaaaaaggttggtttttgggattattaagctcaattggtaggattttcatttagaaaaatgataaaatatgtatcaatttaaaaaaactatgaggaatcatattttgtcgataggaaacccatgagtatacaaaaacaaaattcaaaatatcttaatttctgtagagggactgaaccaggggaaagaagaacccaaaaatccgagaaaattcagtaatggtaatcggatttcagagaccgaaaaaaccggaaatccggtaaaataaggataaatacacattccaaaattaaaaaagaatgccattgtaatcaaatctgctgcattcaggtgctgcaatttcgccgccgtcgtcggcgtcgcaagcgaatgaattcggctgcgctggcactaacagattccgacctaaatccaggccgtggctttctaaaattcattacaattatttttggattgatgctgtgttacgagattctccaacaatgttatcatgctggtggactcagcctattagaacgccaattaattgcaaatatggttagaacgcgaacgcctcaggcaattaaatgtaaagagaatttgcagggggaggggggggggagggtaaatggaaaaaccctaacccgaatattcgtgatgttttttacaacacaaaagcggcatcgcgagggggtagtactgtaattcaattaaaatatttcatttgagcggcgattgatgctttcaatgcgttggacgaaaaattttatgtggcgaatgaggaaggcaattcttgcccaatttgtaaagagattgtgcccgggacaatggccaaaccgttgtcatgtaatgtaagaaaaaaaacaaaaaaaatttatttatttaaatttaaatatgcaaattttagcacattttccacaacgaatgcattttagcatggtattttttgtatttgtacatttttaaagagaaaatcatttttattaaggcttagcaatcatttcacatgtccatactgccgctttggtaatattttaaataattataaattattcgatttttaaattattaaattgggaaaacagttttcctgaaatttctttaattgcctgaaaaattttgttttatatcaattcctgcagtaatgctttaaatcaagaaatggcaacccaaagtgccttcggcgtttcgtcaaatggccaagagaatggtgccacaaatggaaacggagtagcccaaagtactgctgctgtgggaaacccacccgaagtggtcattgatatgccatcggatgggcaaaacggtggaaacactgttggaacggggacggacggtaccgaaacaaatcgacacaacaacggcacggcaaatgtgggataaattggtggacgaattaagcagatggggtcgacgaacgggtgatagattgacaaacagtgattgttcattgacaaatgacaaattgttgtcatttgtcaaactccaaaaaaatgttagagataaaaattagaaaattctaattttttgtgcgctgcttaatcccttagaaatagcttaaaaattcttttaaacattaaatctttcgcaagggtgtctcaggtcaagggcactacgacggacgattgagacagggggagggcggggggggggggggtctcggtacagagttttcatacgaaggtcataacttttctccggaggcgaccttttatttttatttttttgttatctcgagacactccttgcgcatgtatgatcgcaaatgaaaaaatggtagtgaaattaattttgtccacaaaagaaattttttttttcagattttccctgatgcatatttcttcttaatgggttagtgggaggaggcacggagaggtcgataacgaccagaaaaaattgcattttgaattgga

SEQ ID NO: 14384 - DNA, 989 bp, Heterodera glycines
ctaaatttacaacgtttttatttttaaatttagtgtaaatttgcatatttttgaaatttttccttctcgttttctcattggctaatgcatacatcaataatagacaagattaaaattatattcttttatttaaatttatattttaataaaaattatattttgacttttgaatactcaagaatttttttgacaaacatatgccgatttagtgtgaagaaaccaaaaccagtagagtaacttttctgactttcagttgttaaaagcaaatataatgattatgttgctagatattatgtttgcatgcttagcaattgaagttatttggacccgaaaaattttgatcaaagatgatttttgattatgtttatagtaatttttttttatttaaaacaaatttataagttatcggttcatttactccgttttgtaaataaagttatagataattttttgtattatcagaattatttggaattaaaaacaattaaaacttaacttaccaataaatcaactttattacaattattttcgcgcttcttttctctctaacattacaagttccattttttttacttcataagtagggctgtgaattttaggttttaactaaattttttgctcgattgatttgaagaaaggagctcaaaaaacgcatttctgtattaaaaattttcgattctgatgtcactatcggtcactagaaatcactattttggctacttcgtcactaaaatagttaaaaatcactattttggcgttttgtcactatttcgacattttttggaaaattccttaacaaaaatgcaataaaaccaaaaaatacacccctaagaatcgacctaaaaattttttcaaaaaatacacccctaagaatcgacctaaaaattttttcaaaaatacacccctaagaatcgagctaaaatttttcaaaatatactcctatgaaaagaaaaaaaattttctcaaaaatttactttcttggcaaaaat

SEQ ID NO: 14385 - DNA, 1788 bp, Heterodera glycines
  unsure (1)..(1788): unsure at all n locations
aaaacggcaaaaaccgtattattcactctcatcgggagctgccggaggggcctcatttgccctaatttggnatgaaattttggagatgttatcggaaggttttgaaaattatgtaactttttaaaagctgcgttaagataacgatttattatcggcattgttccccttgacattttccattagcggcggtgaaatgcttatacaggaagaagattttaaaaccgaatatatcttcgatctttttgaacgactaacaaaacatcaccacgttcataagatctgttttcaggatgcaaacgggaagcagaaagaaatccacaaaggccaagaaaaccttccccttatcttgctatattgtttagccaatggaaaacgtttagacttgtatttgtgtaactgattctacacagaataatgcaaatgttgaagccttgcaaactcaaaataaatttaaaaaatgctactaacaaattacgttgattaatcatattcaaatataattagttaaaagattaaattaaaaaccaatataaaatatttagtttgcttaataaaatttattttgctttgcttgattgctgtggctttgtgtgtatacggtttagggccgaaacacaaataataattaatttaaataaattaacccaaagagacaccgtactgatgaggcccggtctctttcggttaaatttgcacgtttcgcgaagtgcccatttttgcactgtcgcgaaacgccccatttttacaccatttttgcactgtcgcgaagtgcccaagaatagtactagaaatatattcattttaattcttaaaaatactatttattttagttatcatttattttgacttaatttaggtgaccaatattaaatagaaaattataattctaaattaggaaaatttcggtatgtaaaaaaagtaaggcaaatataagtcaataaaaatattaagtgcatacagacaataaatgtaattattcaggatttggcaggataatgccggagggaatgccgtgccgtgttctcccttttggcggggagaggaggggggggggacaggaaagggagcaaaaatgaatcttgggaagaatgttaaatctgtgaattaacagtgataattcttccgctcatataacagcgaaaaacagtcacagttttttgcgcaatcgacgatttctggtttttatcggaaaccagtcacactaatgagagaaatgttgctgatttgctttgtcacaatcaccgcgcaaatagtcacaccaattatattcaagccgttaggtttcttttattgtaacagtttctacaccaaatataactgtgaccaatcaatcattatttaagtaatctgattagctgcaaaaatcacactcctcatagtcaaaatgaaaattattatttttttgtttctttactctctttcttcttgctgttgcaaccccgtaatgttattaaattccttaaaaacccttaaaactgcaaaaaccgtattatccactctcatcggagcagccggaggggcctcatttgccctaattttggatgaaattttggagatgttatcggaaggttttgaaaattatgtaactttttaaaagctgcgttaagataacgatttattatcggcattgttccccttgacattttccattagcggcggtgaaatgcttatacaggaagattttaaaaccgaatatatcttcgatctttttgaacgactaacaaaacatcaccacgttcataagatctgttttcaggatgcaaacgggaagcagaaagaaatccacaa

SEQ ID NO: 14386 - DNA, 2175 bp, Heterodera glycines
ccctcccccccccccgccttcctcagaatgactctgcttccactactatccacttgttttgtatgcaggaagaaaagagaaaggcgcacttatgcgtctctacccctcataaaaagtggaaatagagaaagggaattatattgtgtggagaaggaaagcaacaaatcgttttctgtctaattcttcccccattttctatatggaaaaaattcattttccatccagtcaaaaaatgtaataaacctcaaagccagccgaattgttcgtgcgggttatgctcatagcacaatccccactgccacgtcccgttatgattgcgatgtacacgcctaaaacaattaatattcaaactaaacctctggcccaaaaaacttaccctctgcgcctgcacccgttaaataaacacacaaagtaaagatagactttcccagaaggactaatcctccttcctccactttgcaccaaatttccatcttcagcttcgattgccgctttggcagtctcctcgtttaaatataggttattacttatgacccaagggtgggtagcaaccataaatctaaaaaagcagatcattcaacgcgtatcaaactactagaatcgtataattttttcgctttttgatcactttttttgttcctcatttctaagagcattattttgttgagtgttatggcatagcagatcgattattttctcgtactgatacaatttatgaaattttgtgtttttaactcgcatttgagaatttaaattttttaccaacccagaaaccagttcctggcccggcaatttggaaattcgaattgacctgttttccagtataacggtcttggggaggtcggaaccggaaaaccatatttgaaaatgtcgtcttgaaatctcggtcttatacgtattttaaaaaaaaaacaaatttttttaaatcgacaacttgcgcttgttcaaattttcttgtagttttgccccttcttactatagcacataatctgctgttaaaaccaaatgaatagcagtgaagaaacaacggaaaatgttgggatgggcggaaataaggacgaacggcagacaacttcaaaagatgagaccgacgaaagcagcagcgaaaatcaacggaatgaacaacgccaacgacaaatggactgcgaaaaggaggactcgaggtgagcatgggctggacaatgcaaaaacagtcaatgaaaaactgaaaccgaaacatcggaggggggggggtgagatgaatttgaccaccgaaaactaaaactccatgctttgaaacccaagacgaattaacaaaggaattgggctaattgagcatatttgagggcaattaacgcaccaaatgtgtattttccaattaacatttgttttcatttgtccaggttcgaatgcaatatttgtttggacatggccaaagatgcggtcagtttaccagcgacgatgccttttcactacgttttcatcaaccgttccatttttgccttaggtcgtttcgatgtgcggccatttgttctgttggccatgccttttccaatggatggacacgcgtccctatcgccagctgtgccccgtgtgcaaatcggcgattagcaaagacaaggttttccatttttactgaatttatcggaatggacaaccaaataaaaaagccaattcacagtctcagtcacattccctctaaaattgcattttttgccaaggtgattccgctctatggtcgcggtggtggggacagcgacccgcgcgagaaaattccgccacggccgcaaggtcaacgcacagaggagacaaatcaggtggacaaaagacatttttaataaatgatagcagagaatcattcattgcttccatcccaattttacttatctaatcaatgtttacccaaaattccattaaacttcattgatttgtcaattttccgtccagggctttcccgggatgttccattggggcggcgacaacggtggccatggcggcggcggtgtgcaattttcgaccccgatttgtaagacgcaagcggagagggcacaaaaacgccaaattttgcctgttttttaattccaaagttttaacattcgtcatttataacttaatttttcttaaaaaaattgttttaaaatcgcaaaaacagcaatttttgtgaaaatttgttaacaaatcaaaagcggttaaaag

SEQ ID NO: 14387 - DNA, 1816 bp, Heterodera glycines
  unsure (1)..(1816): unsure at all n locations
gtatggggatggtgtacatcataggattcatcactatacgcagggattctgaggctttcccgaagagctaaacgaaatgtgatttcagattcgtgatcagcgtgctaaataacctgtaaagacatatttgtggaagtttttggcagaaagtatttcgcccatatcacaacatgttcaaatacctttgtagttgaatttataatatcatttctatttatattaaagaatctttaactatagttttgacatggctaaaagagtatttggtttaattagttatatatggagttgattccattattttgttgccatcacagtaaagggaatgaattttttgtcgtttatatttgtgttaattatttttttgccttaatggtgtactgctacaaaaaatggcatcagactgaagaacactgttgagctgtgtaccagggatgtgccgaatcggaatcgtaatcggaatcgcaattaatcggatttttggccataatcggaatcggcgatttaatcggaatcggattttgtctggctcggcacatccctgctgtgtacggtccgttagaaactgaagacaaaagccaatcaccgcaattggtacaagaaaaacagtaaaataaattttggcatattgttaattttattatgttaattaattaatttgttatattttttagttggtctgtcgcccgcaacaaccgaaccttggccgtttaatggtttttagaaaagaaatgaagaattttttataaattttttttattaatttactggaatattattttcctttaactattgacgatttaaaaaaatatcgattcgcaaaaaatataaataaacacacaattacaatacattataaaaaagcatttaaatgttcaaataggcaaaatgaggacaatgaattgatgtcgtcggcacattagctaatagctaagttttcttttagaaattaaataatatgataactaagaattagagttgagcgtttccaataccggtaccggccggtaattatcgtaccgtttgaaaaatttggtgcctgtaccggtttttccagtaccggttcaagtgcgctcaactctataacaaataagaatgtttatttgggtttctctgaagaaacaatttgaaggaattcagaaaatagacaccaacagaaaaatgaacaaaataattgacagaagacagattgatttaaaaataaaagaaataagaaaattaagtaaagaataaatttgcttaggattgttgtaaaataggaataacggataccaatactaatttttatactcccccatttgatattcatttcgaattacacaaaattttcagcgatgttcaatttttttgtttccatttttcagatatcaaatttttctataaattttgggtttcatataaatttggcagttattacatcattttttgctacatatatttttttaaataattttttgcatcgttttaatttttattaattttcgataaccgatttaatccatagcaatgaaattacagaaaaaattcaatgcctatggatattctgcgcggttggccacttcacaaaaagtgcaaatttgggcgcttcacaaaaagtacaaatttgcaaaatttttgactaaatcaattcataacttttctcatacacaaccaaattgcaaattcttggtatcatacgatagcccttgacttgttttatcagcttgctaaattttaaaaaaattaccttattttttgcttttcatatcattttttttgaagcgctttttccaaaaaaaattggggaaaatgggggncggcggtgctccaaaataat

SEQ ID NO: 14388 - DNA, 2589 bp, Heterodera glycines
ccggacccccaaaaaactttttttttaatttttgttttgaaagtctcttgtttcatttgacactttttatgggtttttaatcccaactttcactccttcaggattggaggagggcttcggcggttgggtgccacccgagttgcagtggggctggcatttgccaaagtgtctgcgaaagttcacggccaacatttgaatgaatgaaaagccattgcatgccaaccgaaaatgccatggcatctataccaactgctgtccctacgaatttcatttattttaataattttagtaccaattccaaacccccataaaaaacaggtcttaaaaaggagcgagaaacaacaaaaacccttttcataattgtaataaaaagagagcattttgtgccatttttgttactacactcatcacactgatcacttaattgggtgcggatttatatttacgaaaaataatttttaaaaataattaaaatggttgaaaatttgccggaaatgccttagaattaatgccattatcatgataaaatccaaaaaaaaaaaaaatttatacattgaaaaattattagtctttccttaaaaatagagggttcgtccttatgccaaagaatttcccaaaaaatttcaacctttccggaaaaaagatactttcaaatttaacctaaatataaatcccatccccattcatcatcacttttccaaaattgcatttaacattttctcgtttttgtgaatgtcgtcggccttcttcattttccattcttttttttcgcatttcaattttttataaatgctctacaaaattcacttaaccaattttcgcacattctgctccattatactgtatccattatactgtacttttctcccttttttgtgttttgtttgcccaacataaaacactcagcgatttcaatttgatatttaacaattgcatataaataaaaatggtttttggtaattttattggtgattgttttgatttttaaccaattttttgagccctaaggaactgaatcaattttcgtcatacatatattaattgctcaaaagcaacacatttaaattcttgttctggaaaatctttccctcgagaatttgaaaatccaatcctataacagaaccaaaatttggttttccaatccaattaggaattggaataatgaggcaaatttaccatgggcattattattactcaaaattaaaagaggaagtaaaaattaaatattttattttacaaaaataatacaataatattacataataaaaatccccttaatttaaatcccttctaaaaatataaaataattattataaatctttacatcatcacaccctccaaaatcatcttttactcttctcattcgtcctctttcttctcgtcctcactgtaaaattgcgaaaaatcggttaaataaataattatttgaaaatcttacagaacatctaacttcatgacaactagaatgcagcgggaccgggaattttgggcaaaaccgggaccgggaccaaccgggaaattttaaaaattcaaaaaatttttaaaaatttaaaaaaattcaaattttaattttttttttcaactgaaataaaaattaaatttttattttgttttttatttaataaaatccaaaaattaaagctaaattaaattaatggaaattttcaaatcaaattttcttcagtcatttcaaacaattaatcattttttggactaaatgattgaatattattagaaattcagatttacttttcacatcacttttttcggcgcgctttttccaaaaatcttttggggaagaaagggggtccggcggtgccgataggcgccgccggaggaaattttgagaatttaagtgtgatttgttaacagattttcaacaaaaaaggctggtttttgggattacttggctcactttgtacggattttctttaaaaattataaaatatgtgtcaattaaaaaaactatgatgaatcatattttgtcgataggaaagccatgagtatatataaaaagaaatttcaaaatattttcatttctgtagagggatcgaaccaggggaaagaagaagggaaagtcaagagatagccactaggccatttgcacaactgacagtgttgcttttaaagaatatatttatgattatttttttattttctatcatttaactcccccattattaccagtgcttgtttttcccggttgccctaccgggaccgggaaataaattttcaaaatccgggaccgggatctcggatgaccggaaatccccggcccggtcccggtcccgctgcactctaatgacaactcgtactaggccgaagcttacggcttaaacttaggcctatgcttaggtttgtaaaattttttattgtataaattactttttgtacgagttttgcttttcaaaaactgttttttcgatgcgctttttccaaaaaaaaattcgggaacaggggaactggcggtgccgattggcacagccgggaaaattttttggactttttaatgaatttgttaagaaaatttctaaagtttgcgacccctcccctcgctgcgaactcccccctcccccacctcttttacac

SEQ ID NO: 14389 - DNA, 2683 bp, Heterodera glycines
  unsure (1)..(2683): unsure at all n locations
tttttttttcgttccggtgctgaaatggttgatataacatggagaaaaaaaaattaggcccgaagagcaaaaaaaaaggtttcttgaaagattttttgctagaaaaatgttgatttttgctgccttttcaatttttcgtgccttttttgatgttattgttatttttttatgcctttttcacatttttcgtgcatgtccgggctctacatatgactaaacatagtaaatttactttatttaataaaattttggcaaaatagtttaaaaaaattcaaaatttttataaattcttttgccttttcgaaaatgccattcttatgagtgtatatttaaccccgaccacgagtcggggttaagggtcggaagcgtcgtgttaacccagaaaaatgtaggggttcggggtcggggccagccagaccctagttcgaaataaaatttcattagttaccacaaaaaccctaaaagaaaatttttacctgcgtaaagcactgccattgcgttttctccgtccaattcactcaaaaaattttgggttcgggtttcgggttgagaaaaacctcgggtttcgggttcgggttggcatcactgttcgggatgaaaaaatcagatttttaccaatatttttacggcgcatttttacaaaaaaagacttttattgaatgggcgagggaagagaatccgacgccggaaaaattttgtaacttcgtcctgatttattaacagattttcaccaaaaaaggacattttggcaatgaaaattctgatcaatttagaaaacgtgattttatgcaattttgagtctggaaatggtgggacttaaaagcaatgaaaagcacaactttaaatagaaaagaattttcgtatatttttttacaattaaatttcaaaaaaagcaaaaaaatttggaccaattttgaaaagaaatagtgcacaaggatgggaggggtagacgaatagagaactttttaggaagggacgcaccccatctgatattccaccttttctgttccataagaggccaaaggcgaccgtcgccgttgacaagaagttgtccaattaaggtacttggaatttccgcattaaaatgtggtacaaaattttggaactgtcccacctcgcggtgggacttaaaagcatggtgacgtgaaattacaaatcttcagagtattttgtttcgaatttttacaattaatttcaaaatgccaaaaaattcggaaccaatttaagaaacgaattagtacacaaaaagggagggaaatctttaggacaaacaattagcatctataaccaaatttaaattttgctcattcgaacacaataatttcgaaaatttttgattaaaaaaaatttctgctacttatgtggtttaccgcccataaattttttttaagtcttaaaaaaactttcaggggttttgatggtcgctgaacacgaatccgacgtccatttcaccctatttcgaaccaagtcctgactcaagatgattaaatttttaaaattttaaatttcgactgaaaattagctgattttcagtctcgggtctgtaactcttcagggattggttgccgcaaaaaaaatctttcggattcttccattacagacctagggctatcgattgatatatatttcgaccattttcggcgctgggcaatatgatcaatatttaccatacttgcaatagcataggatttccttaattcgattcctgatttttcacaaattttcatttttcgaacattttatctatgtctaggcatgtctccgttttttgttagatacattatttcctgaaatagagcccctgtggcgtttgtctgggtttttacttcaaaaagtttttttttgcaattatataatttaatagttagactttggtattttgcgcaacttcggtttcacctcatctgcgccttcacgcgtgggtcccattacttttgcgccctgtgtcataggcgtcaaaatttttttaaaattaatttcgtgatttatttgttagcttcgaacaaaagaatttaatagaaaataaaaaaaaattatttcgaatatttttttggttgattaaattgtgagaatgattcaaaaattttaaaattttcaataaaaataaatatgcattgtataaaatttgaaaatgagaaaaattcgtaatttagaagcagagaggaatcgattggtatatattttgtcgaaattccatgcgtttttatctgttggacggttcagtcccaaagccatttgcccatttcagtatcgggtctgtaactcttcagggattggttgccgcaaaaaaattctttcggattcttccattacagaccgagagctattgattgatatatattttggccattttaggctctgggccatatgatcaatatttaccatacttgcaatagcataggatttccttaattcgattcctgatttttcacaaattttcatttttcgaacattttatctatgtctaggcatgtctccgttttttgttagatacattatttcctgaaatagagcccctgtggcgtttgtctgggtttttacttcaaaaagtttttttttgcaattatataatttaatagttagactttggtattttgcgcaacttcggtttcacctcatctgcgccttcacgcgtgggtcccattacttatgcgccctgtgntcataggcgtcaaaatttttt

SEQ ID NO: 14390 - DNA, 2081 bp, Heterodera glycines
  unsure (1)..(2081): unsure at all n locations
ctctgtaccaaaatggccgggcatcaaaaggctcttcgacgtttttctccgtttccgcaaaactcttcgtcccaggtccaccgactgactgttcctctgatcagtgatcactgatcaaccttccccgctaaactctctcggtttcagcatggtcaaagaattcgagaaggtccgcgaccaccccgacccgagtgcgatgctgttcacctgcatggactcaaggtgtgaggcaggctgaatcggaatcccggactttttttgggctaatttgcaatttgtttttttgaaccagtaattttattcatattaataattagggatgtcaaaaatatgtacaaaaagtggtcaaaatatgtacataaatatgtaaaaaaaatcccgaaatatgtcccaaatatgtaaataaaatttttaaatggttatttttttggaaaaaaaattcttcggaaagcgtgaaataggcacaaaatgccataaaaatgacctaaataggcctagaatcacattttagtattttaaaaattagtttggttaatttttattttcacaagaaattttataaaatttaaaaaattctcaaaatatgcaataaaaatttgaaattatgtacgaaaaatttgccgaaattttggatttttttttgaaaatttccgaaaatttctgtaaaaaatccacaaaatatgtaaaaaatgtatgaaaaagtccgaaaaagtccaaaatatgtaccagatatgtataaaagcccgaaatatgtaaaatatgtaaattaaactcccggtttttgtttgcaaacacaaaaaagaaagtgtttttcctactaattagagcatggagaatccaggaaaaaatatgtatttacataaaattgacatccctattaataattttttgttctaatttttatgcgcattgatctctcatccattgaaatgtctttgcttttcgtcctcaggttacaaccgtccaaatttatgggtgctcagatcggcgaattgtttgtcgtccgcaattccgccaatatggtgccggtggcaaaaagttttggtgtgcaattaattaaatttttctaaaatattttaaaaaagtgatttaattgaggcgattccggcggagaagtgtccgtcaccactgaaccagcagcactcgaattggcgattaggtgcaaaaacagtttagttgattatgttgtatccatgtaattaaaaggcgtggaaatgtccgacgagtggtcatttgtggacattccgattggtaagcagcggacggactgacaaattagcccagaaatatttgtgaaaatagttttttcaaagggtgaaatcattttcaaaattcttttggttaaattccgccgattggcccattcgccattcattcattttccaataaaatttcgctctaattttctgctcgttcagcaaggcgatcaacacactttacgacctttaccatgggcgtccgtttgacgccgagtcgccgatggaccattggctgcgacggaacggacaccaaagtgtgcagaaattgacccaactgctgatggcggggcccggaacagagttggaattcgcatcggagaacggactgatggcattctgcgctcacattgaccgaacggaccaactgagcgcggtggacaaactgtcgcaaattaacacacttcaggtgggcaattgaattgaagcgcatttgaatacactaatttgtaagggggcaaaaaaccccgacacaattcgagtgccattagggaaatatacactgaatgaatagtccaaaaataatcagagttgatgatttttagaccgtttttaaaataagcggaaggtgctggccggcagtgcgaataggaacaccgagtaaattttcgagaatttttaggaaattaagtccaaaattacggaggaggagggtgggagggcggtaaatgtgcacacactgcaaatttcagcagctgaccaacattgcgtcccacgagtttctgcgggaatacatcgtgaccaaaaaggtcggccttgatgcgatgtggttcgacattttcaatggcgaaatgtcggtgtttttttggacctgcagnngcatgc

SEQ ID NO: 14391 - DNA, 1581 bp, Heterodera glycines
  unsure (1)..(1581): unsure at all n locations
aatcgtacggtctgttccgtgcccaatcaccgtgggccaaattacaaaaaggctgttataaataaatatcgatcgaaaatgcaattaaatttgaaaaatattgaaaataatgaccgaattaatagtgggaatatatccgagaggatatgaaaattaacaaaagcaaaacagctgcacaattatacttaactattaatggtatctcattcaaaatttttaattatttagaacttttttaaatgttatgaattttagtttgctgctcattttaccctataatatttttatattaatttacaatacaatcaaatattttgttaaaattagagtgccacgggatcgggacctggtagcggacaactgagtaccaaggtcccggttttgaccgggaccgggactagtcccggttttttcccggttttcccagccaaaaattccggtttttcaacccaaaaaggtcccggtcccgtggcattctagttaaaatgtgtcaacatttggctaaactaattaccaaaaaatgccaatcaaatcacaccgatcacttcattttctgtgtccccctgttcaataattgcttgtgctatttgcttgtaaaactgctcaaaacaaatctccaaaaagccatttgaatttgccaattttatccacgtaatttctctgttggccaatgcgttgttttggttctgtttcgtcttgcaaatgttggacagagtcagaaagaaatcggcgaatattcgcaaattcagcagttttttctccaaaacatatcttccgatctgtcccttgtccgccaatttctccaaattaataattttaagcgataaattttctcaaaatattgcaaatattcattgggcaaagtcagtgaattgagaattttctgtggcattttctcttcataattttgcagcaataaattgccaaccatcgcagcaaaattttggcaataaattagttgtgacagattaatcgacgccaaaatgtcacgggaaatgcccggaatttgtgaaagcattgcttcaacagttgtggccacgaaatgcacagtttgctcattgtccgcttgttgcatctgctcattggtgggttgaccagcagcagcggcactgaatgcttctgcttcctcagctgctttttggcccggtgcccaccaccaattcgatccgcttaaggagggcatcgtcatcgatgggtttgacgaacgagttggcatggatatggcaacaaattggtggcattcatctccatattagccgggttgtcttaattaattgtgttgtacataaatatttgtgttctcaattgatttgcaattttttaatttactcaaatgtccttttgcttacttattcttattaatcctgccgaactgcttgtgctggcttggcacgaagaacatgatgccaaaatggcacataaaaaaccgcagtcattggaatggagaagaaggcacccttttgatgtttataattaaatatgaatttcaactaaattggtgagtctgttccgccagtggcagtttaaaacgcggccactaacggacaggcttataaactnttttttatgagntaatcattc

SEQ ID NO: 14392 - DNA, 3973 bp, Heterodera glycines
cgacgaatggtgggccattgcgttaagggaacgtgcaaaatggcgcctaagcgattggcaaatgggagagaaaatgattgattaagggtgttgatctgatcacataacacccgcccaccccccattaagcatcgcttcgtctctcctctctttggccccgtttcaaatgaaaaataaaatttaaaaaggcaatggccccttcctttaaccctttccgaaattcagagacggcttttattgccatgaataatgaaaggaaatgtggaatcaattgaaaaagtgccccagaaaataaaatatggagcagaaaatatcaaaacgaaaattggaacagaatttgggggaacacttttggaacagcgaaagggccaaagagagagggggggggggggggggaattgagggaaaagcaaaagtggggaaaagcacaatcgcaagggacaccaccggacaaaaagggcgagaagtgcgggaaaagcccaaaaccccgtcggattagatgactagcatggagaatgaagttagtccgcccccacgcggaaggaagggaccctttgtgcattgggccaattctccgcttcacttttggattgtgcccttggggggggggggagagggaatggcacgggagggaatgcccttcgccgcgccgttggcccattcaaccttttcctcctcctctcttccgcttccgtccatttcttttcgctccttggcgctgtcctttcgctttctgtgcccatagccatcgaaggatttatcggaaaagctttcatgtgcactcactccccgcctctcctctccctctctgttgcctttattgtctccccctctctctctgcgctcccatctctaacctcttcccccgcgccccaaatgaatttagtagcgatggatggcggctttttctcgcaaagcacacacacaccgccgactacaaagcggatgacgtggaaagaggagagaagcagggattggcaatacacgggagagggaaggcaaattgggtaaatatagggccaaaaccaaaagtgggaagagtgcccaatgccaattcccatggtttagaaatgggtataatgaatgccaatgacaaatggtctttctttaaagcaaaatttatcagcaaaaatgagtataatcttggtggtgctttatggtttatgtccattaaaagtcacaacaaaaagacaaataaaataaattagcctgtagacgcccaagcatttttgtataaaaacaaaagcggagtaagtttaacaagtcgatgacaaccgcttgttaggctcttcattcgacttcagcggtgggttgggtggtgtcctcagcctcgtattcgccctcatcgtcaacggtggcatcttggtactgctgatactcggagatcaaatcgttcatgttggactcggcttccgtgaattccatctcgtccatgccctcaccggtgtaccaatggaggaaagccttgcgacggaacatagctaaaaaacgttttgaaggacgataactaatagttcgtttttactaaccagtgaactgttccgaaatgcgtttgaaaagttcttgaatggctgtggagtttccgacgaaagttgccgacattttgaggccacggggcggaatgtcacagacagcggtcttcacgttgttcggaatccattcgacgaagtacgaggagttcttgttctgcaccgacatcatttggtcatccacttccctcatcgacattcgaccacggaacattgccgcaactgtcaaataacggccgtggcgcgggtcacacgccgccatcatgttctttgcgtcgaacatttgtttggtcagttctgccacggaacacgcttgatatgcagccgctcccttcgcagaaagcggcgcaaagccgggcatgaagaagtgcagacgcgggaaggggaccatgttaacggcaagtttgcgaaggtcggcattgagttgtccaggaaaacgaagacaagtcgtcactccggacattgtcacggaaactaaaaaagcaatgaattaaaacaaagacaaatgtagatgaaaatccaaaaaccgagatgattgagatccccgtatgtggggttttgaagcttcaaagtgcggaaacagatgtcgtaaagcgcttcattgtcaatgcaaaaagtctcatcagtgttctcgacgagttggtggacggaaagagtggcgttgtaaggctcgaccacagtgtcagaaacctggaattcgtaaaggtcgaaagaaatttgaaaaactattgtaatacttttggcgaagggacgacagaaaacgaagacataatacggtccgggtattcttcccgaatctttgagatcaacagagttcccattcctgaaccggtgcctcccccgagcgaatgagtgagctgaaagccttgcagacagtcgcacccctccgcctccttccgcacaacgtccaacacattgtccaccaattcggctccctcggtgtaatggcccttggcccagttgttgcccgctccgctttgtccgaacacgaagttgtcgggacggaaaagctgaccgtaaggtccggcccggattgagtccattgtgcccggctcgaggtccacaagcacagcgcggggcacgtacttgccacctaaattcgaagaaaagtatgcattacaaaataacattataattagtaaccatgggcctcgttatagtagacattaatccgttcaagttggaggtccgtttcgcctttgtaagtcccgtccggttgaattccatgctcatcagaaatcacttcccagaactgaaatttggttgtgtgaaaagcaatttccaaaacaataaactaaccttcgaaccgatctgatttccacattgaccagcttgaatatggacaatttcacgcatttttaaaataatttgtatttattctaaaatactatttaatcactgtaaataaattcttgtgtcttctccaaaaagatgtaaaaatgaaaggatgtaatggtcaaaaggaaacgaacgatgaaaatcaattataaattataaaactactccttctccctctccattcctccccgttctgttccgccccaactaatcgcgcctattgcgtgtctatctttgagctatgtggagcaatggggcatattttgtgcgtcctgtttgtgcacatattgttaagccgcattaattttagaaagatcattttgccaaaaaaaaaaaaaaattcaaattgaataattcaaatttttttattgctctttttaatttatctaactgtcaatttatgctttacatatttcttgattttactttttagatttaccatattcctcagttgattatgaacaaaatatttgccaacgattctaaggctgtttttgaggatgatatgcatatcggcgaagccttcgatgaagttttcaaacagatatacgagcaggaaaacgaggtatgtaaattgttactctttgttggtcactaaaatagtatttttgatttaagatgccattcgacagatgtagagaaatctggaaagaagttgaacattctgaaaaaacgcttgtccatgaaaccaatcatttgttgaaaaatcaaggtgttgattttactatttctggtcttttaagttttacgataggtcttcaaaattccatcgaaaccgaaatgaaaatgctcaaggatgctgaggcttctttggatgctttgaagaaacgtgaattggagttggttcgccattacaaagacaaacaaagcaaaatcctgtcttcgctggaccatggcatgcaaatcttgatttaatttgatcttttctgtttttagttgagcatttaacccagatggttgacactgacatcgaaaacgaccagaaaacattgaatgacatcttgaggagctatgaagatgagctgcaagagatgaagaacttaattatggcgaaaaaacgattgctttccgactaatactagaacgtgtgtcattcattcattgat

SEQ ID NO: 14393 - DNA, 1602 bp, Heterodera glycines
cctgaaagaatgaagcggcggtggtcgccgccaaacactgctcggccatgttggcgccggaaaggtgcgggaattgcatggcatttggcaaggcggccatctgcgaagagcaccagccgtatggccaatatctgctaggaagagccgtccataagtgaaagggatgaaaaatgctgagtcattgtccaatttttagttacttaaaaagccgaccgctcgattcgctttttgtgccttcccaattccccccccccctcactgatcagctgatggtttgtccgctctcactccgattctcccacctgctgatccccgtcctgaacagttcgttctgcatggccattgccgtgctcattgtgccattgctttccatcgcggcccctccgccgatggcacccgttgattcttttcgcgtttggatggaacgaagcacccgattgatggatgagacctgaacaaacggagggacaatgacaaaatgcgggactgagttggccacccacacttggcagtgtctcgtccgtgcacactttgtcctgcttcagccggtctctgatctcccaggcgaaaatggacggctgcgcatctttgtacacctaaaacgaaccaataggacgagacgaaagacggaaaaacaaacgaaaaatggcaaatgaaaagtgtatcaaaatgccttggatttgtggaccaaataattcctttttttggttgttttgtgcccgaaatgtcttttcgccgttttctttctccgtttgtcttaaactcgcctttattttctcgcacacttctctggtcgccactcgtggctttgatcttaagtttgccatttttgtcaatgttttgatcggtccgttcagtaccctccgattgccctcggtttgattgtgccgtattggtagaaacgcgcgagaattttggaaacgcatccgttcgacaccttaacatttgcaaacacaatgatcacccaattatcgtcgaatattctctgaaatctcttcctctgatcacccttttcgaacttcgcgatcgcaaattaatcccccccccaatttaccagcaaattgcgcgaaatgtcacaagggcgcatcccatcctcggccaagtcgacaattcgctggcgaatttggtcgggaaggggtctgaagaggggaaaggcatttagtggcgaattgtgccgatgggtcggtcaccttccgttgacgaagacacctcccagctgattagtgccggtgtgaccttccaaaaatgttttacctttataattaagtatgccggaagttatttagttatacgactttatatgtttataaataataaattattcttttgaaataaaaagccattattttggttcctttttggaattgggcattcccccccccccccctctttgcccctctttcccttctccgctttctttgtcccattgccaaaattattattttattgcccattcattcgctcataaaacagtgttgtcgtttttgtctgtctattggaatttttaaaaatcagtggctaaattgctcaaattccgctgtttcaaaagagcaactaatcagcccacatacttttggttgtaataatagcaaatgcttttgc

SEQ ID NO: 14394 - DNA, 604 bp, Heterodera glycines
tcgccgtcggccgaccgtttcatcgttttgatggccttttcgcccttcccccgccaataatcgcctaaaaactcaaaaaaccatcgccattgacacttttgtaactccgagaagagatgcgatttgatgggaaacaaaggaaaaacttaagcgatgacaacgccaaaaatatgtcaattttgatgaatttgtcgtactttcgtcgtgttgtccaattgaacaaccgtaaaaaggaaaaatgatcagattaaaaatttaaaaaacacggaaaaatggaagaataaccgcacaaggaattcgaaataacaatgacaaatggcaaatagcacccgttgtgccaatcgccaaattcaaattggcaatgcaactgacagatacccgccccccccgtcctttcacctaatcctccgtccgttccaccccccccccccccgcgccccctaagggcgcataaattaatttcagttttcctctcatcagagcgactctccggggaattcacttcacttcacctcatccatccgtcagtgggccaatggccctaaatgcactgatgagcattcaatgactgacttctcattacatatgtgaatggttctaatcg

SEQ ID NO: 14395 - DNA, 2063 bp, Heterodera glycines
taagcgatgccaccgccaaaaatatgtcaattttgatgaatttgtcgtactttcgtcgtgttgtccaattgaacaaccgtaaaaaggaaaaatgatcagattaaaaatttaaaacacgcggaaaaatggaagaataaccgcacaaggaattcgaaataacaatgacaaatggcaaatagcacccgttgtgccaatcgccaaattcaaattggcaatgcaactgacagatacccgcccccccccccgtcctttcacctaatcctccgtccgttccacccccccccccgcgccccctaagggcgcataaattaatttcagttttcctctcatcagagcgactctccggggaattcacttcacttcacctcatccatccgtcagtgggccaatggccctaaatgcactgatgagcattcaatgactgacttctcattacatatgtgaatggttctaatcgctgaaacgctttccaatgccttagacacgaaaaaacggccaaaaagtgccaaaaaagtcagtggcacggtttaagggacagacgaaacgtgtgagtcgggtcagcttagtaggccgacaatgtgtgggtggcactgttcggacgatggctttacctcgcgaactgggcgacgatgccatcgaatggttcggctgctcgcgcttcaacatttgtgccgagtgcagctcgtttccgtggtggttgtgctgctgttggtagtggtggaggaaggcggacgcctggtcatgttggaacaacgcactttgcagcatttgctgctgtgaaatgccttaacggaaaagcactaatcaaagcgcgaaataaattcaaattgtgacacaaaagcctaagtgaaggaaacaatcggcaaaatgccaaaattatcgccttagtgaatgaatgcgttgtgcccatcaaaatgccgtccctccatttgccattgaatgactgactcaccgtcagcaaatggcaccggaaaagcatttcttaccaatgtccaaaatgtgatgtccgctccctgaagcgccgtcaataccaaagcgtccactcggctgaatgtcgatgttcaggctgagcagactttgctgcccgagggggtgcccaaaatggtggtgatggtaaccggaagattggtaaggaagaggcgatctgtatttgagggagcacgaagaagaaaaagcggaagaagaagaagttgaagttgaggcggtgcaggaggaggaggacgaattggagcagttcaaagcgacggaagaggacgaagaggaggaagcagtcgtggtgaaggggcctaaatgggagggacaaattggcaaaaaacggcacaaatgatggcatcaaaaaagagagacagagagagatagagaccgagagagtcatacacaacaaattaagagcaattaatggaagtgcaacggatactgcgttaatttgccattttccttttgttttcttccatttttacttttaacagtccatccttcccctccctcttcccaaattcattcactcattcttcgcttttcttcctcccattccctttcatcagttgctcatgtcattggccaactcccttattaattcccccccccccttcggctttctctcccccaactttcaatttccccctttttcccattttcattccatgcattgatgggatccgctcaagcgcaaaaatattttcattgggcaaatttagcgcaattgttctgggctgaagtcgttgatagagcggggaagggaattaaccggatggccgaatcacgcgggcataaaatctccgtcaatcggaagttgcgggtggagggggcgggagggggcaaggcattgtgccgtcggcagatgcctgctgaccgagtggccccattgttagcgatgccctccccttcccctcaatccgcaggctggctaatcacttttgagccgcctggatgggcacatttggtggaatttggtgacgacggaatttcacctccccttaaaccattttgttggttcaacgccggggaagagaaagagaggagagagagagagagagagagagaaggctgggagggacagaaac

SEQ ID NO: 14396 - DNA, 4350 bp, Heterodera glycines
attttatcagttttttgattcaattcagattgagaactttttgaaaaaactcgaaaatagagcaaattacacacttttatttttttttaaaccgtcaaaaccggtatatttagactagctaagtctaaatttggggataaagttgaaccaatgcagcaatctgactccacttttctccatattattcgacccttttaaaaatcacccatttaagttaaggggaaccgaaattttttcaaattttttattttaaaatttatttattttttaatagcttttaataattttgaatttttcattcatgttgggttaacataaaaaaacgcagcacgcgcacatcaatcactaaactgctgcctcaacatggcacatctcaattattcgtggatatacaccaccaacccacgcccatggcactgctttatttcatccactactaagctataacccattcattctttcatgcaatttttgcatagattttcagtgatttaattagattttgttttataaaaaaaaattttttaaatattaataaaaattattgtacaatttttgtttgaaacttgagcaaattagacacgattgaattaaaaagacaaatgacatcaaaaaaactttctgctgatcactagggattaaaagaatgggtgcaacccaaaacgtcgccggaagactttttggaccataactttgtttattgtcaatcgcattaagcattcttggtgttgtccgaaagctcccatgtgtttatttttatttgcaaaatttcaaaaattttcgttaaatttcaaaaaagttatggccagaaggaactcaaaaacctattttttcgaacttttttttttttgctctgaatttttgtacatgaaaaattatttttgaaattttgcatgttgatagagtttttcaaatgctttcgaacaataccccgaatatttcatttgttaaatttttctcaaaatttcttcaaaaatccattttaaatgaatgggttgttctaatagaggttttttttttgaaaaaataaataaaattaaaaataaaatatgcattaaaaatatatagaaatatgaaataaatcaaccaatgcaaaatttttaattgtttttacaattttaataaattttataaattattactttagatttgatatgtacattttaaaactgacaacaatcatcctcttattttgtttaatttattatttcaatgttatgtcagtgatcggcgaagaaagtttttttttattaatttaattaagtcgaaaaaaataaatgtttattgaatttagtacctaaaaatctaagtttatgccgtaatgtttttttttcaaaatttgaacaaaaaattgacattttaggaattctttcttttttatattaaaacctgattttttggataaataaagtttctgaggttatgttttaattaataagagctcagttaaatataaaaaattaattatttttgagattttttcattttttatttaattatttaatttttttacaggatactcaacagccaccggtcgaaacgacaactgaaatgccacaaactgcagcaggagaagcgcagcttggtgaattgaaaattgtgcccgaattggccgactcaacaccaacaaaaaacaatggtatttttaattaaaataaattttttaaaaacaaaattttcagcgacaaattcaagtgattctaacgatgaatccaatggtatggatggaaatgttttttgcttatatttattatgaatttaataaggaaaggtattgaaaattataatgcttaaatatttttaaaaaatttcgaaaattcatttttctcgttcaaaattatacaaattttccgaattttaataaattacatattttttttaatttttttttttgggcaaggacataaagtgcccgtacatttttattggttttaataaaatgaattttaaaacaaaattttatttttgaatccgagtaaataaattttcaaatatcatttttttcgaacccaaccaaataaatcgtaaaataaaattttattttcgaacccgaaaacaaattttaagataaacttttttcgagtaaattttaaaataacatttttattttcgaatcctaccaattggaccattcatttgacgaacattcgacagctgagcaattgttggtcatcgcattggtcaatagatttgctcaaattagtgaacgatccattgagccatacaaagagattgttgtgatacaaacgcttgaggcaaattcaattaataatttaaatttaaattaatacataattggtttcttacggtacaaatactgtattttgaaaaagaacaaaaatggatttaaattttcgaattataaattttcatcaattaatgtagaaaatctttctctcactcaaactctctctctctctctcgctatctctcagtctctttctctctctcttcctctctctctctctttctctctctgttgaatatgaaaatatttaattgtattaattaatcaattttaattacgtattaattgcctaattaaaatataagaattttctaactaaatttttgttttaagcctgtccataaaatgttggaccacataaagtctatcatactaagtgagatgttataccaacgacgtgttgaccaattcaagtgccgacatgacttgaaataccggcttcaaagcaacttggaccttgtcaagcaaattttcatgaaaatactgtacaatgacagtacacaggatggaaaagaaaaatttaccatgtccaaaatgttggtggacggtggcttgaacagcttgaaattgttgctctcatttgctgctcgtctctcagccgctgtgggaggtgtactatccaattttttgtataaaattgcgactcatactgtagtatctctcaaatactgtgagatccccaaaaaacggtgatagattttagacagaaaaattataagaaatgagaaaaagaataggtagaaattttcttggaataaattgctataattctaattgtttttgacagttttgtttttttttaaacttaataaaatcagactaattctcgattgaaatcatttaggaaacaatggcacaaatttgcgttcatttttggctgcctattcatgccttaaaaatgtgtcagcggatgaaatgtaaaataaaaaactgaagattgtttttttgtaaacatttattttaaattatacagaatttttggctaccgtattgaactaaaagtggacacaaatggtaacacaattcttgtccgccttggctggaaggagtacacagttggccaacaactgatcagcaaaagtaactaaaaaatttattggcgaaatgtttttttttaattttgagattaatgcaaatattttcaattttatgttgttattaagctaataggcaatacaataaactcccataaaaagattaaagctttaaaattcaaaaaaatcaagggctttcatatttttctttaaaatttggaggaatttttgattttttttgtgctttacattaaattatttaaaatgattaattaataaaattatttacaaaattagaaatccaggaaaagtaaagacctttacaaaatttataatgaacaattttaaagacaaatttgatttttttttaaatcttaaactatcaaaaaacaattttttagcaaattcaaagtttacaaatttataattgacaattaagcattaatattttttttaatttttaaattcacaaaaataatttttaattttaaaatgattttttctagccaattttaaatttcttcaacaattggccaaaacggaactgagcccgcaggatgtcgtcaatgtgtgccaaaaaattgacaattcggttggcattggcgctgccatggaaggcacagaaagcgcagcaacaaaattattttcggcagttgcagcacattttgaagcgtcaaacaatgaaattcatcaaaaaaatccatctggaaaaggctaattgaaaaaatttaaataaaaataatttattttattcgaattgaaaaataaataaataaaataatttttatctcatactatttttttttgtaaaatttcaaaataatttttaaggaattttttcaaattgcatattttagagatacgttacaaaaaaaaaacacacataagttttccaatgctaagatttcgttcttgggcccttcccccccggaacgagaccttttttttttttttgcttttcatatcatattttttgcggcgctcttttttcaaaatttttggggaacaggggagaatttagtagattttccctcggtttttaacggatttcacaaaaattataacttt

SEQ ID NO: 14397 - DNA, 1412 bp, Heterodera glycines
tcagatcaacaagggtcaattggatggcattgccatgtcatttagttcgattactctcggcaccaacggaccacatgcgaccgcctcgtcggattcgatgatggtcgactcgaactcatgaacgcgaaatcaaatttttgtttaatgaaaacccataaccatttttgataccaactatattttatattttaatgaattatctaaaaacccagctcgtttttttctctcattttttacataatgaatcgactaacttttcgtttttttgcagtcttacacaaatatatataatgataaaaaaacgagttgagtttcatcctgaatttattgagttctaatttttctctttaataaaatagaaaactcaaaaaaaaaattttttcgacccgttgaaaatacaaacaaaacaatattagtttgaaagagatgtgtcaaagttcgtcactaaagttattaatcatccgagattcccttatcaactcctccaatatgaaatcggtcctctgaacgacttgcttgcagccagcagaagcataaattggtgcttcacgtggaaaaaactaaaaatagaataatcagacgaaataaatcaaataaatgatgagtttccatttctccaaacatttaccgaaattgagtcagtaagtcgttcgagctgttccggcgtgtaatttacgttcagtgaacgcaaataatctttgaaacacattgtgacgtgtcttctctcgagcggcaaaaaaggcacaaaataatcaattaggtgtttgttgataaggcgactcgatttaagtccaccatcgcctgcaaaatgtttttaaatgggtgaatataacaaaaagccgataatttatttcaaatcggaccttcgttatatgcactgatctgaatgatctcctccatttctcggaaggtgatctcttccctgggctttcctctgttgtaatattccaacgttcgttgtgcaatggaattggctccgccgttacttaaaaatttgaaaaaattaaactcaaaaatccctaattgaaaagaaaacttattacctcaaaaaaaggaaaatgcttttgcgcgagtcgattccgttcaaatggtcgtaaaagtcaatgaacggcacaattgcatccaacacttgcattggcattttgtccatttcgtcgaatatgaaaagcgaccgttcgcaattcgtcaaatttgtccgtatccaagtacgaagttggccctttaaatgtcaaaaaccataaactgaatttttgttgatttgttatttttcaaaaagtgcctaatccaataaaatgttccatttttcgcctaatcacactttgtatttgtcgacttcgtctgcatttgggaagtgatgagtggccacgaattggtggacgaattggctgcgcatttccttctttgtaatcgct

SEQ ID NO: 14398 - DNA, 1786 bp, Heterodera glycines
  unsure (1)..(1786): unsure at all n locations
actttccaattctaagaaaaaaccccgtccttttcactgttgctcctcacctccctcttctgattgtgaatgttcactctctttgactgcataaaacgcaaaaccctccggcgctctgaccgttttgcccaaaagcaaatgtcctcggaacagtgctgctttgagcccattagcgccatcctcagtctggaagaatttggagaccaatgccggcccattaaaatccatggaaaatgggagggaatgcaattggctgggtttcttttgctccaactgattttcagcacgtccatcgctaatcaaagcagccgtaaatgtcgtatttgcaccttcttcagtcatttcatcactttccgtttgttttccaaattaaccattaattcattttaaaataagaaatgtattttttgccgaattcaatcggtcagtcttattacaataaataaaaacaaatataaaattaacaaaaaagaacaattaaagttggtctttgttgatgttgaagaaacccaaccccaacacaggtcatcaaacatttgtcctcacttccgtttttcatcgcatttccgccttttccgacgatttctttcataaccttccaccattcctccaatttaaacatttgctcgaaaaacatttgcaaattccgaagggtgtgtacgctaaaaacgagtaataaaaagacaaagaattgaaaaatgcacctgttaattgtgagtggaccaaggagaaatttcgaaacatctctgtcgcagagagtcatgaaagtggcggccaaagattgacaggacgaatctgcacagcctccctaaagctttctttcttatcacactataatacaatatttttccgtttatgggcataatctagattccatatgtcagtagcttgtcagggcctctcctttcacgaatataacataatttttgaaattcggattctgaccagatgaaaacaaaaaaacctagtcgacttttttgactcaaaaattttcataaaaatttaaaaaataactttccaggggcgcggaaaacggtagagaagaaaggagcggtcccgtcctgattagtaaataaatatttaaaatcagaaaatcgagagaaaaataattttaaaaatatttaaaaaatccctggaaaaggtagcggtgtaggtttttgttgacctctttggaatgattagaaaaaaacaagatatatgtgtaaaaatgaacagttcgaacccatgataagagaaagcacttaccatatgaatttcatccagcaaacgtcttgccgcctgttccccaatttcttccggcactgtttggtcttcgttttggcccttagggcgcgacatcgcttctccatggaaaaatacgccttcggtggtttcagccgtcaagaagattccaaagccgggagatctttaaaacaaatatatatttgtaaaattaaaataaataaaaacggacagtccgccctgggggcccttcctctggtcaatcgtaatgtaaatgtcagaaatgtttccgtgaagcatctttttagctccgtcaatctgaaaaagtgtaaaaggacacgaaacgacggcgtaattaccattcgagatgcgattgatggcgtcactttgcatacgtaagcgagacctctgatcttgcaaacttttcctggcttaatgcattgcacagcacgcaaattccttttgatgggactggagaaagtcactgaaccaccgccactcggcttgaaacctctggctttgatctgacaatataanaaaaaactcaataaataaagttttatga

SEQ ID NO: 14399 - DNA, 2625 bp, Heterodera glycines
caattttatttacaacttaattttagcactctgatgcttttttatcaaaaaggaagatggagaaaaaattttttaaaaaatttttccttatattttggttatatcgttttgcttttggtggggtgcttggaacagtggaatcatgcgcacccgtccgatctggcaagataggcaacgattgctgactagccaaaaggttcggtgccgtgatgaaacgaaccatcactgcttaccccgcggcacccgacacggtcccccgaaggaatggatttaattaaattctctccttcggggatttttttccattaggtcgtccgttagcgttcgattgctctagtcaatttttaaaaatttttgttgaaatatttgtcgtgctctgaagggcgggggggggttaaaaaattcaaattttaatttatttcaagtgaaaataatacaaaattaaatttttattttgtttttatttaataaaatccaaaagttaaagctaaattaaattaatgaaaattttcaaacaaatttctttaattatttcaaacaattaatattttttggactaaatgattgatattattataaattaatatttgcttttcacataacattttttcggcgcggtttttcaaaaaatttttgggaaagaaggggggtccggcggtgccgataggcgccgccgggtgaaattttgaaatttgggtgtaatttgttatggtttttgggactattaagcttaattggtaggattttcatttaaaaaatgataaaaatgtgtcaattaaaataaaactatgaggaatcatattttatcgataggaaagccatgagtatacaaaaagaaaattcaaaatactttaatttctgtagagggattgaaccaggggaaagaagcagggaaagtcaaggagactagccactaggccatttgcacacttggtactttgagattattccttaattttttcctttaactccaattttcatcactaatttttcactcagacccccattcttaccagtgcttgtttttcccggttcccggttgccctaccggaaccgggacctgagcttttcaaaatccgggaccgggacctcggatgaccgggaattcccggcccggtctcggtcccgtggcactctagttaaaatctttgaaaaattcaaattttagtattcatttttgaaaaaaaaaatttttttttaattttaatttgaaaattcactatgtaaattaaaatttgtataaattttatgaataaaaatatgcatatatacattacatatttcaaataaattccccgccgaaaacaaaaaaaaaaatttttttttttcttcaaataacggcattttctgtataaaaatgccaaaaaatttcgactttttttaaatttaaatgtttaaaagcattctttttaattaccagtgactaatccttttttataagagacacaaaatgaatttgctttttccctcataatgccttcacaaatccaaggccatttccgaattcagcagaagcaggcagcagttgtcccccggcttttaccaattcccactttgctgctaataaattttgccaattcaaatatgccatcattttcattattttattggccataaatttggcccatataaaaaatggcctttcatggcgtcctataatttgtgctctggccaaaactttcaaattccggattgcctatgccgatgccagtgccaagactcaaaaacccccggcacccggacacgagtttaaaaaaattaggaaaaatccggcaaaatttttcaaaaacccggcacggagccgcaaaacttggcaaatgccggtttttcctggcagactggtatccctgatgtgattgtaaaacaaaattaccatttccaaaagataatgtaattatagaaaaaattaatcccaattttaaattttttttttttaatcaaaacaataatatttttaaaaactttaatttttatattctttttaaatgaatttttatttatttttattaatttatacaaaaaatcattcctcaaaaagttaatgcccataaatcattattttttgcttgtgccaccattttgtggctgagaaatgtgccgtcaaaatatttgttgttttccttggggatttattcgcctttcttctgcgatgaatttatgtgtgttgccaaaatttgtttgctatgccatcaacggaagttttatcttggacatgccgccaaggacgcccttgaaaaaattgaaaactgactgatttccgtcctttttgaaatttttaatgtccttttttcctggaataatccatcaggaataaataaactccccacttttttcaatcaaaaaaaaatttgcgtactttgggcgcgaaaaattcttgaaaaattcttaaatgaaccaaaacaaaaattatttggggctgaatgtatttgcatggatatgaaaaattttagtgctaggtttgattttccacgacaatttgaatttaaaaatttttaaatttatttttgggttgttttaattcgaaaatttcttcaatttgaaaaattttcaaaaattgttccagcagttgaaccagttcctcaaactaactgaggttgttagaattaagaaaacaaaaatttataa

SEQ ID NO: 14400 - DNA, 1879 bp, Heterodera glycines
ctgcaggtcactttcattataaaaaaggaattttgtgagacttcgaccgaaactcaattcaaacaaagtgaacgggattttgactaaaatttgagttcatttcaattaaagtataaataattatttcagtttgcaaagataaaagcaattagaagaattttgaaatagttgaaaaaattatgtcaacgaggcaaaaaggttttaaatttcggcaaaaaagtaccgattgagaaaatttaaaattttaatttcataatatcttaacacaaataaagatttgaaatcgttatcagacctttgaattattaaaaaatgcttttttgaaatgtataataattattttcttcatttatctcaacaatattataaacttttgtttccgctttattctttgaattttaccgaaacatttgctgtggcggcgtgtaggggggtgatgtatattataagcacaaatgttcttttcatgtttggcgatgtataacattgatgcttatttttacatatttgatctgataaagtgaattgtgccaaacaatatgtcggcacgaacacacataaaaaaaattgtttggacatttattaatggaatacaatgaataaagatgggtctagggataacacaatagaagaaaatggcgaattattggacaaagtgatagatttgagaagagaggcggggacagggaaaaggggccaggccatagaccacattcataattaacttttcctaaaaatgagttggatcgttttttcctgtccaaactgcaatggcctcaactgcatgaggcccgttaactattccaaacccttgatctgtgttcatccttccatcaaaaacctgaccgactatctccaaaaggaacccacggctacaccaaattgtacatcaacaactttgtcatttttgttgataatcatcaccgtgatgctgaccattattttgctggaccatgtaagtctgagcaaaattgatagaccaaatctccattcaaatcagtgttagggatttaataaaatttcgtaaaatattattccctttaaaagagatattttaagcatatttggcgcaattttgatattagaaaatttgaaaatcttttgaatacggtacacaaacacacatatatacaagggatgtcacagaccaagctctgtacgacggttgactgggacaggggtgctaccggactgttttttataagaaaataaggatttctaggcgccgacggagaaaaaattttggaatttgcaaagaattttgttttgaaaatttattcattttataatttatcacattttcccttttgttaccaaaccctgcccccacccttcattatgcccccccccctttcagtttcacaaaaataaataattctggtctctttaaatttagctttggtcaaaattgagccgattatgggacgactacaaattgcgtaaagaacttgtgaaacgtcgcaatcagaaacgtctgtttttggatttttcattaattatttaattcattttaattcgaattaaccaggctcgcgaaaccatcagtcgcaacagcgtccagcacaaccgttgccgttatatgttccgccagtgattacgggggtcagtttattaaaattttagaattgtttaaaaaaaatatttttccaagtgaattagaattaatttttaaaaaattccaggtcaaccgtcaggagcaagtggcactccccgcaatctctgtggcagtggttaccgatgtgccaaaaattgagcaacatgatggagacgatgatcaagaattggacctgcgttaggatacgtagccagagaaaattttagataaggggaagcaactgggtggaaaattgtggaaaatatttttaaattttttaaaaag

SEQ ID NO: 14401 - DNA, 2123 bp, Heterodera glycines
cacacacacatacacaccacatacacatgcaaatacgcatgtacatgtaaatttcactaattcttgtgcatttgtgtatttttttcaatttcatcttcaaatccttaattatgcatttctctacccaaaactgaacacttccaacccttaattatacttagcttaaaaaaattgtatcttccaaaccttaattttttcaaaattgtatcttccaatccttaattatgcactttttctacctaaaagtgacaactcacatcgcttaattatgttcaaattttatcttccattgcttaattctgcatgcttttaacgtccttaattatgcacttttctacctaaaatcgacaacttcgctcacataaaaaaatggtgtcttccattccttaatttttctacctaaaagtgacaacttccatcgcttaattattttaaattttatcttccattcgttaattatgcatatatttttatgaaaaacacgataaaattacaaaaaagatataaaattacaggaattagatataaaatatgtacatgtgtttatatgggtgtatgcatgatgtgtgcatgtgtatgtatatgaagataaaaatgaatgatgaagaaaacaattacaaagtgtgaccaaagtctaaaattctaaagttaggtccaacaatccctttaccaacataaggagagtaagttttttggagaggataagaagtgaccctcccatctttgatgctcggccgcagaaaatttggatatatcacgttgattgttgccgctctcccgtctctgcatatcgtaacacctgctccttgaatgtctcataacgaagtccttggttcttgatgacatcatagttgagagtgaagccgcgcactttgagcacgtactcaagatctgcgtcggcaggtgcatccttgcggcgcagcttgagtccgtactgaacacatttattcataaaatttattattttgtaaaaataaaaaagcaaaatttacttgttttgcgccaccgctgcaaaactccaaaatctcatgatttgggtattcgtccgtgaattgcccaaggtgtgggccggtcttcagtggacaattgtcatccggatgggtcaaaataatgctgtcggtgtctgaacaattgtatttatgtacatagaatatatgatttttaccggtataaaggagttggcaagaaggtgctctcaccactttctgcatcgccttcagcaagaggaggcgagcagccgaagtcgtccacaaagaaataacttaacaaaaaaatttttttacgagtcaaaaatttttacaaatctttagtagtagtactattaccgatattggagcatgcatgctcctcaatccattcttttttcttctcgtagctgatgagaatgtgctgctcatcgagctcatcgattgctgtgacctctagcgatcggttttcgagatattcggtgagcacgactgggtcattggttataagcgtttgcgacaatccaaagttgcgcaaagagaaacgaccccctaagaaaatattttaaataaatcgaattgaattttcataaattacataaattgtttaggcaaagctttgcgatggagcgcttgcccttatttggcatcatttgtgttgagtcgatggtgatgccaaacttttcgtagcattcccgcacgaattgtgcttccaggtcagcgttgcctttgatgtttgggtcgaagccgctggcttgtattttttgtgccataaactcggtgatgtaggacttgaagagcttgtcgtcactgtcttgatactgtagcacgcgaaagactttggtgacacggtagccttcgtccagtgcagcattcagctcaagcgaagtgcacgtgctgacccaaccgcgttgttcatcggagtgacgacagtagtatgcgtcgtctgcaccacccgttggaaagtctttggcacactgtatgcagagcggaaaacaaagacggtcgtccactttgacaggcaagacgggcacatcacaacgccgtggcggcaccacccacactttaagcagtgataagtcgtatgggttgtcagccgcgcgagtccattccacttagaagttcagcacgtgcacctttgggtgccccaattgggta

SEQ ID NO: 14402 - DNA, 4296 bp, Heterodera glycines
  unsure (1)..(4296): unsure at all n locations
catactgtacccaccaatttccaagtcggaaagaatgtcgatatttgtaaccacttttgttggttttttttgatttttcatatgccaatgtcatgcaatgtattatttgtatcattacaaggctcagtcggctgaagaaaattttatacttttgatttgaattagacgggtcttgaataactgcaaaaaaacatcatagagtccaaatagccctgtatagagtttagagccgaaactagtaacatctgacaccacgtttaaacagctgtaagaattgactaaataataaaagtgtcacttttccatattttaattttgtagtaaatataaatttttaagcgcagcttggattattaaagaatgaaatcatagcgtaattagtaatagtttttcaatttttaatttaataagcccaaacttcccggttcccaaatttctggtcgcaaaaaattctgcttaaataaaaggaaaaaatgatcagtcaattaggaatggtttcaatttaaaaaaaaaagtttaaaaaaatgtttacgtaaatcctaacaaaattaatgcaataaatccaagtccaaaaaattgtaaacattgacctaaaatggtaaaatttgaattgggtttatgactaaaatgtttatcattgaaattcggtactcaaaaatgatagtctgctaaaacagctccgacaattaattaattcatatatcagcagttttgaaagtataatcaagaaaaattaataaataaaaaaacaggttcatcataggatggaggatattcaatggcatttttccccaaatcatattgggcatttatgtttcgtcctccgtttttgcttctttcacagtgaaatcgatggccaatgtcactttgtcctcgctttggtcgtaaaagcctttgcttgggtccatcagttccttaattatgttaaaatttaattgggcactatttatttgaattgtcacttacagcaattgaaataaaattagagaatccccagttgttcgttttattgttaaaagtatcttcattagtaaattctctccttaaatcctttacgccgctcttttgcgacacaattcgaagagttgccgaacatttgcaactccaattttctgctcaatatcaattaattaattgttgttaatatatatattaattattagtaattttacaccttcttttggagcatcgcacaaaaggaaaatggccaaccatttctcattgtcagtgctttcatttttcgttttgatttttgcccatattttccatggaaatcctttgatgtgcacagtttcgcttttacgttgactctcaaagatttctcgcgcaaattccgacactttttcaatttccattgaaagtgtgccgttggatttgttgggatcggaaatgaatttctccatttttggctcatcaacagttatgacatcaatggccaatgccaatttgtcctctgctttgttgtaaaagctcttgttcgagtccatcaattccttaattaaccataattagatatgccaattaagtaaatatgttaaattattactcaccgcaaaagtaatgaaatttccaaatccacggccgatggttgatctgttgataacccggtcacacaatgtcccaatggaattctccgcttcggtcttttctgacacaattcgataggttgcaaaaaaaacgcagttccatggtcctcctattttagtaatgattatatttttaaaatagtaattaaaattggaccttcttttgcatcgcaccataagtaaaatcccaaatatttcttctcatcaatgcctttcgtaatttttgctttaattttccatggaaatccatttatatacacggcatcactgaatctgcttctcccgacagactctcccgcaaattccgacattttttcaatttccaaggcaagtgtccctcttcggttgcccttggctttgttccaattaaaaattcgtccatggcttgggaatttcaacgagtacagcccgggcactccacgaagacacagaaacggatgggaattgaactgataaacgccgagcacttctttctctgttaacacaccggattgaactgtaaaatttcaaaatttattaccctgtaggcatcagttctctttgtccagttttcccataaattttatgtaaaaatttctgaccctccttgtccatgtatgaaattcaagcattaaaggtaaaatttcatatcaaccaaaacaaattcaatttaattcccgatttcaaaaattttaccgacgcattttgcaaaatcctcctcatggatattaggaaaacgaattttgaacagtgcaggaccaagtacggaacgacgatttcccgaggagcattcaatgccattctgacgacatttttcatcggcccaacggagtgcctaaatagaaaaaaatatcgaaattaaaaaatgaaaataaaaaattaaattgaaattacaattttccaaatttcaaattcatcgttgagtaacaaacgatcactctcgagaagattgcacaatattttctgttcaatatgcaaaaattcatctgatccgaacaagtcagccgcattttgacaaatgtaacgcaaacatttgatggaaaaatccttaaaaattgcttacacttggagcatgaatctcacacaatttcgacaagtttcgagctcaacaaacccgaattcgaacaaaagcattattaataagggttgtaaattatatggattaacatattttttctgcgcatatgctatgaagaaaggggcttaaaaatagcatttctgcgttaaaattttttgatttggtgaaggtttttagtccatataaatccatattttgggggttttcgggaataaatccatatttcgccatttttgggtttttagtccatattttggccattttttggaaattttcacaagaaaaatgaaaaaaaaacgaaaaatacacccctaaagatcaactttttggaaatttttaaaaattacaccccacaaaacacgaaaaatttgagttttcgtcgtcattttggcattttcaataaatatgttcgtcatttttttgcgaacatttctttttttttaatgagaattttttcgaaatttggcaaacttggaggtgtttttgatacaaaatatgcatttttaagttttaaaccccattttttggttgtttattgtactttttaggtttatttaagcaaatattaaatatgcacaccttttttgggatttttgggggtttacaacatatattttggcattttttatccatattttggtccatatttggccatttttggcctttttagtccatatttcgggcttttttagtccatatttaatgtccatatttcgcgttttttagtccatataatttacaaccctaattattaaaaataaatttgtttttctcacctccaagtcgaaaaggagagcttgggcatacgcaaagaaaacattgcgcaattcagggattggaatttgcaaagaccggtcgaccaaatcagggatattgtactttttggctaattaaaaaataattaaaaatttaaaaataaatccaccggcgtaaagcactgccattgcattgtctccattcaaatcacttaaatcgtccgcgtaaatgaagctcaacatcactttgaacgcttctgcttcaatgtcaggtatctccacaacatcaggacaattaccagaaactaattgaaaaattaattagggaaattagcagagacaaaatgaagaacaaataacataattggcattttcccttaaaattattatttttttttaccattttccggtctttcttttttggcgtcaaaacggaacattgcctcaaaaacatcggaagcgctcttcaaaataagctgatgtgctggcaaaacctttaaaaaacgtggataattaatgaaattgcaattgaaataaaattaaatttttatttttaattaaactcgcctcttttgcgtctccgtcccccaccaaaaagtgcacatccgaatgctcacccgtgctcaacaaatgtttcatccgatccattgacgatggcattttatattaaaaaaattgcactcggaaatttgatcaaaatttttgtcttcggtaattagctctgaaatgaggcgcatttataaaagggataaaaataaaaatttaaaaaaacgaattttagttttaccataatttttgatattttttgaaagccttttcaaattttgaaaaatcgtttgccaaaaatttgctgaaacttccatattgtttaaaaaggtatttgcncaatttatggatc

SEQ ID NO: 14403 - DNA, 1142 bp, Heterodera glycines
gcggccaagttttttttttaaaaataagacaaaatggctcaaaaactaagattcggaccccaaaaataagattttttctaaaactaattacagcgtgaaagaaacgcaataaaaacatgaaaaatcgacttaaaacattgtttataaaaacaagggcttgcaactgaaaatttttgaaatctgcatttggccgacaaaaaatcatcatttggggtcaaaaataacattttggaaaattttattcaaaatcaaaaaatcaataaaaatgtttttttcatggcgctctttttccaaaaaaactttttggggattggggggtgtccggtggtgccggtaggcgccgccgggaaaatttttgaaaatttcactgcactatgttaacagatttccaccaaaaaacgaccaattttttagattttgagccgatttttttgaaaaaaaaagttttggggacccggcggtgccgataggcgccgccggaggaaaaatagaaattttgaccattttttaacaaattttcactgaaattttggagaattttacaatcacgaaaatgaaataaaaatgtaattttttcaaaaatcaaattaaatcaaatattcgcttcaataaaaaataatatgtcaaaacagtcattcaaattttacatttttattttcaaatcaaaaaataagcacaaaataagcacgtaacgctaaaataagcacaaatcttagaaataagcaccttggccgccctgccaaaaaatgatcaatttttatgacaatttttgcaagtattaagggctcagtgaaaatttttttaaataattctaaaaatgaacagaatagagaatttttggctagaacctaaaccggtaaaacccggtcaaaaatcgccggttcgggccgggttgactttttcagaagcatccggtttccgggccaggtttctcaaaaaccagtcaaaccgggtttttccaaaattcaccggtttccgggcccggttcatatttccgcatttttaaccggtttaaaaacttctttatacgcgttgcctacaacttttttttagaacaactcgttaatacacctaaaaaatctgttaacaaatcagaaggaataacaaaaaaaatttccggcggcgcctaatggcaccgccgg

SEQ ID NO: 14404 - DNA, 1572 bp, Heterodera glycines
  unsure (1)..(1572): unsure at all n locations
tcataaccgtgttcagcaacctcgaaaacccctaaaaatttgtttttcatttaatttataaattttaaattttgttcgaattagggttcggggttcggaatttaaacaaaataaaggtcatattcgtgatcagcgccacaaattaccctataaaattatttaaaatgtcttttgagtactttttatagcacggccaattgagtcccagctgaatttggcactccattttcggcacttttcatcctgaaaaagggcaagcgcgcccgtaattctatttttctaacccatttcgaagctttttacatcaattctgaccgtttttatgcatttttgggtttggggactatgatcaatatttaccctaaattccacctattttaacgatttttagagccaaaaaatcgtatccccaaataacactaacaaatccattcactcattttcgcgtgtgtaaaatgcgatttttgcgcaaaatgttgaataaattatttgtatcattaattaagcgttttcagctgattttgcatgagtaactgtttaatcattaaaattaatttattttttacaaataattaaaataaagtagtaaataaatattaaaataacattgtaaaataacaaaaaatcattctttctttgcttcaattgtgtttatatgggcacttttccggaccaattgggcatcttaacaagggaatggcattttctgttcaaatttcgctctctctctctcttcacccgtccggatggttttggtggaaaaggcatttgaaagtgcgcagtttttctcgtccaaatttccttctcaaatcgctgatagtccgagggccaaaagcgcagtgaaacggcgccatttgagaggacgaacaattggcgttggctgtgcaaaaaggtcaaaaggccacgacgggtgccggacagaaaaagactgaaaacccataattttaattttaaatccgtttattaaatacaaaatctgttcaccggtgctcctcatttaacaccgttttcgcaatctcttcaaccgttgctgtaccgccacaatgccaattgctgaaatgttgaattaataattatggaatagaattttaattaatttgacaattggctagtgcttcttcggtcactaacataaatttaccaaaatttcggtacttatgtgatttagaccacatagttcgggaggaggaaaaaattgcaactgaacctgtgaaagaatgttgaaatcttttgtgttttacactttggtccaagtctccgaatatttaggaaacgattaaaaaaatcacgtacagtcatggtcatatgtttatggtagggtgctctcaatttctatttgctttgataaaacttttcaatgaaatcttttacgcttaatgttttgatgttttttatagcattttctgtggctttccaaaggcaccattatcttctctagggaatatttagtgacggagcaactttcgcctgagtgtaccacaccctatttttgggtggtcataagtttatggtagatttgaaaatgacaaaatgaaaaaggatttgatgggccanaaaattctgaaataattc

SEQ ID NO: 14405 - DNA, 2308 bp, Heterodera glycines
  unsure (1)..(2308): unsure at all n locations
tttgtcagttccattcacggtcagccatggcttttcctttaagggcncnncgncnccccccccncggctnnnaccccnccttnnnncccncncnnnccncccnnnncccaannccnccccanncanncacnncnaanaannccnccccncaaaaggnggacgaccnnnngcnggcagcaaccacagcnncaactcggnncaaggngnnagncancgnnngcgccnnccgncnnnnnaaacgaagcggagacacaaggcaagngcancancaaagncgganggcccgacanaccccaaaaagccaaaaaggacnaagccccgaacagggccnaannngccaaagggnngggccannnggagacaggcaccatcggncnnnnnacgnnnnngnatcaaacgaaccgnnggnccagggnctattccgnngntcgaaagttcggctgatctgtttcttcatttaggcatgtgtttatcatcagtaagcgttggctttgcttttgcttttgctcttctgctcccccccccccctccctttagacatgactttcggtgaccttctcctcacaggttcgacatggcctcagtttttctcttctcacaaaactcattcagttttttgccatcccaatgagtttttgatcagaaaacatgaatttctgcgccacgtcggcctctgttccatcattcacgtgcgtccgccaatgtgcgtccgttggactgtcatttgcgcttttccttttagttttgcaattggatcggtttggcggtctccgggctgtccctcactcttttgaatgttcgtcacattctcttcatgctttctgctgatcattaccatcccaggtggacaaactgatctacttccggtggcccttgtcttatgagagagcgatgtccaaacggagagcgatttgcttatgcggcggagtttggatcgtttctctggggtttttggattttttagaagtttaattattatttttacttaatttgaaggtttgtttcttatgtatgggccgagaaaattgtttttgtgacgcccgtttgcatgcttcaggtgagaggggtggaaatagcgcaagggtaggagagaaggggaaggcagtgagagtggaggaaggacagaaaaagggagggggaagaggaaacgaaagagggggagaaagaagtgccaaaagagggaggttagtttcgttgttttgttattctaatggacctatgactggtgtttcaatataatcgtccattttgtactattctatttatcactcaccactcattggcatcctccgccccttcctccacaatttcgccctcttcctcctcctcatcatcatcactttggtctcgcattacagtgccgttgtcatttcccgtccctttgagtgtcgcctttgtccctccctctgcgacgtcttgatcttccccaacttcgtcaattcggtcatcctctgaaaagagttcgacctctccgcccccctcttcctgttcttcctcctctctgtcgctgctcttctcacttacttcctcatcctttgtttctcttcttttttcttccttttcatcgttttttttatttttcttctcttcaacatttggtccatcattttggtcaatttcggcagtaatttgtttactaaataaattgaatttatgatggtttatttattattaaatgtgtgctatctgcatgggtcccagaaattccttcagaacttgaattaaaaaaacatgggttcgcatatgtccaagtccgtgtttgttgtaatgaataactgacggttcttccgcacgactttgccgctttttttccactatgttttgtgcagatgttcgctttttacgtccaccgacactccgtcctccactgccaaatgaatcgttcgctccgctgtcgtcaaaatcaatgcgcgccctctgtggactgttttcactgcgattggtgctcaaattggtggccataggatcaactggcggcgaattcgaggtaaaagcaacagtcgaagtctgaacaagtgggggggggggggggaagggagagcaaactcttgacaatttgagacgggaaacctttgtaggtccagcagatgcttccaatttggagggtcggtcgaacgcaggggtggcggaacgggaacgcgaacgggaggatcgtcgctccatctctatctgtttgtgagtgaaaacggaccattttgcatcattcaaattcaaacctcttcaagagcattcgcattgaattccgcttccgctccacgcaatcgcctcgagcgacgagctgatgatggtgtctcgtcctcggccccac

SEQ ID NO: 14406 - DNA, 2376 bp, Heterodera glycines
  unsure (1)..(2376): unsure at all n locations
gcattggtcgaaatccaaaaatcaatcgcattcgccacagaaatgcatcagtcggagatgcaccacttctccanaaaacattctgcaaaatcttctcattcgcctaagtcggccacagcaatgtttgtttttgttgatgccgaaaatgagacggacgaaggcgaaaatggtggaggaaagatgaagcaaaaggacgaagaaaatacggaaacgaaggaagggtaaagcatagggcagaagaggaacaaaagaccaaacgaacggacaaaagaccaaacgaacggacaaaagaccaaacgaacggacaaatgaccaaacgaacggacaaatgagtgaccaaaaatggagagaccttcgctttgttttattggcccaacaaaggacaaataatcatttttaaatttcacatttgataaatgtctcttgctttttttgttcaataatataagacttttgacttgttatgtttggatgttctgatcaaaaaaaaaaattatttttatttttcgatcagttcattgttgcgttatgctcagaatttaccaaataagctgagactaaaaagagcagcttcttaaaaggcacaatttgttgaacattcaactaattgtaagtaaagtgaatataattttttgagatttctttgtaaaaaaacaatttaaatttcttttatttccttttttaatttggaattttaatttttaacctcttttgacgcctttttctaatcattaaacaaacattggtttatttcttcctaattattcctaatttacccattcatttgtccccccgccgtccctcggctccctcaaaagcgttgtcttttaccctttccccgcaggaaagtttcccgccggcaattcgcccgtcgctcgctttgatttgttcaattgtggcggacgacaaatgcaaattaattggctgccaaatttgccttttctttttgaaaatccccgaatatttgaaaaggaaacccaattgaccaattaggcgaagggaaagcgatgaattaattctgtgcttttctgctgaaatcccccccggcgtttcttccacaaattttgcgacccattaaatcaaatcccccaaattcgtcctccacccccacctgctactctctctctctctctctagggagaatgccctcagggcaaaatgggacggtgtcggagtgaaagaatgcgaaagatgtgggcagagacattcaaatgggtaaaacatggccaaaaacactcacaatgggcgcgaataatggggttgaggcaggtgatatgggcaggagggaggggggggggagagggagggccgtctcaatggacctttctcgaggcacgtttctctcatcctaattttgattgcacttgtgccaattacagtgagcattgaaacaagcgcataaaatgatgagtggggaggggggggggggaaaggcgacgatggccattgactcggaaagaaaggcgttcatgtcaccagtgttttatgccgttgttttattgttgtcttcacattttgcttttgttttgttggcatttgcttcgtcttttcttttattttcccattttcaaattccctccaatttttccaattcattgccattccgtcgcctttggtccgcttcttaggagtgcggtaatccgattactatctttaaatccgttctatatttctggatttatatgaattggaagtgcgccggggataatctggaatggataaatctgacgagggatgcgatgaatttggagggcgggggggggaagaagacgaagtgacaatgggaaaggagaaaaggcgggatgagtcgcattggcagaagaatttatttcaaaatgaccaaagagtcattctctgaccactcgctgattattccaccaataatttaaccaaatgacaacaaaacaacacaaacccccttaaggctcttcgtccattattcactctccccccccccctttgcttttgtccttccatcccaattcactttcggtctttctttggcgataatcgcttaattacgcctttggaggacatcgcccttcggatcctttctcgcgttgtccaaatctcatcaaaggcataaatcatgagaaggagcacgcgatggaaggagaaggcggataaaaagggaaaagaggcgcagatcgaatgaaccgggggggggggggaattgcgggaatctgagggtgtgaattacgagagagattgagaaggggcgataaagcagctaagagagcaaaagagtggaaccaaacgaaaagaatggaagaaaaagggaggaaatggcaaggggaaagggaagaaattaaaaagaaaggtgagaagaaaacggaaaatggngagaagagaagaggaaaggaaagggaaaagtga

SEQ ID NO: 14407 - DNA, 3550 bp, Heterodera glycines
  unsure (1)..(3550): unsure at all n locations
ctaatcactcttctaatcgctgttgtacctcttctaatctctgttgtacctcttctaatcgctgttgtaatcactcttctaatcgctgttgtacctcttctaatcgctgttgtacctcttctaatcactgttgtaccacttctaatcactgttgtacctcttctaatcactcttctaatcgctgatgagttcaacggatttaaaaaacgggcgcgaagcgcccgttcaaggccaacaaaaattgaaaaaccggcgcgaagcgcccgactgaggccgcgaagcggcctaacaagctaaaaaacgggcgcgaagctcccgtctgaggccgcgaagcggccttaatagcccaacaaatttagaaacgggcgcgaagcgcccgtctgaggtctcgaagctgccttaatagccaaacaaatttagaaacgggcgcgaagcgcccgtataagcccaacaaaatttaaaaaacgggcgcgaagcgcccgttcgaggccgcgaagcggccgaaaagcacaacaaaaattagaaacgggcgcaaagcgccgttcgaggacgcgaagggcgcgaagagcccatcttgagcctcgatgtggactaaaaacccataataattttttaaaaattcaaaaaaaaatctccaaccaattcgatcaatttgaatcgcttcacagtctaggtagcgaagctcccaaagcgcgaagcgcttttgcccagctaaatagccgacggttcacgcacccgctagtttatatataactaaagaaacaaggcaactcattgctaaaactaaaatctcgggaacggctggcgggaggggctcgggaatgtggcattgcttaagcaactttttgaggcgcatccaggaaaactataggcattttggtccgagggccaactgagcgccagcggcgctgaaatggctttttgggggaaaatgcatgcagtttttgggccataacttttttctgggaacccggagccaaaaatgtctgctgaaagggccctaagttggaatgtttgggaaatttttttcttcttggtcgagaccctaggatcaaagcccgagcctgcaaaaattcgcaaaaatttttttccattttttcggtttttcagttttttgggaataactcgctgggcattgcgctgagcgtgtcggcgccagcgaactttttaaacagtttttcaggctgcatctaatggtttttttaaatttctgaaattttcagaaattttcgagctaggccccctcgtcacttttgaggtttttgaattttagtattttttacagatttttcctggaaaaacgaagaccactttcaagcaaccgtttttcacgctctatcgattggtgtaattgtcagaaaaatttttcaaaatttttttggaaatagaaaatttttggctggtgagcataaatttcagttatgtgaccataacttggcaggggttgattttaacaaaaaatcatcttagagcttttttgtagagaattttaaaccctatctattatgctttgtcttatctttttatcttaaatatgcaaaaagttataaaattaattgtgattttgaaactcaaaaccaaaggggggaccccatggttttgcatttcatgaaatttttttttgcttctaaattagccaaaatgcatttttatggcataatttgaggtgctgaatacgtatatacgctttattttgcgtttcagattttttgaaaggtgtttaaaattttttgaaaaatcgtcaaaatttgagccccggaaaatccagtgaaatttcgaaaattcataactctcttcatttttggtcaaatttagtggaataaagctgtaaaaatagagaaaaattgtgagaattttatgggatttatttgggttttctaacatcaatatgaaaaaagttattccagaaattctggaaattttagatttttcagaaaaaaattcgtaactccttctgaaaagctatttgagaaaagtaaaatactacaaaaaatccgcaatttttttctctataatataaattttattttacatttttatcacatttttaaaaaaagatataaaaataaaagtcattttgtaatttgggaccacaggggtgtgaccatgatttttgagtggaaaatttttttcaccaaaaatcttccaaaaatatgattttaggggatatttgggcgctgatcatgaatatgcaatcatattttactttagacatggttaagagctcagaatccctgtgtgattggggattctgagacatcatttttgggggggggcgaagtacggatccgatcggtgtacattatttttctttgtatttttgggttatttttaatgttttattaatttaaaatattgtttaactaataataaataagtttgtaattaaattaatttttttttgatgaataacattttattttgaaattaattattattttttaaattaatttaatattgttttattaatttattttaaattattttttgacgaataaatgttttttttattttgaattatcgacaaaaattccttttaatttgaataaatatctatattatacaattctaactttatttttttttaaaaaggataatttttttaattaaaccatgattctctcttaatcactgttgtacctcttctaatcactgtgtacctcttctaatccccacaaaattaaaaaacgggcgcgaagcgcccgtctggccccacaaaattaaaaaacgggcgcgaagcgcctgttctgangccgcgaagcggccgaatgcccccgaaaattaaaaaacgggcgcgaagcgcccgttctgagggcgcgaagcggccgaatgtcccccaaaaataaaaaaacggnncgcgagcgcccgtcctgaggtcgcgaacggctgaatgttcttacaaaataaaaaaacgggcgcaagccgcccgtcttgaggccccaaacggcccgatgcccgggcaaaatttccgccctaaggcccggaaagggggcgaaagtcccccccaaaaaattaaaaaaagggggccaaaacccccctcctggagggttcgataaaattgctaaaattaaacataattttttataagaaaacggggaaaaaaccccttccccctaaaagggaaaaaattttttttcccccccacaaaaaaaaaatttttttcacccctttttttcgcggggggcccccctttttttttttttttaataaaaaaaaaatggatttttttttttttaatataaaaattttttcgccccccccctggggggggggggtccccgcggggggggggtttttttttaaaaattttttttctgggggggcccccaaaaaaaaaaaacaatttttttttttccccacaccccccccccccccccccccccccttattttttttttttttttgaaaaaaaaaaaaaattttttttttttataaaaaatatttttttttttttggccccccaaacacaccacctcttctgttggagagggggaggggggggaggggggggggggtggggtttttttttttttttttttttttttttttt

SEQ ID NO: 14408 - DNA, 2505 bp, Heterodera glycines
caaacgcgctgctaatcaactaataatctatgttatgccagagcagcgatcctaccaagtcacattcaaaaaaattgaatttattattttatttctaatcatataatgcttttcattttttattaaagaagttctcactgtttgtgcattcgctgggtgctcaacagcttcaagtggcggcacaccgatcggtcatagcccggctcctttacttgagcattccgaagttcgaccacttcggtagccgtcagaaataccttcacgcgctcacatttgcccagataggcatggctacggtcgctcaattcattctgtatggattcaatgtgacaaaaaaaaagcatcgaagcattgggcactacaaatgatcaaataggaattaaattttgatagctccccctatcattggggcaccaaataaatatccctcaaaaaaacgaaaaaaatttctcaactggccaccaattcttttctctctctcttcttttctttctctcgctcctcttttctctctttttcttttattttctctctttcctctttctcctcttttttcttcagtctctcctcttttctctgtctctctctctcttttctctttgctttattcttctctcctttttatctctccctctctctctctctttctctctcctcttttctctctccctctctctctgtctctcctcttttctctctacctctctctctgtctctcttttctctctgtcttcccttttatctctctctctctccacttttctctctccctctctctctgtctctcctcttttctctctgtctccccttttatctctctctctccacttttctttatctctctctctttctttatttctctctgtcctctttctttctctctcttcccctttatctctctctctttctcctctttttctccctcactctctctatatctctcttcttttctctctctctctccgtgtatctctctctctctccttttttctcttcatccccctctctctctttatctctcccctcttttctctctccctctctctctgtctctcctcttttctctgtctctctctcttttctctttgctttattctttctctcctcttttatctctctatctctctctttctcctcttttttcttcatctctctctctctctttatttctcactcccctcttttttctctccctctctctctgtctctcctcttttctctctgtcttccctctttatctcattttcccgcagctcctttcttctctcctctttttttctcactcccctcttttctctttcctctcttctttttctctccactctctctctatctctccttttgtctctctctctctcctcttttttcttcatccccctctctctcttttctccctcccttctttttctatgttcttttctcttttttctccctctctcctcttttctctctccatctctctctgtctctcctcttttctttctctctctcctcttttctctctttcatcttttctcttcatccctctctctctctctttatttctatctgtcctctttctttctctctctcctcttttctatttcccttcttttatctctctcactctctctctatctctccttttgtctctctctatctctcctcttttctctctctccgtttatctctctcaaaggggaccatattacaaatttctccatagtgatgacaaattcgctcgtctctccgttcagcatcatttgacgcgatgaatacagtagcaactggctgttgtcgtacaagaacgtttggctctttttgtccaaaaattcggcattttctgccagaaaaataagcaccagcgcccaatgcaactcgtgacgcgtctgcttctccttgctctcgctggaaaattggggtgtagtctcggcacaatttttgctgtccgagattggcactacgctaatgagtcactcactcattgcgaggcacacgggccaattcctgcagtttcgattggcccttttggtactcagccacgaagcgaagctcgtgctggaatgctttgtctggcacaacacccaactccaactcaaaagctttgagcagcatttccaccggcgcaatgccacgaatgttttttgctgattgtacttgcatgttgttattgttgttttttaaaaaaaattgacaaaatcaatcttttaaaagataaattaaaattcacaaatagattagttgataagaccagagaaaaaatgaataggtaaaaattggttaaaatgaggggggagggcgaatgttggacagaagagagacgaaagaaagaaaaagcaaattgaatgatcagaaaacgacgggggtggcactgctgaatattaatgaagctgcgctggggttcatctgtcgattaaaagccaaccgatgctctcacgggggggggggggggggcggggggcaatcggtcgcaaagtccgagccaaccgttttttggccatcacaatcgtttagcattagcattat

SEQ ID NO: 14409 - DNA, 3044 bp, Heterodera glycines
  unsure (1)..(3044): unsure at all n locations
aaattcacattagattagttgataagaccagagtcctcctaggatnggtaaaaattgagaaaaatgaggggggaggcttaatgttggacagatgagagacgaaagaaagnaatttgaatgatgagaagacgacgggggtggnactggtgaatattaatgaagntgagatggggttcatctgtcgattaaaagccaaccgatgctctcacgggggggggggcggggggcaatcggtcgcaaagtccgagccaaccgttttttggccatcacaatcgtttagctttttaaattcgaattatttaaattcaaatattttagctacttttttatttgggagaacaatttgttaacaaatattgtccacaaaattttccaactcatcaatgctgcacaaaaaatgccaggattaagtcgaattaaatccaagttgatcagaaaaagaacatttttatgaacacatcaaaattcatcatttaaaattccttaagtgctaatgaatgaatgcatgaatgaatgattggcgcaagcatctcttacatcatcatcttcctattacaaattcgaaaaagattcaaaaatagaaataaataaattaaaaaaataattgacttttttttacagaaaattaaccatttgataaaaataaatattcaaaaaatgaacggattgaatcacagtttttagttgtgagaacatacacttatgtacataaaaatgaaaatgaataatgcacacaccaaattcatcgaattaatgaatattaattttgtgtatgattcatttatttgtgaatgtttttgattttagacataattataattataacaaatttatgtcaaatctcatcattatggcttccatttttaggcaaatgcctaaaatttctgcgcacttaatacgcaaagataagcacaaaaaacgccttttccgcttggtttggggtgtctacgatgacttttataatgcctaactttgtctattttgaactttttgtgcttaatgcttatttttatgcctatttcgccattcttggcgtctttttcagcactttcggaaaaatccttaacaaaaacgcaagaaaaatgaaaaatacacccctaaaaatcggcgtgaaaattttcagaaaatagacccccaagaattgaaaaaagttttcacaaaatcttattctcaaaaattaattattttttcttgacaaaaattttggtttaaaattgtccttttgaaaaaactttaaaacaattgaaatataagcaaaataattttttcttaaattaatttttattaaaatttaaaaaataattttttgaaaaattcagaaattttataaaatttttttaaattttcataatttctttagttttttaaataagaaaacattgaaattttttactccatacaaactccaaattttttcaaatgtatttttcttaaaacaatgtttcataaaataatcacctcctatactcgcatttccaaattttgaaataaaacccaccaaaaaagcagtaagtattccaaatttggtttgcccttctccctcgccaactgatggaagaccacaatccatcttcaattgatgcaaatttgcattatgcaaatgaatcatttttccttaaaatttgctttttcattcaatggagcacgagaatgaaattgttattcccccattttgagaaatgataggtcctttcttgaattattaattgaaattgaatcagttttttgtgtgatgggcctgattgggaaggtttttttttgataaatgtatcaattttaaattgaagaatctttattattgttttgatttaaattacttatctctatttttgtttaccacaataaaatttcatgcaaaatgtaacaaaaaaacaaataaaaaataattagcatgtgagattttgcataaaattgtgaactaaaatttagaatttttaaaacataaaatcatcgccttgttatggagccaacaacaagaaaaagattggaaagaagctaaagaaactgaagagaagccaaattttcatactttgttaagccaaaaaagtgcaaaataggtgctaaaaattggaaactccaatgtctttatgcaaaaaaaaaatcccaaaagttaactaattttttttatcaatttctcccgcacaactgcaactttgtcaagaaaataaataataaattttggagacacatttttgcgaaaatttttaatttcttagagggtatattttctgaatttctggtcaatttttaaggttgtctttttctgaaatttttaggatcgattttaggggtgtatttttcgttcttattacaatttttatggaatttctgaaaaaaggccaaaataggtgcttaaagttttcgaaaataccaaaataggtgctagcccccgttttatgtgttttaggtgctagaaagtcgttctaaatcgaaaattgttcggagaaaatgtgattttcgtgcttctctcatcaagtagtatttaaatcatgttaattggatttttcagggcgctgaacataaattcggcatccagcgctgaaacccgaaaaggagtccaatcacaaaagatgattacccatttttgttgtgccataataaactgggctgctgattatgacccggcatgcattatgccgaaatcccgcatcccggaaacatacttacataaaacccaaaaaaagaccaaccacaagagtaaattgcaaaaaaaagattatctccattttttgtgtcacaataaatttagtgcaaaatgtgacgaaaaaagcaaaataaaaaaaggaatttattttctttcccccgtagaaccatcataaagcataggacgaggatttttaaatgtttataattaaaataaaatgaatatttcaatttcagtaagaaatttaaaaacatttctatttttttcaaatcaaaaaaatcctcgtcttgctaagtataatatatgtatcacattcgaaaacaaaaaattggtctttggacaaaacaagcagtagcatcggcagatggcaacacgagatttttgtcgaatttcccgtaaa

SEQ ID NO: 14410 - DNA, 1298 bp, Heterodera glycines
atacgaatgcagtcctgtgggttagggcacctcctgtccccttcggcgacagcattttcttgtctttttgtgtattttttactgtcggattgtccattcattatccgattgtccgggagccacttttaaaacatttttttataaatgagactaatatgctatatgcagtccagttgttaaatcagttttctttttcagttttttctatgtttaaattgcacagaagcacagaaaaaatgcttgatttttttatttattaactttaattattagtatagggtgacaaataagtcttgtaccactaattttttgttgtaacttttaacaagcaaccaaaaataacaaaaatatattcaaaatgtgctcaaaagattagggaatattgctacataatagtttttcctatctttatagagtacttagatagatacaaaaatgtgccgaatttttttgcagaaggcacgcaactcccggatttttaaaaagtggacgaaatcaaaaccacaaaacaattgtcattttgggataaattctgttaacaaatttttataaaatttcagattttttcatcggactaaagaaagattcaaattctgaatctctctgggtcattttcaataaaactggaccatttaaataatatatttgattgacttatttgaaaataatttttaattaatttgcaatttttttaattgttattatatatgtatatattttttgcttagaaaaataaaagaaaacattttttatataaatttttatctaataaataattaaaataaattaaactttattgaattttttcttcgagagaaattgtcgggttttcctgtttcccggtcccggctttattggtaccagcaagtctcggtctcgctcaacttcacttaaaaatattaaatatcaaacttattttgattttcagaaaattattcatttacttcggatgagcgtgccatgcaaaataattttgtggccaatcttcatcaaaatggcatttcgtttttggcagattatgccgcactttggctgctcgggttggacatgcttcaaatgtataacaaacacgaacagcagattaagttgttcattagtcgaagttgcagctgcaccatggaagcatgggtaattattaattaattaaacggggataattaattcattataatacctctaaaaattgacttatttaaatcaaaaataatcatatgataaaaaaaataaataatttattagggctgtaaattatatgtaagaaaaaatcgcaaaatatgtacataaaatatgaaaaaggt

SEQ ID NO: 14411 - DNA, 2303 bp, Heterodera glycines
tgcaataaattattatttcattttagttaccaaaatcaattagaagtaaaggcgtacgattggtaaatggcatttacgtgctaaacttggacattgtgttgaccaagcgttgctatgtgctcagaatgaacggcactcagttgggcaaaccgatttgtccgttggaaaaaaatttgccattggaggaaatcagtgggataaaggtgaaacggatggacgagagtcggagttatcgtggtcaaataggtcgggaccaggaatcgggtttgatcaactcttaatttataaaccagaagaaatttattggttaaaaatatttaacgaataagtaacaattgtttctctattttttcgttagctttttctatggagaatatttatatgattgttcggcggtgccagaggcgccgccgggaaaatttttgaaaatttagttttggtatgtttacaaattttcacaaaaattgacattttttaggttaaactttgaaaacattaagaatttctaatatatttgatatctttcctctttaggtgcaaggacaaatgttgcttcttggagatcctcaagtgaacgaaaatgatgataaaataaaattcactcaagaagaggtagatctaatattatatccatccctaatggaataattaaaaaaaacatttaatttaggcgcccgaaatacgtttcgattggtgggctttgccgaagggaagtgcgccgttggactgtgctcgtctgtttgccaaagataaaaaatacattggcaaaatggtaagacgacgcatttgtcgtgaggaagatcctactgaaaatgacttggatatgtcctgcacggctattcaaagcagaaaccgattttggcacggtgccaaggatgaccaacaaggggagcagaatgagaaggagcatgccaattacccaatggcacaaattcgaacagtgtacaaggcaagaaatggggaaattgggattaatattggatgtgaatattcaaatggcctgaaacccattcggccattggtttgaaaagaattcaattttctatgggtataaatggagcaaaggtcaacttgggtcccacatttccatgcttattctttggatttttgaactattatctcttttgtctcaaattattaggtcaattttggtcccggcatatgaacgacttttaactctttttcatgtgttatgtttgtgaaacaggctcacttggaaacccaaaaaaaaaaatttaagatttccaaattacgattatttactcttcccttttccattctcttcccaggactatgtggtggttgagttggaattcgccgccactttttccccgctcaattggtactgtttcgtcgtcgatgccgcgtcccccgcgctgtttaagcgccgcgtgcgcgcgttggccaaatgctttccgaatgtaattatgggagacgagcgcccgatgaaaagtgacggggagggcatgatggaggcggtgttggactgttttgagcgattggacacgccaaaacgcaaatgggaatatgtcactctgttgcaagtgaatgaatgggccacaacttatttaatatatgtaatacggtatatgcgcaatgtacggtatacaagacaattagcacaaggtttcaaaatatcacagaaaataatttttaataatttgttaattttctggtctgatttttatgatatctatgacccaaaaaacggaaggcattatcatattacaaaccagaactcaattaatcattattttttattattttcttaatagaatcacgacacggcaatcaaaacgcgtgttcaaatggcacaaattttcgcttggatggacggagcaaacgatgttcaagttttagtgccaccgcctggacgagttgacaaaattacaggaatggactggagttttgaggcattaaatttgttcaaaaatggtaatgaataattaacatgattttaagtgctttaaatggtttcaacaataaatttaacaataaattattatttcaataagtcgaatgtatgccaatccattaagtgtctcaatattgcttatcagagcaatttgagaggcgaaatttttcgagactcgagccatgagagcacttaaatatattaaaaaggtcctaaaacttagttattaaattaaatatgttctcagaataacaatgaatccaaccaaattggcttttaattttaattcttttacaatgggtcacagaatgtcaaaaacaaaaaataaaattttgtcttatcttactttctttctttttttttcttaattatattacatttaaaaata

SEQ ID NO: 14412 - DNA, 1629 bp, Heterodera glycines
cataattagctaattgtctaattaataatttcctgtcattacattagcccattcgctgattattacgacacttttttgtcctttggattccccgcgatttatctactgtttgttgtgttctttttgcggaaacaagaaatgaaaaagaatattcaacagaagcgactgaccacaattgttgtgtcgacccattcgcttttcaaaaaggtgaaaatatttttaattttccaaattaatttcccctttttcaaaggttgcaaacaaaaacaaaaattgctcttcgggcggtgattatgcaaaaatcgtaagtcaatcatttatcagcagcacctaattagtgtgttttccatctctaattgccaggtgtttgtccaagtggccgcaattaacggcataaatgtggccacttttgtgctttataccgtaatgcagcaccttccgatgagcaaatcgctgattgtcgtcggcttctacttcaactatttgatgtttggtcggtaataacacatttggcaacaattaactgttttattaggcattccgccaatcgtttatttattcgtcaaccgaacaattcggaacgaatgccgcgcgatggccaaaaaattggtcaaattctgatgaaaaggaagcagcactcctccaccagagatcaccaattatttttcctaattcctttatcattctttttgtatctcttttcgttttttcctttctctcattccccaaaatttgtaacattttttttgtatttattatttagcgaataaattgcatttatccaattaattttcatagaaaatagaaatgacacaaataattgcagtgtcagaacaattatagcccatgctcatcagtgtagaacaattgtattcatccgcatcaatgcgttgttcaccagccgtactgagtggccaattgctgggccaatgaaaccgtttccactcggccgacgtccgtgtccgtcccttcggtcactccgacgagaaatgctgaacactttcatttttaattaacgaaacaacgggaagtggtgatgagctctgttcgttcttgcaatcgtaacgccgtgctgtccgtcaatctctcctgaacatttgtctaattatggcaattagtgagttggatcgaaccgctgaggcaagtgttgttggtcgtggacgggggctgcgtaattggatacctaagcaaagagtgggcataagtaattaaaattatgttattacgcacgtcactccttcgcaggctaagccacggtttgccaaaacgccgggctaaaaaaagtaattaattgggccaatggccaatgattgtacatttctaaaggcgctcactgccacattcgcttccattggatccaactaagaaaaaacaaaagatattgaaagggaaggggcggggaaatcacattgaaattgtcagatttggcccaaatatttccgtcttggccacaaatcgccgcctttgtgattgggcccgtggcttaacattgccgtgaaggcgaattcggtaattacagaaaatgggaaattcaccggccacttggttgacaaaagtgtgccatttggtggcgtccatttttaatattaaagcgaattaatagggcttaaattcagaatcgatgatgga

SEQ ID NO: 14413 - DNA, 1910 bp, Heterodera glycines
ttttcccataattttctcgcggttcgataggccgacaggcgccgccgtcggctgtcaataaatgctatttattaatgtttgtttttgtttatcacacaaaaatttggcgaaactttgttttggggttcaaagatcgtttataagttttttttttttaaataatatattaattttattttagttttgtaatttagcaaaataaaaaaaatattaaattacaaataaaaatgggtttatttttgtacgattttttcgaccacaattcttccggctgacgattcgtccgctcagcaaaaattagcagggaaaatataaaatttgaagttttagcttaaaccacaattttgggcattaaatgttatatcgcctaaattcataaaatttaaattccaacattaaatttttactggttttttcgattcaatgcttaattccgacaaaaaaaacttttttggccgatattctcgagcatataaaactgagcctaaccataattataatttaaaatacttggtaaggaaaaaaattttcaccttttgctcatcaaaaatttgttttttaaattttacagtcgaagtcaaccaaagtcgaaatgaacactcaaaatcaacatttaattgtcatttcataaaaaatttacacattaaaatttcgattttttaacatcgctgctacggtgctcaacgtccgacaaagttccaaggtctcaaatctattttgtatttttcgaatcgtcgatttttccttggcggacatcgcatccaaatgaatcgttcggataaatcatattatttatcttttttcaaattatatgtacataataaatgtgcttttcactggtaattttgcatcaatttttgcagtgccatcgatgggtttttgaccatttccgcaaatgtttgtgccggcgattcggtggcattggcagccgttgccatttgtgcctttttgttttgctcgtagtttttgagtaccctggatttcaatttcaatttcgtgattgattttgatgattgcttgccttcgtgcaaacacttctttctccgagggccattcgcagtcgttgccctggtaaattggtttcggcgaattccaaaagagtttcccgccaaagccttgctctaaacaatttcaaatttaattaattaaaataaattaaaaaggaaattaaaacgattaattaccttttaaaaagtccacacattctttgttatatttctggaatcatttgtgaattcgaattctgtgtttgtttctcccttttttcattttgacctgaaagaaaagcattgggtccctcgcgtaaacagtcaaagacaatttcccagcatctgaaaatagaaacagttaattaattgattggttaattagttagttaattatgaaggctgtgcccgacctgtgaccaccatatactgaatgtttgcttcttccaccgatgtttcgttgtcgaaggaaggcccaactttgataatataaactaaaaagaatggtatttactaaaaatattaattaattaaaaaaacaattgaattttattacattgccttgggtagaaatattcctccgtgtacatccaaaatttgccagtgccaactttgttcaggtcccttttgaaggtttcgattggcccgtgtttggtcaccgtgcggtacgattccttcagcggagaaaagaaaacaattaaaaaaatgcaaatttagcgaattatttcacttccattgagaagccatcttcgcccatcacactgtttggtttgactaaacaaaatttaaattaaattaaaataatgaatcaaattggataaatgaaagccttctttctcacattatggcggaaacttacagtaactgacggcacagtacatttagggtcgctgaatgtcaaaattcactgctgctttatacact

SEQ ID NO: 14414 - DNA, 3930 bp, Heterodera glycines
  unsure (1)..(3930): unsure at all n locations
tcactgaatttnntgtcgagaaaaatcactcaaaaagcgagccaacactccaaatgattttgataaatatagagggcagaagcatttatgtacaattacaattatttattattttgttaccattcatttaattttgtatattttaggtctttttgtttttttttcattttactcttaattatctaggtatggattattttaagaatactagtaaaatcataattttattgtttgattaaaaagtcattggtttaaatgaggcgaacaaattcatttatgcaaagttcatcacaatatagtaatgcatttattatcataaccaataataaaaataaaatttaataatttgcgtgtattatttttacagaatgtaaattaaattttatttgttatctttaagttattaacaaaattatcttttattgttatgtttttttaaatattcatggccagaaaaagtctctttgctaggtagatttttaacgattattacttcgtttaaatgcttttctttgaataaaaatcaacttatgtttttcctataggttttattaataagtatttgtgtctagcatgttgaatctaagtttaattggaataatttggttttctcattgaatttgttattatgacaaccttcattaaattatttaaaattgtgatcgttattttttcactatttagttaatttgattatttaaaaattaaatcaaaatcgttaacattttacttagattcgttttaatatataaaaatttaattttcaagcataagtatcaatgattttattgatttttcaataaaatatgtattcaattttaatttcttgcatcgtaataaaatctttttatccaatctttccgtttttattattaaatataagattattttattatgttgccttaattataatagcaaattagaaataattttaaagctattttataatttagaaattatttttctctaaggctattcatattttggttttaacattttgttggaaaagaagaagcaatttgtcgggggtttctttgccacacttctaaattttgcacaaatagtctatgaattggccaaaacctgctttaaaaatccaataccaaacaaaataaatttatgcaacaaataattaaaagacaatccaaaataaataaaattcaatcaacaacaaattaataaaaacacaaataaatcgacgaccaacaaaacggctaaaaattatcaccgacgataaccaaaaaaatccactaactactcttgaagaaaaccaaaatatttgggtcgaattcaaataaacattatgccaaacaaattcaaacaatcaaataaagggtcaaagagtcactaatactacatccccggcctctaagaaagacggtcccctcgtctttaagtaaaaataacggcgaattcggcatccgaatggtggggttcaaggttttcagctagtgtcgtgacggcttttaaaaatgtgggcatttgtgtcctcgaaaaattttaatgtgtttgtccaaaagaattttatcgggaattttgatgaagatccacgttttgagccactttgcactctccactgacaataagattcgtccatttttcacgctgaacttttctaatcgccaaattctcattaggccatttttattgtccgtctcactgctgccaatttttttttcagactttttcagcttatccagctccaaaaagttgcgtgcttcctcattgaggtgcagagattgagtaactaaatcctgattctgctttgatgagatggacgagtcgaacaatttggagatgaactcgctggtgcctgactgtctaacggtggccaggttattggtcacggcatgtttcatcatcccaatgcccctgtccgtcttgtcctttatgtgcaaaatgtggttttctttgtccgccttaattttggttaaaaatttttcggttgccacaagttctgttgcgtttgcaggcgaaagggaccgaattttgtcctggtcatccgacgaattggagaccttattacagtccaaatttttggaaatcgggttttcaacgatttcggcccaacgcagtcccaccggatcacaaaattcaggctcatcgccttgtccctccataaaccgctgttgcaaactcgcagcaactttgtcaaaatccgcacatatacgctgtgaaacatcataaaaaagataaccaccgcggcttcgtttgaattcgttgtcaattgactcacttatcataagataaatggccatggctcggctgtacaggatgtatgcatcctcttctttcccttcctgcatttttgtttttcctttccattcgacttccaccaaaaagttgagccgcgtaaaattgtcgagacggcgaagtgaataaagcaatcgtttgtcaatgtcgcaggcatgttttttgagcctctcatacgaaccgtaaagcaatggaagcaaatttgttggtgaagatgaagtcggcataattttgttttatcaacacgagataaaacaaaaatccaatttaaagcaacacgagcttttacaaaatttaattggtgtagcacaacacgagtgctttcgacgataagttgtaaaagtggaccaaataaggcggatgaagaaaaacaaacccaacacgagggtattaaaaatttgaagaacagtcgataaacccaacacgagggtattaaaaatttgacaagcagtcgatgaacccaacacgagtgtttttccaaattagttgctttaaaaaaaaatataagaaatatcactgaagaaaaaccaagccgtccgccacctagctaacctttgttaccaggagcgccatgttggaaaagaagaatcaatttgtcgggggtttctttgccacgcttctaaattttgcacaaatagtctatgaattggccaaaacctgctttaaaaatccaataccaaacaaaataaatttatgcaacaaataattaaaagacaatccaaaataaataaaattcaatcaacaacaaattaataaaaacacaaataaatcgacgaccaacaaaacggctaaaataccaccgacgataaccaaaaatccacccacccttgaagaaaaccaaaatatttggttcgaattccaataaacattatgccaaacaaattcaaacaatcaaataaagggtcaaagagtcactaataccacagcgtttgtttatgtctatgcagttaatttggactggaaaacggaaggaagtcacagttttgttatgtattaggaaaatgcaatagacattgtgtaaaacattaaaagttttttcgaataaatggtttaataattttgattaatatttaattttgtcataatgttgtggaataaatttataaatgattgtgctccattgttancaaaattaggnttggccggnttccnnttacccnaccnnntccaaaantacactnntaanaatnnnnttctnnntcaaaaaatnttaaatttanncnttcntcanaaaactcattacnccaantcaccttcccccttatcantntattttnatctaccnncttatncganttnnattttcaaaatcaaatcccnttcttnaaaatncccnnnaattcnntntccaactttccctctcaaaattncnttttccatttttccattttcacatttcactttttcttctcctttacactttcnttttcncttcnttnccttttcattaatttccaaaanaattaaaagaaaaanataaaaatattttatnataattctcnttctnccaattaaatntttcattcnttccattnnccattaatttattcnttttttnttttattttttntntacnaaaatncaacttttacccacgattttccttcctttncttctcacttatcgaaagcttcgggaagcttttttgctcaccccactaattaattggctatttaa

SEQ ID NO: 14415 - DNA, 3077 bp, Heterodera glycines
aaattcacacttgaaaaattttttcacttttttgttcgaattcgggtccggggttcggagttgggtaaatacgagttaagattcgtaatcagcactctcgaaaaccattaaaattggttttgagcacaaaataaaaaaaatgaggaccacaattctttaccattgtcgatatctttcatttcattgcttaggacttaatgatttgatgggagcgcacgtcgaatggaaacgcgaaatggaaatggaaatgatgcagcgaagccaaaacgccaaattggcggccgtccgaaatttgcacgactttcttttaaatgggccaaaggagccgaggtttgagttaagcaattcgaaattcgcacaaaatgattgttggcatttcatttgtctcttttagcacttcgtttcggcaccctttcattgtcagtgccgaggcccgtgccgaatgtgaccaaattttgagtcattttgagaagagaatggaggaagaaataaaaaagacaaacactttgttaagttcgaccagcaaatccaaagaaagtacgaacgaaatcgttttatattttaatcatttttaattcattttaggtccacaaaagaccaaaaacgagttggacgcattcaaaaagctttacttgcaaattttgtttcgcctttttcgagaattgtatcggcaaagtgccgaaaaagtgaccaaaagtgggcagaaaggcatacggaggcaaagggcggagaaggcgcagctgaaaacgatgaacgaaggtgggcaaattgggggcgggaaacccaacacaacctcaaaatggcaaaatttccgatccgtaaaatggttccgattgaccaatattgtcccgattcgtccaacccatttctttccctttcctttcgcagcctttgacattgtgccggaaatttcggaattgaaacggcactgttttttgggcgccctttggctttgcgacggacaatcggttcgctttttcgactatttgaacacagaaattggctgctcttctttggatggaccgcacatcaattacatttgtcacattgccatcgcagccaaagaagtgaccgggggaagcgaattttgagactattctcgtcctttttgaaccttaattttcgagaagtgttgacatttcccctttatttagtcggcaattttggagccgctcattgaattgaccacttttttgccctccaattatttacacctcgccaaaatactcaattcgttggcattgatttatggtggtcattccgtaaaaagaattcaaaaacaaattcaaacattttacttgttaaagggaaggcccaagattttgataagttggagaaattgtggaggaaaatggacaatatgaaacggaatgtgccatacgaggaacagagcagccgaatgaaggttaaaattggcattgttacattttgccaaaaaagcgattttagctggttttggcaaggattgagcatttctatcggacggcaaacagaaaagtgccgggaactcttctggcggcgctgaagcgattgagcggtcagccgtactttatcagtgcacacgcgaaaaagagagaacggatgaacgacacgaaaggacacagcgacgagagaatgaacgaaaattgacgaaaagagcatccatcttttgtcgaaaggacacatttcattaaataaaccgcttcaatttgagcgattttacatatttttatttatattttcagaatttgaaacgagtaataaaatccgtattatatattttggtacaatttgtcggatttacccccccccccccgttcctttttgggtccggaaaatccgtcagtagacaattagtcagcaaattagaatttgaaacgagtaataaaatccgtattatatattttggtacaatttgtcggatttaccccccccccccgttcctttttgggtccggaaaatccgtcagtagacaattagtcagcaaattttttaagcaattatcgagaagcttgctatttaatatcaaaaaaagaatttggatgggcttttacaacacttcttaattaaaaaaaatccaatttatcattctatagaaataatcttttaaattatttaaaatgcttattcgttacttttataaaataaaacaaattattatttaagtttttccaatttaattcatttttacatttttatttaaaattttgcgtttcaaaataaaattgctgatggattgtccaggcgcacttcattttcaccatttcctcgtcaacatatttcccatgcatttgtcgtcgtgacggcgatggaatgcctttggctcatcggtcgctgttcgctttttgccgttattttaacaaaatgtccggtgccaattgaggcggtcagttgaaaagcctgaaatggtgggcaaataaattcagtgatctgtcgccctcttctgctgacgatggcgattagcctttacttcttctttatgattattaattactcgtagtgctaattaacgcgaattgtcgattaactttgctcacatcgctcatccgcgccttcagccgataattgtgcttcatcgtgtccagcttcgccttgcgcagtcccttctccgtgtacataggcgaataccaccgaaattatgaaaaggcaaatcaaccgctaattgggcccatttagtgctttcaaacaatttccggaaggattgggccggcatttttcgaggattgtgcccttcttcgaatgtgagggattttgcagtgatttaccagggaaagaaataatcgcgcagcgcccacaaattaaaggcgagccaaaagagcaaacagcacaagccgaacgcgtaaaagaggagcagacgatgctcagaagaagaggagaaaagagggggcaaattcacctcaaagggaagggggggggggagaagctttaatagctttaattaattatgatgccccgagggcgtaaagcttcaaatcgcatatgaactgtctaacttctcactttctccctcctacggaacgagtcgagccaaatacgaattgacccaaaatgagatgggaatttgtccgctcgagagtctctttcctcgactctttttc

SEQ ID NO: 14416 - DNA, 987 bp, Heterodera glycines
ttcgcaaatgtgaaacacaatgtcactgagtttttcagcattgaactctctcatccgaaagaagtcctcttaaccaaattactttgtattaacaatgggaggacggacgcgacaaaccattgctaagtgtgcgaacgaggttcagctgcagctcccacactaatggggaaaacacgctttattataaagtatcttgggctttattgcactttaggcgtccaatcaatgaccattttctttggccataactttttcctaaatccctactaaacggaagctatgtcgatagaaaaatagaccctgctctatcgactgacatgttaacaactcgatatgttccctggtcagggtgaccattgattggacgtatagtgcattagagcctaaatttgtttccgtcaggccaaaccttcccacggggctgtgtcctccggaatcagccactgtcgcttccttcgctggtaaaactccaatttaatttgcacagggaaaagtgtttcccaacgatcttcaaacgaaacacgatttagccaattattagtaaaatattcgttttactgaccaattccgtaaatccgtccctctctttgggatggagctgcacaagcggcggatattgaggcagaaccagtcaagaaataaccgtcgctgacagttcgatcgaccgcgtccacaaaaatgcttatttttccgtcgaactcagagacaagctccggactattaacccgaatctgaagaaaagaaggttttgacaaacgaaagttgacatacgtaagaaagatcaatgtaattgcacgagatttcctcgtgtcccaatgagccgagagaatagtcaatattagtggagtatttaaactgaaaaggaacataaaaggagtaacacttcttgtaaaaagggaaaaatatacttttccaaagacacgatgtaccaaaattgtatgaaaagcaacacacacaactttccttaaagtgccgacattccgccgt

SEQ ID NO: 14417 - DNA, 2386 bp, Heterodera glycines
  unsure (1)..(2386): unsure at all n locations
cattttgtatatttcttaaatgtcacaatcatcgggtcaggtgaaaatgaaagtgaatttgagcagacgacgattgtggaggacgcggagggtggcggtgatgatttgatgaaaagagacaaggagaacaaatatatacgaatgagtgaatgggttgggacggtgggagggacaggcgccggccagtcacatttctccttttccttttttattctgtttctccttttaattttgtgtatttctttttctattaatatttactttcttcacatgatcttcatgcttttttttttgcataaaattttttttataacattaatttccgaatttttaaataccgacttttaaaatatgtacacacttaaacttttccaagttgaaggcaaaatttccaaaattcttgaaattaattaaaattaagatatgtacctgaaccaaaaatattaggtaagtaagtccctaaatcgaacaaattttatatctaaaaaaggtttatgaaaagtaaaatcttttctaagcgaatgattagtaatttgacatctctgaaaaaagtttgcagcctttagaagaaattttgtacggattatttacatatatttcaaggaaattgatttagaatgtctttgccaaattctgatcaaattctccatttttctaaaatatttcgtctcttgcttaattcccaacttgggtatgaacttagacattgtaaagagccaactcacaaaaggattattcaagcaattgtgctgggcggaaaaattgtccgcattgacaaaagcggcaagtaattttgtgatttactgtttcttagagttggtccccgactcggaaaattaaaaaaaggataaaattcataaaaaatgtttccgaacctcataaaaagactcatccgatttgtgccctattttttatatgaatatgaaaatgttttattataggtttaaaaaacgaatcatcctcttctgctggtgttaatgtttttgacaaagcgaaagtcattggtgtcggcgttgagtcttttgtggaattggattctcgaggggtgttccccggtgatttgttctgctcggtttgcttcggcgactgactcccctcttaaggctttggcggttatgagctaacgtcgcaagattccctggccgagtcttntaagcagaaacaacatccatccacggtcttcccagtagttcagcatcaacaaatgtaacaacaataataataccaattctttctaaaatttaagcttttcgcccgatgacggcttaactcgcgaagaggaggcctttttgaggagagcggcgatggaagtgggcgtggtgtacgcggacaatgagtgctgcgtgttagtaaacgagaaattcatttaaacttcaattagagagcccatcggatcagtgaacaataagccagcaacttcagaggattctgatgtttatgaaccagtaataccgaaggtaaagaaatttattattaagactaaccagaaaagagtcgaaataatttcatgttttactatgatacgatcaaataaaactaaatattagcttaggattaccacccatcgtttgccagtgccaagaactcggctcagatgaattcgagtagggaattcagtgtcccgagctcaagatttgcgcgtctttttaattttggacggctggccgtgggtttgggcacgggtgcggtggccgaattcgcacgtcgtacggtttcggcggggatgcaaaaggttaattcgccctcccatgtgagtttttggattaattttccaagctttttctttagagagtaaagtctgtggagagtcaatcgacgggcgcaattggtcacagtcaaagcgacaactctcatataaaaccctcaaaccctctattgacgacatcaaacgcagaaagaatagcccaaacgctttgccgagttcgaggcgcagcgctaaaattgggacaaatgctctcaattcagggtagaaataaaatattttactctaaagtttcacatgactttttttttgcagtattaatagacaaaattatcattaatgagcagtgagaaataacaaacaaaattaaaaaaatcaaaagttttaaatcactaaaaatggtgactttcattttgattccatttatttaagccggtttgaccaaaaaaaaagaaagcgaaattatgtatgaatttgaccttttattcgaattagggttcggagtcggagtttgtcgaattggtttatgattcggtacttccgggttttgccaccccccctgaaatttttttaaaataatttttcctaggctagtttttgatgctgatcacgaatctgacgtttatttttagctacaacgtgttttacgcgagttacgtgaaaatttacgtgtaaaatttaaaa

SEQ ID NO: 14418 - DNA, 964 bp, Heterodera glycines
cgactcgatacatcgaactctgtttgtctcttccagccaacataagttgtgtttttaagcattgaaggaactgttcgtttggcgcttcatgcaggtcgtaactccgttgggttcggtttgttagctcaaaattcagactgatccgaattggtccaactttctttttgctccaaacccctccatggaccgttaccaattggttctgcttgatttcggctcgactcgtagtttcagcaaaactttcattgacaaatacatgcgcatcctcaaagcggcttatgccgctgatcgtgaagaggtaccatttcatttccgtcagcttgacgggagcagcccctttcccccggcctggattagtggtttcagttcccccactcttcgaccctcccgaaaactttttaattttcaaaaaacatagaattttttttcaggttttcttatagaaaattttcggggccaacctatacgagggaactgatacggggagagggggggggggggtggggaaatgtagtgcactcctgtttgacgcccctcccccttctccgcagatgctaaaatggtcgcgtgagattggctttctcaccggttatgagaccaaaacgatggaacaagcccattgcgaagccatcgccatcatcggcgagacactgacctgtaccgatgcttatgacttttcagaacaggcacctcacatacgatttgataaattaattggttctatttaagagtgtgaccccacgcatcaataaactcgtccccgtgatgttggagcatcgtctgacggcgccgcctgacgaaatttattcgcttcatcggaagttggccggttcatttctgacggctgctaaactcaaagcatcggtcgcatgtggtcggttattaatttggcttgaattacttcgctaattagcatctattttacctgatcctttattttatttgtcgatgattcaggaacaat

SEQ ID NO: 14419 - DNA, 3615 bp, Heterodera glycines
tgtgtttcactttaatttgcgccccgtttgacgcaatgattggtataatgtcggcgatggcacatcgcgcggcatacaccgacaacgtttcccgagtcaaatggggcttcacagtggccaaaagcttcaacaaccgtttgaattgctgcactgattttgtccattttctggagaattcttccatttcatcctcttcatattcggcacccttcgctttgatcagacaaagcgcttcaaacgggcattgtcaaaggagaacacgttatcgtccaatggaattttcacctggagaaaaagcggagggggccgtgaataacagaattaaaaaaaaatctttgatcatttttaaaaaattctaaaatttgtccaaaaaaatcgctgaaaattattttaatttttcaaaacataaaaatctgttataaaagacctagacatttttttctgagttttcttttatatctaagaaaaattatttaattttcaaaagaatattctaattgtttaaatgctgtaaacagttggactctactgcactttaagagtccaatcaattgacaatacctggtttttatacaataactttgttcatgtttgaaccagggacggtcaccagattgggtgtttgtggggggaggcctaaagactcctaggcagcaatgtcttttaaaaaattggggcttgtcaaaacccaactagagctcgaaagttgctagtcagtctaccaactactgaagagatctgagatttcctaataatgttctccatcattttgggacttgttttgctgatattgttttcctactcttcattgcttccagttgtatggtggttaggatttttttctagaaaacttgatcagcttatagaaagagcattaaattcggttaaattggatggaaaataattttctgaggtttttattttgttggagtcgaaaaagttgagccgcaaatgtcgtttttcgctgtggccgcaaatgtccgggccgcactgcgcaacgcgacgttgtagctcgaaattggcctcgcaaagtgcaccgttcccagcagcatggattcgtcgagccggttgtcatcaacgagatctcaacccgaagcgttgtcatccaattcgtcatgccggtgccgagcattgaggagctcaccgaattgtgcaaaatctgggagattgatttggcggtgggttgcaaagtcaatccggcagccaaggcaaagccttgtgcgcatgggtatgtgctaagcatcgaaaaaaggtcattatgtgtaggatacgaaatcgatgctaaagtgattttttcctaccaggaagcgaaggatcaggacgcgcaggaggaatttgatcaaatgcgctgcggtgagctcgacggatgcgttgaactcatcccgcagacgtccgtcagggccctgcaggaacggatgttcacgctgcggtccaatgactgctcgaaagtggcgaaggacgaggcaaaggtgggccgaatcatgtcgattttattgggccgaccggtaaaaccggaaagcccaaaggccaataacccattaatgacttttggggctctttcaaaattgaaagagggacagatcgacacagcgctgtgcatgctcgacgaggtgccgcgccttgtcttccaacaggccgggcccggcaccggcaagacgttcagcgcggcgtcgatcgtggccacggtcctggccacggatcccacggctcgtgtgttggcgctggccccgccgaatgtcgccgtcgtcaagctggtgctggagatgcaggatgccctggccgccggaaaccacgtggagccaatgcttgccttgttctccgggacaggtaagttgagatatgccaaggaagttgagcggatttccccccacctgctcgccaccgcggtggaggcacaggactttcaggaactcctacagaaggaccaagaacgcgtcaaggtggagcggtacctggacgcctgcgagcggaacccacgcctggcccaggaaatggcagtggcgaaaattgtgcaggagcacaaaaatcgccgcttgtgcttcgccaccttgtccttctgtgagcaacttccggcactgtttggggagacaacgcatttgatcatcgacgaagctggacaggcgccatacgtccaaatcctcaacttggtaagccaactcccctgcctaaccaaggtactgatcaccggcgatcgccgccaactgcgtgtccatttgccctccctgccgatcgcaatccgtgaggacttcggcatggacatggtcatccagaacctggatgtggcgcgagggacggacgtcacaacattgtcggtctgttttcgctcgcattctgctctcgtccgctgcacggaggccggcttttacaaaccgcacggcgagctgctgactcctggacgcgacgactcggagcgggcactcatgaccgaccaaacggccttcaaattgccgaaaaagggagtccctctaattttggtccaccagagcacgcctgcgcaacgcgacgaagtgtccacctcttcggccaatcctggccaaaccgacacagcgatgagagccctctggcgtttggcgcgggccttccccggcacactcatccgctgcatttgcttctacgccgcccaagccctggagattgaacggttggtggcccaacaagaaatcccggacattttagtgacaacagcggacgcgacacagggccacgagtcgtcacttgccgtcgtcgtcacaacatgctccgtcttcgacggtggagccgactctcagcctttctgggctgatgccgcacgggtggacgtcgccatctcccgcgccagccatggaatgatcatcatcggcgatttgctgctgctcaaccggacggagacgtggcggcgctacctggaccaagcgacgactgagacaacagtggtcggtccggagtacttcgacttcgagcagttcaagaaccccgacaactactacgacaaggacggacagctgatctcagccaacggcggtgcggtacggtcagagcatttctacagcaagtacggtaaaaatgtgtggtacaacaactccggtgagtcaaggggggcggagaacagatatcaaccttatcttcctcaaggtggcactcgggaacgcactcgtggcaaagctcaaacttctggtgcgcgcagatgaaagaaagccaagctgtacgccttcagccatggacggcagttgcgcttggacctccttctttcttcattcccctccctcacgttctgcaaatttccttttgttttgactctctctttctcactctctctcgtcatccatttcttttaaaattatcattcattttccttttattctgaactgttaatggcctttctttccccaattcaaaaattcttaaaaaatgcgtcggttttcctcacactttctctggcccattcttgttctcttctcatcatgcttttacatcccatccccaaaccggaatgacccctggttgcttttctccgatttcccatgccatccatctgagatgaaggtggaccgctgttcattattgcaatgcgcagcttggccgtggaagttcggattggagagacgaagggcgaagccgagagttggacccattcat

SEQ ID NO: 14420 - DNA, 1213 bp, Heterodera glycines
gacgacccaaagtgtcaatgccgatcaaaaatgattggaaataccaactaagtgctgaaaatgaaaagagtcaaaagcaatgccaaatgtgaaaaggcacctttgaaagagaagtacttgccgaaaccgacgaatttgagctgtgttttcagctcaatgaactttccgtctgatgctctcagtgcgtcgaattcgcagccgtaaaaaatgttcaacgaacgaccctcgacaatgagattggctgaatttggggggggggggcaaatagcaacacaaggaatgcctgcaatagacctttgaatattccgtcgagctcggggttcggatccacaggtgccgttgtgtcgggctcgcctccctcgggttcgtccattgtgattaattgctcgaactttcgtccggcgaaggacgctttttgcacgaaagtgttccaattgcttttgtcgtcttccccgtccggacgagtgaattctctgatgaaaataacatctgaaaaggaaagaataaacgatacaatggacaatcactcaccgttatatttaacgcaggccaacttctgacttttgtcgttcagcgattgccaaatatatggagaaatggcaatgcgactcattgggcctctgcgactgacgaattcacagccatttaaagcctgcattaaaaccaggaaattgttttgaaattccaagcatttgacctcctcgagagagctgccctcgtcgtaggaattgagcaaccaatcgaaaactttgtcgaggccttaattttaattgctcaattggaagatgacaacctaatcactttctgaacgccacttctctatttgcttgtgtatcccttgagtaaggtcaatgttgagcttccgattcatgaaaccttcgtacacatacttcagattggcacatcccatttccaagtgccctttttttgaatcataagagaacactccaagctgttctaaattttagaaaatgcggtcatagaaagcgagaattttgacgaacttgcagagaatattgcctttccattataatgaaaatcggtagaaagataatcaatcggttcagacattatcaaattagttgtcagtcacttttcaagtctgaaggaaataatgtacgtgtgtgggtatgtggactcgatatggggaaatggtttttttcatttatatttgagctcgaactggactagatccaggcctgggtttttcatg

SEQ ID NO: 14421 - DNA, 3057 bp, Heterodera glycines
  unsure (1)..(3057): unsure at all n locations
agagcatttgtatgtgtataaaattatcaaaaaaagagatatccattttctgggatancctctaaatataaaaatcctctgtgaaataaaatggcgattgtgcacagccctccgtctctacgcaagcgcttttgtgaggtataaaatttctcaaaaaaagagatagacatttttctgggatagagtataaatgtaaaaattccctcaaaaataaaaggtctattgcgcaccgccctccctatcatgctcgagagcatttgtatgtgtataaaatttatcaaaaaaagagatagccatttttctgggataacctctaaatataaaaatcctctgtgaactaaaatggcgattgtgcacagccctccgtctcatacgcaagcgcttttgtgaggtataaaatttctcaaaaaaagagatagacatttttctgggatagagtataaatttaaaaattccctcaaaaataaaaggtctattgcgctccgccctccctatcatgctcgagagcatttgtatgtgtataaaatttatcaaaaaaagagatatcccaaaagtcgggtagcctttcatggatccagattcagggcattttctgaacatggatttttgcccaggaaatttcagatccaggtcatgaaaaaaaattacagattgccaattttaaaaataacataatacagattgcaattttaaaaataacataaagacattcagagttcactatgggtcaagcccagtgttagacaaaattgctcataacgccaaatagcgcatttggcgtaaatttttgcgcgctatttcaaaatttcactggaaaatgccttttttgtattttttattttgatctgccataattcgcttcattcccaactaaactgaacaaatttggtatctaaaaaaagtttttgaaaagtagaatctttttctaagcgaacgttaagtaatttgacatctcagaaaaaagttgttggagtttcaaatttttatcacgttataactcaagtcctaggccgccgtttctaacaaaaatgctaaaactattaatttctctattgattctaaatgtccaaagtgattttgtatccttataaccaaaattgttagcatttacgaatttgatgttttttgtgtgttagagatgtgaaaatagtacgccagcacgagaggaaaagaaatgcaaaaattttaatcactccataactttttagttaaccctttttttgcccttaaaaacccttacattttgttccaaatttttttctctatcggtattcaaaatttggtgcaacttgtatgcatagaaaaaaagttatatggagagaagtaaatgttgatttttacataattaaaatgaagagatagtacgccaaagtgagagaaattacaaagaaaaagagaaacgacgagatagtactaggcttttctctgcacagtggagttgacccatagtgagagttcggagtcgatcgaagtgggaatcggtcactttatgtcagatgccattctacaaatatcatggccaagtccaagaagcataactactacaatcatgaaatgaagagtgcattaatcacttaaacaccgtaaaactacttaatcggtattcattttagattatgaaaagtgatttatattcacaaattgatagaaaatttgaagaatcttctacttcgaatgaagggtcagataatgagctcgtagctgatgataatgcttctcttaattctatgtaatctaactcaattaattaaatgttttattttgcactttcaggtatatgaagcttgatttcctggaccgggttaaagccgagatcagtaagctagcaataagcttatcaaaaaattaaaaactattaagtcttcaattcactttctgtcgacaaagagccaaaacgaagtacaacgagacgattgatgagtttggatggcacaattatcactgcgtaagctttttttccttttaaaccttcgatttcacctcgaagtttttagaaaattttcttccgatgatcagaaatcattgatacgaagcgccaataattttttcgacatgtgccaactgagcaaaagttgcatcgatatggcgcgaaattatgcctacaaatctcccaaaatgaagacagttcaaattccgacgaaaaagaaacataacaaataaaatttttatgaaatttaaaagtttagctcaattttatgttgatgaactgtcctttcgttctttatttaccttttttaaatgtttattcaactcataatctgcgattcacagctttgccaacagaaaatatgttcaaaggacttcggtcaaagttagaggatgaggccaagcgcatccaagcaacggtctctcaatacggcgaaaaccttgcgaaccaagtcaggtcgaacgcggtaagtcacccgaattaaatatattttttgatttaatttttgcctcgttcgcattcagagtgatgcgggcagtgacatcagtgggaggggtcggaagttaattggcaatgcgttaattgccgttcagccgccagactcaaatgttaatacaaatacagacacagctgaaaacaatgacgagacgatcatcagttttcacgacgagcaggtataatttccaggtcaatggcagttcgtataaactttttttaaatttgcaattaaaacaaaaaaatttaggttttggagaaaaaaattcattctgatttttaagaaaaatatgttttaactgaaaaaaattacgaactttgccacactaattctagtcaaattatttgtatttttttcaattttttaagccaaacctcgatgtcgctttcccttctgacaatgaatcctttgccaattccgtttcggcgtcttcgtccgcggctgttcgtcggcagcgacgactgtccaacgtttcagtcgaaagcaatgaaaagtttgacattttcattcatactatttcgtttggggtttcagtagtttcaatttctcatcacaagtcaaaacaagtccaaccttggttttggatccgatttgctcaaaggtcgaaagtaacgcggggagtgtggccgattga

SEQ ID NO: 14422 - DNA, 1466 bp, Heterodera glycines
  unsure (1)..(1466): unsure at all n locations
acaaacggaggttttaaatttgtatttatagacattttntggggttgtaccaattttgcatcaaaaaatgacaaaattttgtcattttggggtcaaattttcaaaaaattttggtcatatcgaaaccaattttggcaaaaattagagcacagcctggacctggatccaggcctgggtttttccaggatccaggtctacagtggtacattaaccaaagctctgaactcaaacagagtattcaaaaaaacaattttttgcaaaattatatttgttggtgtcgtatgaaggctcttaatgagaagaaacatgcaataaacttggatggctatcagaatatcgtctttgatggaattcagctgtgttcacatcctttaaaccccaagaaaccgattcaacttaaaataataaacttaattaggaaatccattcttaagggttgccaaaaaaagtaataaaccagaaaatgtgtcaaaattgcttcaaagccaattagaaatcacaacaatttctggacagtcagtcacctgtcttcgcctcgctgagttctgtccaattcgctgtgaatgtctttcaatcggttttgcaatgactttatttcgccctgtttttctcttctcgcctgttgtgccaaaaacaaattgttttcgcactaaaaaaacgaaaaataataaaagattcggcataaaacaaaggcaaaaagactgactcggttgacttcgtcgcgggctttgtggacttctaccaggccaatacattcctcgtaatattgaacggcagaattgagcacttttttaaagggctttgaatccgtaagaagcgatggaggggattcttgcgattggacaacactgcttttgccgatctttgtgagaaaattataattcctaattctcaacagataacgcatcacaaatggaaaataaaatctggaaatcataattcattcggacactgacactgcattcattttttaattatttcttttatgcaagcgcaaaacaagggcgtagccagacccttggcttcgggggcggggggggggggggctgaagtcaaaaattcgatttttaggggtgtatttttggaggggtggggaattttcaatttaaatgccattaaaacaaaatatgaaaatttgctttatagcagtttaagaaaatcttccgtaatccatttactaaattcatgacttttctgctgcactaagactgactacaaaaataactataaatggggagaaaaattaaaaattttacattttatacgaacactttacttatcaattttcctgtaaaaaaaatctctataaaaagggatgaaattcgcgagaacatcattctccgcagtgactattttcttccgaacaatttctctcaacaccagccaatctacccaaccattttggcgcgacaattaaactttttanaaggggaacgaaatgtcaaaagttgcagaagttgatgagg

SEQ ID NO: 14423 - DNA, 2301 bp, Heterodera glycines
  unsure (1)..(2301): unsure at all n locations
gatgatttagaaaaaagatatgagcgttcgaaatttggattttcttataatttttgtcttagactataggcaataatgaattcactggtgcagaaaatttttctttcaatatgcaaaatttgaagtggatttaacaagcagaaaaaaagttaaacagatgaattcagtttttctctattaacagagataaaaaaatagtatgccaaaatgagagatgtttttttctctgcactctctatttattggttcatgtctcgttttttggaaacggtgtgtatatctggcctagtggttacgccttctttctatctttaaaaattatttttctttgattgttaaaacaaaagcgatttaaaagcaaaaaaaatacggtcaattagttagcttctatgggtaaaaggtagagaatggcaaatcaacctttttattagtttttgcggggtatcaatttaaatgttgatatttaattaaatcaactaacattatgccatcaacgcaaatatcaacgtaatttttaaaatttgcgaaaattttttaaaatttatatgagcggtttataattttagtgcgagagataacgcaaaaatgagagagtgctggatctcagtcccagtcatacaaaacatttttgatgaaggagggtagagaaaacaatttcaatagagagcgcaatgggaagggagttcatgtctcttcttcgctgattcttttggtaagagacgcagattcctcactatgttctctattctctctctgtcttaaatctcttcccataacactctctttttaattaatttttctttattcttctttaccaaaaatgcttttgtatgactggggctgaatataacacccttctcactttntgcgttatctctcttcccccatttattttccgccaaaagtcatttttgaaaaattgctttaaattttaaaaaattttcgcaaattttaaaaatagcgttgatattacgttgatggcataatgttatgttgatattaaataaatatcaacgtcaatgttgatatttattaaaacaattttcgccaagagaaaaatgttgatttgcctttctctagtggtgacctcgaggacgaggacaacaagacgtcgaccgaatctggacgcggactgcaacatgctgtcgatgggctgcaacagactgtcactgggcttcaacatgctgtcgatgggctgcaacatgctgtcagcgttatgcgaggattggttagttgcgtgttatgtttagtacttcaggtatattcgtttatcctttaggatcaaccagatgaccaacagcaaccgatggggcctcttgtcgaccagcagcagatggaattggtggaggcccttgaaccgaacgatcagcagcagatggaattggtggagcctgagcttcttgccgtcattcacagtgcgcttgttcaagtcattcgtcgcaatccatgggcatcccttggtatcacttggctggtcacacgcctggtgcagaaagtccctgactttatttggaatgtaaaaatgcatttatttgtttcattttttgaatttttttgtttagctgtttggtgtttctcggcagtggttcttggcaggatgaacgcgttcatctactcggcttttctggaggcggcttcagaacagatgtaaagcgaccagcaaatgatggactattataaatacgtgatgcttatatgtacacgcatttggggtttgtgttattgattgttggctagcaaatgcttggagaatttcgctgattgccaatcataagtatttgtcgttggatcggtacttccttccagtgccatggcgtgttgttggtttgccctcttttctttagttgttggcgacaaggcttttgtttggctgctgtgttcgagtgttcggcttattcctgcgtaaggagctgcttttccttgtgttcgcttgcggaatgatactggtcgcgtggaatttgatgaactctgctttgttgctgttggccttcgcagttctttcgacaatggagcagttgaatgtttgttcgataagctgatttgttgatccgcgactgggtcttgtatgatctcaatcacgattggtgttgtgctgttgggaaccgattctcgcttgcgtcttggtcgtaacgttgcagcgctggacaagagcttgttgattttgtgccttctcaatgttttactctctcgatgttgtttggctttctgcatgtgtgtcggtttactgcctggcgattccttgttggtgaccaccatcacgaaagagacgttggatggttggctgagttcgattcgaccctt

SEQ ID NO: 14424 - DNA, 2011 bp, Heterodera glycines
gcagtttagcacgcgagtgccctcggcattgttcggcaaatacgcgtaacgagtggccgaggcgtaccgatggccaggacgaacatgaccatcctaattaaatgcaattacctcatggccatactaattaaattcaattacctaattaattgagtcaaagcatttggctaatattttagcgtgcttttgggaactgctcgtaggatgacttttataatgcctattttttattttgcctaatttacgattttcagaaactttaaaaagtgtaaaaatgagaaatacactaagcaattgaatacataattttcaataagtctactccatcatgtgggattttcaaaaaaattcagctctcgaatctattttttgaccaaaattcttttttaatttttccatcgaaattcatggattgattttgtgttaaacaaatatttcttgtaatttaaattaaaagtggtccataattgcaaatatatttttcaatgtttttatgttttgcaattttttcactgattttcaggatcactttcgtggagtatataaattaatatgccgaaataaccaccaaatgttcattactttctgagttccggaaggaacgtggtaaacgatttcgtggaatccttttgcatcgctgtgcccgggcacgtgccccgggacatgtaaaacaagcattgttgctgaatggaaaggacgatcaatcatgtcaaaccaaaatcttaattagaggggcgccactttggcacgggtgccaatacattggggctgtcaagagtctcgaatgccttaccgttcgccggttggttgccaatgcattcgccataccaaagcatgcacaacggacactgacgcttcacagcgaaggccaactgtaagtgatcgagcagaatttatgatcaaattccttgaactaattagtccttgtcagctggtcttttttctgcattgatcactttctactgatgatttttgattgattatggccaaacggctggtggtcatttggggggcaattagcaataattaacaaattatcatgttcatcattgaattgctcgttttgtcaccttaatgcactgctggtggaaaagatgcgaacaaagcgacaattggacgaccgtgccgttgtcgtcgtcgccgcattgctcgccgcgcatgtcactcagacaaatggcacatcgcgctgagcaatcgtcggccgggcacttttcgggcaacaattgttcaatgcgcacttttgtccaaaattgcacttgatgatgatgagattcatttgtcagtgccataaaccaaataaatgtaaaaaattaaaaataaaagttcgaaaaatctttaaaaaattaaattgtataaaattaattcgtaatttatgtaatataaaccaaaaattaaaactgagtcatggaaaaacattgtgactaaaactaaactcgaatctgtttgtccaattaaacgaagcgcaaccttggaagattttacaagtgattggaaaagggaagagtcgaatgattacatcgacaattgatcggaaaattgattggaaaagtgattggaaaagtgattggaaaaggagtttggaaaagtgattggaaaaggagtttggaaaagtgattggaaaaggagtttggagaaaataaacaaaaaaaaacgcgaactgaaaaagaaaggcaatgaaaatgaattgcgcatggaaatttgaacctttgaattactaacaaaattcagaaaaataacttttgaatgaattattttaaaaccattggaattaccgcaaataaaaaaattaaataaaaattaaatgaaattaaaaaaagctaaaagactaaatgcatctgaaatatccgcgcctgattatatggccaaaactttgttgaatatttaaaatttcagcatcttacaattgatgaaatttttcttgttaattgtattatttaaatgttaagacaatggaaaatcactcatttaattacaatttttaaatgaattgtgcaaattaaataaatatttg

SEQ ID NO: 14425 - DNA, 2424 bp, Heterodera glycines
  unsure (1)..(2424): unsure at all n locations
agagagagagaaaggaaagaggaaagggagataggaaaaagagagaggaaagagatataatgaaagagaaagagtaaaaagagagagaaaagagagagagggaaagagaaagagtaaaaagagagagagaaagagagggagctaacaaaaaaaagggggggggggctgaggcacagatattgattaaacttaacgatcaagtaattaaaaacgagcataaaataattacttaaaatatttaacaaaaatttattttattttttcaagtatagatttaggttggtgtttaataatgaaaaacttcaaattatttggaaaatttcaatgattacatacgccagcttttcatcttaaattatttgtttagcttttgtccgtttttggcactttccgcttcttctgtcccttctttctcgctccattcattcatttgtcctttgccatttcctccgcatctttttgtgccgtttttccctgcacacttttcctccaaaaatggaatgccgagttggacagtgccgtgccattccaatcgaaatgccttttggcaccgtcaaaaaacaaagtcaaccgcatcggttcccgcaaatttggaagaccaccaaataaattgcgtacaaatttggcacggccttcgccctgtcgcacttcgatttgcacccaatttttgccgtcgtccaatcgttccgttatccgatcaaacaatgcttttcctttttttgacccttcaatgaccgtctcgttgactatagactctctgcncaatntaagcttttccggatgaattggcaatggcattttgtgccatttgtatatgttttcggatgggtatttgcttggaatggcattcgctgctgtgaaaattggtgcctaaatgttgtcccttttttggcaaatgccttcaattgaccgtaccggtggtgccgagttagcgatcagttgcccaacttcgtactcgttcaattcactaattgtcatttgatcaaaaagtgccgtctcttccgagtgccttttgtcctttactttcttgcctttttcattcatttttcccatctgatcaaagtgaaatttgaatgatttgaaaataatttttgcattttgggctgcattttttttaaatgaagaattgttaggaaaaataatattttttctttaaaaattttattattttttgcaaaatgtgaaattcctaattctaataaataattattaaatagattatcctttattaagttcggtccctccaaatctaaaatttaagaacagggctcggattcgtacttggatgccaagtacgtacttgatttcggcttttttgcttggaaactttaaactgtacttatttccaagattgtacttggaaatcgggattctttcatatgaatgtctttttttattcatttatttattttgttcacatttttatgtgtacttggatttcacaaatttcccccgttatgtacttggaaagtgacttggtaagatccgagccctgtttaagaaatttgcacattttcaagctttgccataaagccataaaaatgagaaaggcattcctaaagaaaaaatgttactaatattgccattattttattgttaaaaattacttacgtaaatgcgagcattgattttcacttttggttttgatgatttgctgcaagttggcattttttggctattgctttttccttgcttttccattgccgattatttttcattttcttggcattttccttacctccctcttccccccccccatccgtgatccggcttttttttttttgccatggcccttcgtcctccttttcctctcctctccaatgttcaattatttctcctaatttttctcgccgtcgtcgtccttcatcttgcccaacttcaaccagtaactgaacaaaatgaagaacaacccacaaaaggggagcatcgcctccgccacaatatttcccttccggcgacgacgaattctgacgcaagcgaaaacgatgacttagaagaaacagccgaatggattatgagggaaaagaaagtgccgagggaaaagaaagtgccgaagtggaagaaacggtgaaggaccaaatgtcatttcaaatggcaaacgaagggcgcggcacaagcggagaatgggcaattgaggcggagagacagatgcaaattgagaagcagcaggtggttggacgtaattggtttttaaaacaaaggcactagactcaattagcggcatcaagagttaaattgtattaaaagcactaatgagaagtttttaaatctattaaacgttaattcacccctaattggtggagtaattagttcaaatgaatattgtctcttttccctccagggcgctgatggtgcccggactgtttctgattcggagccgaatccggcgccgactaagccgacgccggattcaaaaagcagcag

SEQ ID NO: 14426 - DNA, 1377 bp, Heterodera glycines
tgatgaatcccctaatgattttggtaaaatcattaagttaaggtggatacacatcttgtcatatgatcaaatggtttcgcgaaaaatcaataatcagacaacaagatgtgcgaactcgatattttacacgactctctttaccaattctgccccgaattacacttaaaacgactcaacagcttaacgttggcttgccacgcattacttgactgtaaaactctcactcttaccgaacttggccgtaacctgccaaccaaagcgagaacaaaacataacatcaaacgaatcgaccgattgttaggtaatcgtcacctccacaaagagcgactcgctgtataccgttggcatgctagctttatctgttcgggcaatacgatgcccattgtacttgttgactggtctgatattcgtgagcaaaaacgacttatggtattgcgagcttcagtcgcactacacggtcgttctgttactctttatgagaaagcgttcccgctttcagagcaatgttcaaagaaagctcatgaccaatttctagccgaccttgcgagcattctaccgagtaacaccacaccgctcattgtcagtgatgctggctttaaagtgccatggtataaatccgttgagaagctgggttggtactggttaagtcgagtaagaggaaaagtacaatatgcagacctaggagcggaaaactggaaacctatcagcaacttacatgatatgtcatctagtcactcaaagactttaggctataagaggctgactaaaagcaatccaatctcatgccaaattctattgtataaatctcgctctaaaggccgaaaaaatcagcgctcgacacggactcattgtcaccacccgtcacctaaaatctactcagcgtcggcaaaggagccatgggttctagcaactaacttacctgttgaaattcgaacacccaaacaacttgttaatatctattcgaagcgaatgcagattgaagaaaccttccgagacttgaaaagtcctgcctacggactaggcctacgccatagccgaacgagcagctcagagcgttttgatatcatgctgctaatcgccctgatgcttcaactaacatgttggcttgcgggcgttcatgctcagaaacaaggttgggacaagcacttccaggctaacacagtcagaaatcgaaacgtactctcaacagttcgcttaggcatggaagttttgcggcattctggctacacaataacaagggaagacttactcgtggctgcaacctaattgctcaaaatttatttcgcacatggttacaccttttgaaattatgaggggatcgttaccttcccgaagcgcaagtataagcccaacaaaattaaaaaaacgggcgcgaag

SEQ ID NO: 14427 - DNA, 1579 bp, Heterodera glycines
aaaattgcctaaggacaaaacgccaaaaaaccccactaatttaaaaattttgccgagattttcccttgtaaaaactgaagagccgatctcgagttaaaaacttaagttccataaaataaacttggaatcgttagagggggtcaaaatacaggcctatacaaaatttcaagaaaattggtcaataggaaaaaatttttttcaaggacaaagttttttctttttctctcattttgacgcactatttccatgtctctaacatataaaataacactattcatttttttgctaataaacaatttttttaaaacttttgattaaattaggaatgttctttagaattttcccttcaaaatgagcacaaaaaaatttcttttggttttctattgaccaagttacaagcatacaaaatttaattaaaaacaatgataaaacatatagtgtctaacctcagctgtctgttttttcattggcgcattgttcacttttattttcattaacttttaatagtgtctaactcttacagtgtctgttgtttcttcgcaagtcttgttttttaattttcgtttcaatactcatttttttttataatgatacgcactttttgtcaaaatgatgatatacgagcgctaggcgccgcttcgcggcgccccaacccccctctcggtttccgataatttaaaataaattttgatagagtttactttttttaagagtagagtcaaaaaataaattttttgaactctaactaaaaagtattttttatttttaataaattcgtttttcagtctcataacactctctcttgtatcgttttttaaaaaattaaggttgtttttagagtcgggacagtgccaataaacgccacagggaaaattttttgaaaatttcagtgtaatttctaaaaaattcacaaaaatttttttcaaaaatttcggaactcggaattccaacgttttagaaatcggaattccgaccccaaattttttcttcacaaaacagatatagatttaaaatggaagagaatagaaagtgtcgaaaaaccctgctaatttagacatattttgttctcttccgaaatatccatggttcaaaatccattaattatcacaaaaaccatgaacgatttatattattgacgataatttaaaaaatcggaatttttaagtttccattctttagtagatttagtgtatttattaaagtttttaagcaaatattgataaataaacagcaaccaaaaatgagaaatacagtttcacgattactttattttttctattatttttggcaaaattttataatcataattattttatttgtcgcattaatttgaatcaattttttttgacaaaaaactttggtaatagtttagatggtatgacacctttttcaaaacttttttaaaaagtcaaaaacaaatttctatgggggttttcaagcacgctgaacacgaatctgacactcgataagatctatttcgaacccaggacccgaattcgaacaaaaatttgaaagttaaaatttaggaattatgcattttcgggctataaatggctttattcagggaaacaaactaaaa

SEQ ID NO: 14428 - DNA, 1270 bp, Heterodera glycines
cgggatcccgcgggatttttcgggatcccgcgggattttttcgggatcccgacctcggaatccgtcccgagcgattttttaaattcatcgggattgatcgggatcgggataaatttatattaattgattaaattgtaaaaaaattatttaaggcatgttgttaaatgttctcatttttgaaaatctgattttttgggcatgatattccaattttgaaaaatttctataaaaatctgatataattcacatctcttttttttcttcaatcgaattgatcaattataaatattagataaacatttgaacaaaacttggcacaaaatgtaaaaaaaaattgggtttgagcaaatcccgataatcccgctggatcccgaaaaaaatcttcgggattgatcgtgatcgggattcagttcgggatcccgactcgggatccctccgaccccagttgtccggtctctactgactaattgcaagaaaaatacaaattttaaagaaaaccaataatttaaattaatttattattcctgatcttacaagccaattaaaacactataggaaaagtgaaaatgaagtgtataataattactgaagccttgcaaaaaaaacgtggtgagacgaaccgaaaatggtctcagtgtgggcaaacccaaaataatctttttgtgggcgaaccgcaaatagtctcagtgtgaataaaaatatttatatttattatacgattcactaaatcatataattatataaaaaataattttataaacgttttttttaaattttcctccgtgctgagtcgttcgacaaaaaagttccgtgtgcgcgttccacaataagtttaacttaaacctttcaatttcatttgatcatggagttttattatggtattgatttcattattttggaagctttattttgaaaaaatttactacctgtgttttcacaaatttgtagagaaacactttctggatgacgaatattgaaggagaatgaatgataagctattgatacttaatttatttatcattgtagattgacccttaatctgttacacattttatgtatggatttgatatttttgtaaatgctatttttgcttaaaatggaatttcttcagtttttatcaaaattttatttaagaatttatcaaccataattttttttaaataataatttcttccaatgttataagtcaatattttgtttttgaattaaaaatgtttttactaccattaaaccattaaagtattgaattacatatatttgaaagttaccg

SEQ ID NO: 14429 - DNA, 1768 bp, Heterodera glycines
tgattatatattcggttcgcccacactgagactattttcggttcgacctagcacccaaaaaaacttataaaaaaatatgtaatgtgactgaagtatatataaattgtttaatatatgtattcttaatttaaaagaaaatgatttattatcaaaagagacataacgaatcacaaacgtataaaccaatttaataatttttcattaaaatagaaataaagtcgatacatcaaatctttctgttttataagttgcgaaaaatgcacgatttaaagaaagtggtgcacgagaatttataaaaatgttaaatataaataaaattttaagctttactaattttggaaaagtttaaaaggtaaatagaaaaatattatcttttaggttggaaatagctttcatttaaatatctcagtacagatattttttcatcaaattaatcaaactaaaacctattgaaaccatatataatagaactaaaaaattcaaactttgagcccagatgattgaaagcagcgagtctttaatcggaagttcaaaagcttcagaacgttccatgagcttaataaataaaataaaatttaattacatatttttaaataaaaagcaaatagaaaacaaatttattgattttaatattaaaaattaatacaatataccttccttttatattggtaaacccttaaaatataaaataaaataaaataatatatttacttaaaggcaaatattccggaaaataccaccaaagtatcagaaaatatttatttcaaattttattcttgaaaaaaataaaaataaattactgtgatcgcgacctgaaaattaggcagattaacaactaaaatattaaaaaaaaactctcgaaaaaattaataaaagaaaaataacaataatatataataaaaaatattaatgaaaactttagaaagtaagcagatacattatgttaacaacataaggaaaattttgaaaaattaaatgcaatatttctactcccgtcggaaattgagggataaaaaatgaatccaataaaagctcttatacctaatatttaattttcattatcactagggcccggatttttatgttttaacatattttttttgcggcttagttatggcgagagaagcccaaaaatagcattatctccgaacaatttttgatttagagcgacttataaaaacataaaaacacatattttggcgttttgtcacataaaatatgttagcacatattttggagtttggcacatattttgcacatattttggcatttttgagaaaaattgcaataaaaatacaagaaaattgaaaaatacaccccctaaaaatcgacttttttcctaattattaacataattttcaaattaaaaaattttttcttcgattgtagaaactaatgaaatctcgaattcattaattcgtcattggatttcgaagttctctgctggaactttcaatttatagaaatgatttatcaaaaaaaagacaattttaccccaaacacttcgaaatgtatttgatttgcgttgtatgggctaaaaatgataaagaatgagatttttgggaatttttatgcaaaaacacacttattttttcaatttttaacacatattttagcacatattttggcatttttgggggtttttagcacatatttcagcattttttagcacatattttattacatatttcaggatttttagcacataaaaatccgggccctaattataaaggttatgaggaagtaaaaacgaataaatctcaaagca

SEQ ID NO: 14430 - DNA, 1581 bp, Heterodera glycines
aaaaaatgggaaaattatttttggtcaccgaactgaaaagtgaattgttcgaacgaatccactcgggaagtaataaggaaatcataccgtataagtcgctcgagtcacatcctatgtcttagtacaggtatcagtgagtggagcactcaagagcatagatgagatagggtaggcacaagactcagagatcagcagagcggtggaattgacaggtaggaggcatagcgtgggagagggagtcgttggagacagagaagcaatgatagaggaagggaaagggacgagagaggtgcataagggcagtgttgcaggttaaaggaattgtggtaagatgttttaaagaaagcaattcaggagcaggacaatgagactaatcggacagaacaatgacaaaaggaaacccaataacgatggacttttcatttttgtaattacaataaaatattgccaagacacaatgaacttacaataatcttaattgtttatttgtcgcaaatataagttaaattagtttgctgttagtcattaatatttttaagatttaacccaaccaatttcggaacccagactacatagtgcatattattccactaacacatcctaccacgatacctttctcaaaataaagaccaggtccgtcaaagtccacactgtttacgacaaacgatggaggaagacgccaaagcggtccgatccgagtgaaaactgttgtataccttaagaaccgcctaattaaaagacgttgaaacataaaatgtaacaaaataaaaaagcagcaaaacatttaaatcaaaaaaccaatttgaataataacaattcttcaacaaatatgatgtggcaaaacaatgaatgcgatcgattgtctcaaatccgatcgtccgcttgttgtcatttacttgcctcctttctttttcttgggaccaacagtttcctttaagcaattaaacccattagacctcaattaagcttacaccgactaatacccttttgcccacagtttccgtttttgacttcggctgctccttctctgcagtttttaccgcggcaggttgtgtcttgggctgttccttatcagcggtccgtgcagcgacaggttgtggcttcggttgctctttctcggctggctttgtcactaggggctgaggtgtcttctctttctcgctctccgaaattttgtgcaaaagttcctttcgcttctgaaccaaacgctcctcgcgacgtttgcgggtttccttgttcttgttgcgacgtgcctcggcctgttctctgaaacacaatataacgggttgagccgaattcagttggacccaaaaaccatacgcaagctgtttagaacgttggttttcggtttttttcttaaagatgtattccatgaggttgcgcttgttcttgaacgcatttccttttgctttgaggtagagctcatggtaaaggtgtttgtcgatttttttagcatcacgataacgcttcgatagatgacgaagcacacgcattcgacgcatccagatcactttctctggcatacgcgcattgcgagtaccatgacgcttagccgaacccatgtgacggccctaaatgatt

SEQ ID NO: 14431 - DNA, 1810 bp, Heterodera glycines
accaattaaccatctgaacattctgtagttgccttattcacgtgccttttcacttttctcgagggacaagtgcaactcctcgtcgtcgtccgtctcttttctgttctgccttcgcatttccggcagtgtttcctttacgtctcttgtttaaagtaattgtaattattcagatgtattatcaattatgtgaagtaatatcaatagtaatatttattggattcgtaatgggactgattttctcctccttcactcaactcgcatgtgtacgtcttagccgtcgagcgctttttgcgtcagttgactgctctcaactacgtaatgctccacaaaatttttgatataagtcctatcacatcataatcgtcattataatagtagagaagtcgtcgtcgatgagtaaaataatcaggcgtaataaaaaattatttttataatatcattgcggtcatatacgcttgccttctgcatacattgtgacatcagtttttggcagggtagccagattaaaattttcaaaagcctcatttggcatgtaaaaaaacctcattttggatcaaaaagcctcatttttacaaatttattcaaaacacatttaaaatgttcaaatgttatatttttgattgtccatgaccactttgagtaattttttgctagaaataagcttttttgtgaattctgagcacgaaaatcgaaattgattttttttttttttttttgcggcgctttttccaaaaaacttttggggaataaaggggtcggcggtgccgataggcgccgccgagaaaaatgttgtcatttttaatgcgatttgttaacagatttgtccacaaaaatgaccaaattttgcgattttgagcaaatttttaagaagataaaggatttttatggtccggccgtgctgacaggcgccgccgggggaaaaattaagaattttgaccatattttagcatattttcattaaaaaaattctttattttgcggtttttctcaaaaaaaccacaaaaagcctcaaaatttctcaaacaaccacaaaaagcttcaaagcctcattttgaaaatttagcctcattgacctatcaaaaaaccacaaaatgaggctaaagcctcagatttggctaccctggtttttaccaataacaaaagaaacaaaaaggaaaaattttttttttgagatttaggtaagtgaaaattgatcaaattattactagggctgggatttttatgtttttacatattttttctgcggcttagttatggcgagagaagcccaaaaataacattttctccgaacaattttcgaattagagcgacttataaaaacataaaaacacatattttggcgttttcgcacataaaaacatatcgcacatatttcggagtttcgaacatattttgcacatattttggcatttttgaaaaaaatctaagaaaaacacaaaaaattcaaaaatgcacccctaaaaatcaactttcttgccatttttataggctctttcaaaattttctttatttatttcgtgtaccgaaaatcggattctccattaattcgttactggatatcgaagtttcttgctggaacttactcaactgatggaaaaataatctttaaaacaatttatcaaaaaaggactaattttacccccaaacacctccaaatgttttttatttgcaattgtgcgggcgaaaatgaaaagaatgagttttttggaatttttatgcaaaaataccattggtttttccaatttttagcacatattttattacatatttcaggatttttagcacataaaaatcccagccctaattatta

SEQ ID NO: 14432 - DNA, 796 bp, Heterodera glycines
ccccccccccccccccccccttgtcccacaaaatttttggaaaaagcgcgccacaaaaaaagcgtttttaaagcagaaaaaagtcgtcgtaaatgaagaaaatgataagtgaaaacaaaaaaatgttggaaaaaatccattccggtgaaaaatacaagccatttgaataaatattaaccattttgcattgcatataataaaaattttaaatgtccttgaatttcatgaattttccccactatgtccttgcaaatcggcatacccgtccttggaaacggagcatggacgatggcaaccctggttttaatgctttggatgatcatttgttttgtttcagaatatccaaattaaatgcgaccttcaacttccaacctggactcaaaatctattatcgattcctacttaaattcgacggaagattgtcagtttttattgcgagcattaggtaggattttcttttgtacttgccttccaagtataaacttaataggtaacttgttttagagaaacaagcttttgagaatgtggtcttcgctttacgcgctcaaggaccgctaacacaatacactgagttacttttggatcatctgaagacggcgttgtcgtaagtgcaacaaatctcttcaagactatttgtttgtttacagtattgatgatgatgaatttaacataaaaatccgaattgcttctaataatccgcatatctgtcgtattgcccagcggtaagtatttttgttacttaaatatttaaattcttaaattaggctaaatccttcctacgacaacgatgcacgat

SEQ ID NO: 14433 - DNA, 1078 bp, Heterodera glycines
  unsure (1)..(1078): unsure at all n locations
attatttcgttttaaataaaaaagtgtaaaaataaaatcttacttggaggngnngggnttnnnatnggnngggaaagccctttcggaagttatttngagaaaattngggaaannggatttgtattngaanaaaaagtnaaaattgttgtaangtgtgttgaattatgtaaaaatggttaaaaagaatgataattaattatttttatttttgtagattaaataattaatagggttgnaagaattaaatgaaattttaaaaattgaatttngattgttgttngaatttnggatatggagttngtaattngtagaaatgtaatgggtaaatntgtggaaaagtnataaaaaaaatttttttttctaaattttcagaaaggataagaaaggattggtgcataagctgaagcgacgctttgcactgttcgccaaaatggatttgcaagaaacagaatgttgggaattgcacgaacgcttggccaagctaaaagtggatgaacgcttggccaagacaaaggtggccaagaagaagaagaagccgaagccgaacaatttcaagcagtttgacgccgacttcggcaaggccatgatgacgaaaggcccggtgtttgtggaggatttcatcaaagcgatcctcctctgaaatctgatcacttgctaatgaggggctaattaatgggggagaaggcggcaaaacatacaaaaataaaatgaaaattgaaattttcaaaaaatgaaaacccgtggaaaaaaaattgaaaaaaattttcaacaaaaaaaaattagacaaaattcattgaaattaaaaaaactactaaaatacgaaattttctaaattttgcaaaaatataaaaaaagattttttgtttttttaattaaaaattgtacgttttgcaaattccgcattctttttgtcttctcttcaaacaatttttcatatgaaaaacttgttttcattagctgtataccaaccaaccaaccaattccttcaaaaaatgactgttacaaaaatttccaacaaattgtataactactgtacccgttacagtattctgtcacaacttaaagagatcatttaata

SEQ ID NO: 14434 - DNA, 2472 bp, Heterodera glycines
cattttcgaggcatttttcgagaaaggcggcgattttaaatgttgagaggaatcaattggcatacctaatttagatatacctttggaggcttagtatcaattaatttgttaattagataattaattggtaattggaaagattattttcgtttctttccttaaatttgtctcttttcatttgacactctttcgttttaagttttaaagaaatgatcaacattgaaaaacacaaataatgaaaagaaataaaaattaaattaaattaaaaaaacgaaatacaaaaaaatatatgaaaatttaaaaatagacaaatttgaaaatgataagtgaaattaaaatgtaaaaatttttttaatggatcataagaaaatgtttttggcatttttaattttattattttttggtttttaattttaaaataaaatgaattaaaatgacaaatacaaataaagaataaataaatgaaaaaaatggaatttaaaaaatacattaaaaattagagatcggcattttgagaaaatacggataagggtaagggttacgggcttgacatcaatacgggttacgggcttacgggctaaaaacccgtaaaacccgtagtcagtaaaaacccgtatccagtaaaaatacgggcccgggtaagggtttttttcattttgataaaaattagtttataaatacaagtcttgaatattttaagctaaaagactttattttacgacataaaaatatgctcaaaaatttttaacgaccactttttcaccctactttttttttgcggcgcggattctcaaaaaactttttaggaacatggggaggaaagtccggcggtgccggtaggcgccgctgggaaaaattttgaaaatttgagtgcaaagattttatagaaaaaatgcccaactttgcgattttaaacgatttcatgaattttgctgacagtttttcagtaaaatgatccataattttgaagaataaaccaatttcttaagaaatttaagaaatggaaaaaatgatagagaatttgataaattcaacgaagtgctattgaataacataaaaatttatattgattttttttccaattccataaaatttaccaacatttaccagtgctttttcgattttcacagaaaattttacaaaagtaaccgcccaatttcaatgttttggcgaattgactgcacaaaatttaaaaatttactccatttcaccttaaaaaaacgtcagaaaaataacccgtaaaacccgtatcgtaattgtacgggtaagggtaagggttacgggtttgacatcgatacgggttacgggctaaaaacccgtaaaacccttaacccgtaaaaacccgtatcagccgaaaaaaatacgggttacgggcccgtaaaaacccgtatacggacccggcccgtagccgatctctaattagtaccaaattttctatactttattttttctctaaaatttatcgttaggacaggatgtgtccacaaatatccattttgcacctcactagagttcccactttgtaaattttcgtaaattttgtacatttttgttaattatttttttttcaagaaaaagccgcaaattttatcagttaatttgttcttttttaggtaattaattggtaattggaaacaaattattttcgcttcctttattaaatttgtctcttttcatttgacactctttcgttttgaaagtttatttattgaaaaagcataaataaaaaggatattttgtgatttaatgattaaataaatacaaataaatgatgcatataaattaattatgaaatttaatggaaacaatcacaaaaagaaatcataaaaaatggaaatatttttgggttattttgaaatttgtaaaaaatgtgaattaataattataaatagataataaaaaaagaaatgaatagaaaattaaaaaatacaaataatgtaaataaatgatgaaaaataaaagaaataaaaataaaatattaaaaatttagatcagaggaagaagaaatgggagggaaataatgtttataatataaaaggttttttttgcatttttattttgtgattttttgattttataatttttaaataagatgaaaaaagtgacaaatacaaattaaataaaatgaaagaaatgaaaagaaaaattaaaatgaaatatattaaaaataatgaataaaaataaattaattaaatctaaaatagttaaataagtgaaattgaaaaattgttaaaataataaaaaacaattttaaagggatttaaatgttgacattagaaaatatttttggcatttataattttgttttttttttgggttttttaattttaaaataagataaattaaaatgataaatatatattaaataaaaataaagaaaagaaaattaaaaaatgaaatatattaaaaataatgaatgaataaaaaaaataaattaaatttaaaatagttaaataattaaaaatattaaaa

SEQ ID NO: 14435 - DNA, 1718 bp, Heterodera glycines
  unsure (1)..(1718): unsure at all n locations
attttgactacaattataaaataataaacatatatcttctcaagcagatttgcgcaatcattgccaatcaattggctaatgcctgtgccattgccttccttcccctccccttttgttgccttccaaattggttttggcatttctctctctgcccacggatgcctgctaaaattgaatatcatataataaatacaataaatattcaatgtaattcttaaaaatctgaaaattcgtataatatttttagaaaaatattattattattccccattttcaacagattttaaacaaatttatttattttaaagaatggtttttccgtattttgcgttaaattcgctgtttaatttgtttttaattattcttttggctgccaatttgccgcattttgtggcaattcgcatttcggtaaagccgtccaatttgctctatgtggcggagttcacttgttatgatcgtaattataattatcgtccgtcaaatgcttcttcttctgcggatggcaccaataatgatttgcatgccaatgatcagcagcaacagcctaaaattgttgtcggaagggaatttaaaagttgcgagattggtgaaatgatcatgaggacggtcgacttgggcagctgcaaccagagcgacccgaaggcgtacattcgaataacgaactcgctcaattcgggcgaatcggtcggttttaaaccgactgaattaaatacagcaaataaattttaaaaattaacaaaagcatttcatgtcaaaaagaatcataaacattaaagctcggcctgggcctggatccaggcctggattttttctggatccaggtccaggtcattttttggcaacctggatttttcttgngcctggatttttatttgagttttcaaaaaatgattaaataatttaaaaaacccattattattgtcaattagatacttttagatgttcctaagcaattaattggttttttcaaacctttcttttgctttttcaaacaaatttcaaaaaatccaggtccgggcctggatccgggaatcgagaagcctggatttttcctggacctgggtttttgtccaggaaaaccaggtccaggcttttttcgaaataccgagctctaataaacatcgtgatgtatccattaatccaatttagaaggaatttgagatcatgaaggatgaattgttggcacgaaaagcatccgtcgtgttcgaatttgacaccgtttcaattgctcacagatttgtcaaggtgtaccaatcggcgttgttcggcttccgccgaattcgttcggtggatttcgaaatagaaatattttgcgactttatccaaacgaatggccaaacggaacatttcacaattggcagtgccattcagcgcaagggccaaaaatatgtgaaaattgcgatttatgagatggaattgttgaccggttgtttcaaagacaaagtccaaattaatatttattacagcgaagaaaaggtggcaaaaaaggtgccaaaaacttactaaaatattaaaaacattggacagaatgccgtaagtcatgaataaatccctttttaaaccatgtcctcagcggtttggagcagtactcggcaaatgcgattttataagatacattaaagttcggcttctggacaactcagctgatggacgattcagccgtacaataaaaattttcaaaataaaacctaggcccaagcaagcataagcctaggtct

SEQ ID NO: 14436 - DNA, 1399 bp, Heterodera glycines
ccataaaatatgggaccaaaaatcgcaaaatatggacatctcacgggaaaaatatggatataaatttttccaaggaaaatatggatatataaacacatcctagaagcttcaaaccaagctaaaagcatgtttttcatgcgtttcaggccttccatagtccaggaaaaaatataaggatttccattggactccctaataataatcttacaatttatttgttaggtgccctgtttcacgcgattgttaatttttgccgggagctccaccggggctgggaggaccgggaactcccagctcgcttcctggctccgttcaattcaattttaaatccataatttaatttagcgccaaatcgctttcattccttgtggccattattgcacttgcagaaactgctcaaaagaattgttaaaacagtccaaactttgtgccttttgtcgcgttccgatcactggcactttgcaaattcggagaagcaaaagcgacggggaggcgaacagatcggaaaacgggaatggaccatcgacggcgagggaatgttgtatgttttgtgagcgaaatcaggtaaaagttcaatgacgaaaagggcaattaattcgggaaattggtaattaaaaacgttaatgagttgcaaattgattaagtgcgaaatcgcccttatcccttgcggacattcaaatgcttgttttaaatgtgccaacaataagaaaaaattaaagaaaaactgtccaatttgtgaaaaaagaataaatgacgtattacgaatttacacataaataaatgagcaaaaaacaactatatatttttatttatttgtttttttaatgaaaaactttcggcaattaaaaatgtctaatcaaatttgatcaaattaaatgtgctctttcttattgggacaaatttatgtagcaatcaaatttcagtccccccactcaacgattatttgatcagccgacaaaccttcgccgccaaaagctttgttttgtgaataatcataaaatgttttttattttctttttttttaatttccgttatattgtaattttgaggaatcacaatgtttacacaaacaacaacatttataaaattaagttcgccgccgttcgtttttcgttctccgtttcctgtcatttctttttctaatcacaacaaaaaagggatacaatctgaccttgcaatgtcaatgatcactctttgaaccacaaaacaaaacaattcccacgatataaaaagaattaattaattaatgctaattagttcattaatgagttaatgacagtcaaaatagtgtgccgcccctttctccgcccaattcactgccaaaaacgcctgagggcggggggctttgaaagtgaacacgaagagaagaagcgcctgcagcgcaggagaagaccaacaa

SEQ ID NO: 14437 - DNA, 1535 bp, Heterodera glycines
attcaacattatttattttctttttaccaaaaataaaaatagataatttaaattttactttatatttttaaattttctgaaattcttaaattcgataaaatttgctaacgaactttcaaaaaaaaaaactttgataagacccccatttttaccagtgcgtattttccccgaaactgtgagaaccgggaattcccggctcagtccctgtcccgctcaactcaacttttaaagtttaaacattgggttaattaaaaatttaaattcacttttctgctgttcttcaaatggacacatttggacaaaaagaaccaattttagttcacttttttgttctttttttaaatatttgcatttttcatcacttttttcccaatctttcgcactttttctttcttttcccatccctccgttcgttcattctttcgtttgtccattttctgtgcgcttaaaatgcagatgagctacaaacaaagcatacaaatgaataatgccagcgaaatgcgatgcccttctctctctctctctctctcccacttaaatgggaacaaaaagcggtgcattacaaaaagcagcggcaaaaaaaattgaaaagaaaaagcataagggacaaaaatggggtggggtaaagcaaaagcaaaagaatgggggggggggtaaatgataaatgaatgaatgcaatgcttaattttcatccattcattcatcaatcctttcatttgccgacaccgcccttaaaagcacaaacattaattaattcattcatccgcttacgcaacaatgaaaaatgatggcatttcccggcaaaaagtgcaaaagtataaaaagaaaagcggcgtaaaaccattttttgtaaattttgacggagaaagcccagcaaaatcagctgaaaaggggcgataattcacttgccccgtccgcatttgtttgttacctgttctgctgctgcccattgatgtgcgttcatcgcttcccgtctgatgaggcaaaacaatgcaaaaactttaaaaaacaccgccgcttttcgctaatgaaagcggcggcaaaagaaagaggtggcgtgggaaagcagcagcagccgagccgatgaaaccataaatggttgggcgggtgcgtcgtccaactcgcagcggcagtacccgcggcagaaaatagcagaaaatccttggtcccccacccccctcccgcgtccattgtcccccccccccccccgcattttccccaacggatttattattttgttggtccgatcaatcgcttggctctctctctctctctgtgcacaccgcccgctgctattctctgacaattatttatttaaagtttcttgaatatgcaaatattttgcactttctttgcttcttctgcttcttccattcccccaatttgcttttgtcaattgattttctccccatttttatttttaattgtctctatcgaaactcaaaaccgtactcattagtctgtccattagtctgtccattgtcctccctctcccattcgttgaattcatacaaattttggcttttcctccgtat

SEQ ID NO: 14438 - DNA, 1194 bp, Heterodera glycines
tcagctggtagaacactggtccggaaagccagagacgccggttcaaagccggcccgccccatagtttttccctcaaaggcttccccgctcgttcatatatttcatggcgacccttggcggcttccagttcacccagcagcagcagagaagcgaaaatgaagagagaggataaagctggcactggaagtgatcgaatctgcaaccttcagccgagcagcagctgacgcagagaagaagaatggacgaggacgtccataagagaggcccggaatgagatagagaagaagaagcttccccgagaggaagattaatggatcaattgaggcaacaattgatcctatatgatcgagcaaagtggggagctggagagggcagggtcggtagttcagctggtagaacactggtccggaaagccagagacgccggttcaaagccggcccgccccatagtttttccctcaaaggcttccccgctcgttcatatatttcaatagtaattatacaattattttttgagcaatttttttttagtaaaaaagggtaacacatttcaaagcaaaaaatcatttgttttgctaatggattcgaaaaattcctttgctgaattccattttccgacggatggctcaagaagagaaagaaagtcgaatttggaagaatcggactttctttcggaggttttcgcctcaattgctgcctaaactatgctttttgttcaattatcgagactattcggattattaccttcaaatatccgaccaaatattgaagacaaaactccgttcggatttggttcactccgatcggcgaattgcgcagcacggcgatcagagtggggaggagaaagtgcttttggggttcggagtggacgaagttcagcgggagagacgtgcaaagcattgagagaagggaacgacgccatccgaacacacagaaaagctgccaaacatcggatcaattctcgtgggtcaactggcacttttgttgccccttttcacctgattttgaatgtccccaacggcgaagtggccgatggcgcggatgcattgctccgctaaggcacccatctgaggacaaagcggcgatgcattgcccccccggggcatttgtcgttttgaaacaaatttgcaaaatggaacggaaatgcaagtcatccgaagggccatcgcatggcccaaattcgacgctcaaaaag

SEQ ID NO: 14439 - DNA, 2470 bp, Heterodera glycines
caactgctggcggaagtgttggaaggcgacgatggaaagacaatacatccaaaggacggcacacaagcggactttgctgaacggaaagagtggaattaatcaagtttcgtttcctactgagttgcgctcagctgggcatgcggcattgtgccggcgccggacgatgaacagctccgcccgcccgctgtgccttggctctccgcgctgttgtgcctggccacgccctgctgctgctgcttgggtccggccgtgcgtccgtccgcctcttccgtctctttctttgccttccgatcggtttcctctcttttctcatagtcattttcaagcagagatacggtgaaggaagtgatcacttcacaaacggatagtcttttctccccgatgtacagctccaattcgttggactgactcggatcttggaggaattcgctggggccgagtcgttttgcgcaaagagaaacaaattcgagcagagagcacgagcagaggaaagagaagagagaaagagcactgtcagagtcaatttgccgactgatcaaacgccccatctgatggacgatgaaaacggccacagaaagtgccggggactgagaagcatcggaggtgacaaaagccttgagtgcaaattaacagtgaatgggacattattactcaactaatgagcacactcactcgagccgcattttgttggaacaaatcgcacagaaaaagcgctgtctttggcccgaacgtgtgaatttgtgtcggtgtgtcctcagaatcgaccaaattgccaaaaagggcgagtgatttagtcaaaattctgaattttcactcatcacaaattgccaatcattaatcacctcattcccaattcgttgttgttcaccaaattttgctttctttggcctatcaaattgaccaatgacaataatttctccaacactttcgttctcaaaatcatttgtctgagcatcgctttctcctaaattccaaagtgtccattttcaatcactgctcattttgtgccttggcattgtgcgcatttcgcagggcactgatcagttccgtgactttccgctgcactcccttcagttcgttctcctccaattgcccctcctccgctgaatttcccaatctttcgacctttgtctgcaaaatattcaatattttggcacttttttgctgtgccgccgttttctgtcccatttctctgctccaatcgtcgccaatttccttttgtgtcgtcgtttcgaattcccttcgatttgtttttttaaattttattttttgcatttcccaatttattaccgaattattttttggcgccttttcgcccgttttttcttcgttccattggcattgcttttctctttgatttcgtcgaccatcaaaagctgcattaaattctgatcagaaatggacatttccgcatttcttgctattattttgtccattggcgcattgcccaatgagaagctttcgtccatcgatttggacatttcctcggaaatttcttctaagttttgtggcaacgaagtcattctctccaattcgttcttctgatttttccattattattcttattatttgggttttctttagcggaccataaaatcgtagctgatcactgcgttttgtaaaagtgagtccgacttttggtcagctttggccaagtgtttctccgacataatgtgggccaaaagttgcaggtcattccgaatgatttccttggaaattgggaaggacttccgtttcgtttcccttccgttcctctcactttgcttccgcaccggaaacagcctttgattccgctcgcttcttccgcttcgccctcgaccgttctgtccgaattggacgacctctgctgaagtgccaaatcggagggcatttggccaaagtcggccaaagtctgtgcccacaaatgggtgggtcgtggcgagcacagttccatggccctccttctcacttgctctttgcactgttcgtaattttccgtccctttttcttgctgaatttttctttcatttttccttttcataaatttccgacttttctctgaattttgtccaacagtttctgcttgtccgccaattcgctttccttcctttggcttatcttttggctgtgttctgccactttcgccttgtacttttccatggccttcgtccggtgtttcagtgcgttgtattgccgttctaacctttggtttgcctggtcttttagtcgttttgtgcgttgctgtcaaatggcaaatccgttgcttcatcattagaggtctttgtttggtgccaaatccatgtttcacgattccccccccccctttggcatttgtttggctctttcccaccacctcttccgcgtccttccgccgcttctccgcttcctctctctgttgcttgttctcctcaatgcgcttttgccgctcctcctcggcctttcggaccaaatgcgcatgtcgattcctttctcggatttgggtgaatcgctt

SEQ ID NO: 14440 - DNA, 831 bp, Heterodera glycines
tctcgctataaaagccctgctccttccgcttcaccttcatttcgtcctcttgcgccttctgcacaatctcttcgagactcttctgccggttctcctccgccttctgaatgcgctccttcaccatctccaaatgtgctgttttcttctgttggatttgctcccgcttcgtcctcacttccccaacccttcggtggaggaggtgaagcctttgtgctttttcctgctttagcaatgctcgcaattcttccgctctgcgcaatttgttctccgatgattggtcaatgtcttcggcccttctgcgattttttggttaccatttgaatttccccgggaatcgccgattgccttcgcttcgtcggcgaaagaagctttgcccggagctgtgccaactctcccgggtttctataatggctcggctcggcactgttcgcctgagtttggccttctcttccgtcccactcactctgtgctccctctttgccaattgcttcgtcctcccttttctctggcaattcctccaaattgtctttgtccacaaaatcatccgaaaagtccggcaaattctcttcctgaatgggtcaacaatgtttactgttcgtcctgctactgcttcacctcctcctcgatctctttcttcagactttcctcctcttgtgccaaactctcctcttcttccgtcatcgctttccattcgcaatcgtcgctcaactgatcgatcagtgtcttcaaacagcccgagattcgctgctccctcccctccccctcccccaattgctccaatccctccaattccgtcggtgccttcgcttttgtctccgccgtccctttgct

SEQ ID NO: 14441 - DNA, 1051 bp, Heterodera glycines
aaatttaacaaatataattttcatagattcttaacatttctagttacttcatacttctattaattgaccatcttgagagaaattatcatttaagttttaaaaatgattatttcataatttgtataaaataacacaaattattaattcacttttttagcgaattaaattaagtttcacatattttaaataaatctgggtgtttaaaaaaataataatttgtttatggatttgttactgacggattgtccacgacttttctttcacaaagagtcggagaataatcctagataaatcttgttctagtgttcagttgggatggattccaaggtcccaaaattttcgggaagggaatcggaattccgaggcccaaaaatcgggatttagtgcagctggtgtccagaattgaattgtccgcaaatgtccgtccgtaaggcgttagtaggcgaaatgaatgtttttggggttggtaggcgaaatgtcagtaggcgatatgtccgtacacccttaattgaacatgaaaaatcttttttttttaaatttacaaaaatttaaaccagcggaagagttgggaatttgtaaaaaaacattgaaaaaatggaaaaagaaatttggcataaaatgcggctaaagtaaaattaaataatatttttattttttgtattatttttaggatgcgccattcgaatgaagataaagctaattatgatataaagaaagcgaacccgtcgagtcacagagaaactgagaatttttgaaaagcaatcgcacaactctaagtgtttggacaaaaagcaaaaaagaaatcgctaatttatttgcaattttgaattggcattatttaccggcattttcagtgcctgctgtatcttatcctcaaaatagttatttaggtgctgacaaaatgagttgttatataaaaaccatcaaatgaaaatgttcaacaaagaactgcccataacttttgtcaaagtcaaccaaaattcaacatttttgggataattcgagatagccctaagtgtgctctattataccatcgtaaatttttttgaaa

SEQ ID NO: 14442 - DNA, 1612 bp, Heterodera glycines
atccccaaaattcgggtccccaaatgtcgggatccccaaatgtcgggatccccaaatgtggatccccaaaagtcgggtccccaaatgcgggatccccaaagtcgggtccccaaacgtcggatccccaaatgtcgggtccccaaatgtcgggttccctaagtgtcgggtccccaaatgtcgggtccccaaatgtcgggttccctaagtgtcgggtccccaaaagtcgggtccccaaatgtcgggatccccaaatgtcggatccccaaatgtcgggtccccaaatgtcgggttccctaagtgtcgggtccccaaatgtcgggtccccaaatgtcgggtccccaaatgtcgggttccctaagtgtcgggtccccaaatgtcgggtccccaaatgtcgggtccccaaatgtcgggttccctaagtgtcgggtccccaaatgtcgggtccccaaatgtcgggttccctaagtgtcgggtccccaaaagtcgggtccccaaatgtcgggatccccaaatgtcgggatccccaaatgtcggatccccaaatgtcgggtcaccaaatgtcgggttccctaagtgtcgggtcaccaaatgtcgggtccccaaaagtcgggtcaccaaatgttgcgatccccaaaagtcgggtcaccaaatgtcgggatccccaaaagtcgggtcaccaaatgtcgggatccccaaaagtcgggtcaccaaatgtcgggatccccaaaagtcgggtcaccaaatgtcgggatccccaaaagtcgcaccacagttaaacttatgatcatctgtacatcattatgttattttcaaagacccaaaagaaagtttcatattttttgtaaaatgaatgcttttggtttcctaaatgaatgatggtcaaaagttgaccgaaaaaatcttaactgacgacatagaatatttcgatgaatacgaacagtaaagaattgatcacagttagcatataaatcagaatcgccaaattattttgaaattttctctgaggaattcatacatttaactattaaaatttcccaattcgtgatttatttaaatttttgtttctggcttggcgctgaaacgacgtcgccgaatcgtaagcgcaggggcctatttcaattcagatcatatcccatatatgacgtgtcatatatcatatgcatgtttcaattatacactgacgtgccataagatcatatcgtatgcggaactcacttctgacagccacatatgatatggtatcatatgcgagtgtcatatcagttttgggttgtttcaattcaaattgctacatatgatatgatttctatatatgatgcctacatatgataccgaatttgggataaataaagacctattaatgagatttaggccatttaaataaaaaacttaacaaagatttaaaaaatgaagcatttttaaattttattttcgtaaaaataggtttaaattttttatcttttttttagttgaagaaaataagggcaaataacaaaatatatttttactattataaaaaaaaaatttaataaggatttaaattccaaaaattagcttaacagctgcactaaaaataggttttttactcttaaggcccataggaaaagggaaa

SEQ ID NO: 14443 - DNA, 2053 bp, Heterodera glycines
  unsure (1)..(2053): unsure at all n locations
ttatttctataacnttttttaaaaaaagtgataaaaataccatataatatttatataatagagcaaaaaattgcggattttttgagctatattatttttataaaatactttttcagaagggagttctgaatttttttctgaaaaatcgaatttttccagaaattctggaataacttttttattttggaagatagaaattccaaataaatctcataaaattctcccaatttttctctattttaaagctttattccactaaatttgaccaaacacgaagagatttatgaattttcgaaatttcactggattttccgtggctcaaattttgacgatttttcaaaaaattttaaccaccttccaaaattttttcatgaaatgcaaaaccatggggtcccccctttggttttgagtttcaaaatcacaattaattttataactttttttaaactcatggtaaaaacataagataaagcacattagatagagcttaaaattctctacaaaaatgctctaagacaaatttccgctaagatcaacgcctgacgagttataagcctcaaacggaaatggggagctcaattccggaaaatttttctatttccggaaaattttgaaattttttcaaaaatgccaccaatcgatagagctcgaaaaacggttgcttgaaagtggtctccgttttcctgggaaaaatcggcaaaaaataataaaattcaaaaacgaaaaattttcgagggggcctagctcgaaaaattttgaaaattttcaaaatctgaaaacgccatcggatgcagctttaaaaactacacaaatgctcaagcggcgccaacccgctccgcttaacccccagcgagttattcccgaaaaacgtaaaaccggcattttgagcgccgttcagtcgccaatttctacaggctcggcatttgatctgatcaaaaagtgatcagtgacaaagttgtagccaacatgtctggggtgtgccctctcagcagactttttccgctcccggtttccaggaaaaagttacagcccgaaaaccgagctcgtttttcaaagtccgccgtttcagcgccgctggcgctcagttggcctccggaccggaatttccttatttttcccagatgcgccgtcaaaagttacccctgcctgcaaaatttcagccccctccgggcaaaccacggggacttataattttttctacgaactgcaagtttattctatatatatataaactagcgtgttgtggcgcagcaattgctcggtgtagacagtatacttttggtatatatgggcgggcgctgacatgagcgcttcgcgcaaaggactttgttgctagtgcgtgcgcgattttcaaatgaatttatggatgtgataagggattttcggtctacaggcatcgtgaggacgcattcataattttgtggaggactttcggccgcttcgcggcctcaaagggcgctccgcacttatcttttttcaaaattttaaaggcgacatttgaagcttcgcggcctcagacgggcgcttttgcgtccgtttcttagaacattcggccgcttcgcggcctcaggacgggcgttcgcgcccgttttttaatttttttggggggcattcggccgcttcgcggcctcaggacgggtgcttggcgcccatttttaaactttgtggggaacattcggccgcttcgcggcctcagacgggcgcttggcncccatttttaaattttgtggtgnatattcnnccncttcncgccctcatacaaaatncattaataatttttaaaaattntaaaataaatncctctttttattattaaaaaaaactttnaancttntaataatttaaatttatttanattnaaatnaaattaatttctnaaaaattcaaataaaaaaaatatnaaattatttaattaaaaaaaaataattttaataaaatttttcacaaaaaaaataatttaatttaaaaaagaaaatttaatttttattataaaacaaacacttttctgggtagagaaaaatattaaaaataaccatagatataacgaaaataa

SEQ ID NO: 14444 - DNA, 1324 bp, Heterodera glycines
acgggcgcttcgcgcccgttttttaaattgtgttgaacttatacgggcgcttcgcgcccgtttctaaatttgttgggctattaaggcagcttcgaggcctcagacgggcgcttcgcgcccgtttctaaatttgttgggctattgaggccgcttcgcggcctcagacgggcgcttcgcgcccgtttctaatacaacagtgattagaagagatgcaacagagatcagaagaggtacaactgtgattggaagaggtacaatagtgataaaaagaggtacaacagtgattagtaaattcattaaattaaaatgaaaatattttttaacaaatttaatttaaaaaatacatgaaattctatcaattaaaaaaataattcatttaaacttataaaatttattcattaaaaaaaaaattaatttaaatataattttttatttattaactcaaaaaatattttaaatgaataaaaattgaaaaacacgaaaaaaatggtagaaaaataatgtacaccgcccggatccgaactccccccatccctcaaaatgatgcctcagaatccccaatcacacagggattctgaggtcttaacgatgtcaaaagtaaaatttgattacgtattcgtgatcagcggcacaaataacccctaatgacatgtttttggaagatttttgtgagaaaaatttttccactcaaaaaccatgtgctcccccctttggacccgaatcacaaaatcacttttatttttatatctttttttaaaaatgtgataaaaatgtaaaataaaatttatattatagagaaaaaaattgcggatttttgtagtattttacttttctcaaatagcttttcagaaccgagttctgaatttttttctggaaattcgaatttttccagaatttctggaataacttttttcatatttatgctagaaaatccaaataaaacccataaaattctcctgatttttctctatttttaaggctttattcctgtaaaattggtcaacccttaggctagatatgaattttcaaaatttaccccaaaatcccgagggtcaaaaaaattgaaaaaaatttcgaatttttaaaaaattctaaaaattatgaaacgaaaaacaaaggtcatattcgtaatcagcatctcaaaataccacagaaaaaaatttttcaccccccttttcaacccaaaaaaaatttttgaaaatttctagggggcctagctcgaaaatttttgaaaatttccgaacatttagtacaccattcgatagaactttgaaagctctacaattttgccctaggggcatttttggctagaaccaacccccga

SEQ ID NO: 14445 - DNA, 977 bp, Heterodera glycines
cagcttgcatgctgaggtcagctgttcaagaggccataataattaacatgttgaaaaaaattttttctctatgtactcttaaaattgtttttgatttttttttaaacaaaattttattttggtccattttttaggttaataattgacatcataaaaatatgcaaattgtcgtaatgttttttattttttttgttgttggaaaatcgcatcacttttttgtggttaaaattccatttttggcgggtccaacaaaagtaaatttttgaggcacaatttccaattgtggagtctcgtccatccaacaggttaagaaaatgccataaatgcgtcaggaagtaaatgtttatgccattgtttgtccagctgaaactaaaccgtaaagtgataatccacgaaaaacgcaaaaaacattatacaaaaatatttctgtatttaaaaatttccttatttacaaaaatgtttttctaaatacacaaatcttcaaaaaatatatatttattttgatatttttcaaaaaataagaaaaataaatatatttaattaatgatcgaattaaaaataaaattgataatatatcatctaaattgtaatttaatattaaataatttttaaaaattaatttttatcattgtaaaaagaagaagaattaataatgcaataaatgatttttattgcttttttttatcattcatagaactgacaaatgagaaaactgttataaaactgttataattttgctgcccctatttttggatgcgattgagccccacagattacaatattataatggactcagcaactaattaattgtaaactattttaagccaacttttgtgaatgactgtaaaaaaaggcgtaattatttcatttttctcaaattatttataataatttaacggattattacttaaatatatcttttatttaaatttaaattcatttccaattttgttttttcatcctccaccctttccata

SEQ ID NO: 14446 - DNA, 3197 bp, Heterodera glycines
gagcccaaaataattaccatgttgaaaaaatttttttttttatgttcttcttaaattgttttttgattttttttaaacaaaattttttttgggtccattttttaggtaaattattgacatcataaaaatatgcaaattgtcgtaatgttttttattttttttgttgggaaaatcgcatcactttttggtgttaaaaattccattttgggcgggtccaacaaaagtaaatttttggcacaatttccaattgtggagtctcgtccatccaacaggttaagaaaatgccataaatgcgtcaggaagtaaatgtttatgccattatttgtccagctgaaactaaaccgtaaagtgataatccacgaaaaacgcaaaaaacattatacaaaaatatttctgtatttaaaaatttccttatttacaaaaatgtttttctaaatacacaaatcttcaaaaaatatatatttattttgatatttttcaaaaaataagaaaaataaatatatttaattaatgatcgaattaataataaaattgataatatatcatctaaattgtaatttaatattaaataatttttaaaaattaatttttatcattgtaaaaaaagaagaattaataatgcaataaatgatttttattgctttttttttatcattcatagaactgacaaatgagaaaactgttataattttgctgcccctatttttggatgcgattgagccccacagattacaatattataatggactcagcaactaattaattgtaaactattttaagcctaaaaaaaggcgtaattatttcatttttctcaaattatttataataatttaacggattattacttaaatatatcttttatttaaatttaaattcatttccaattttgttttttcatcctccaccctttccatattaaaattcctttttttttgtcaagtgggccatttccgtcaaatatttttagctcttttaaagaggttaaatattcagaaaaaattgggttcacgactttttttccctctatttatggcctgaatgctcgcgaataaatgtgtcctcttaaagtttcacttaataaaacaaatataaaaattaaatcaattaaatataatttaattttaatgatctgcctgctaattgtttacatatttttggccaaactaattatgctaatgattttaaagaaagttagaaaattttttatcattacatgatttcattgttagctcatgggaagtttttaagaaaaaattttcttttttttcgaaaataaggtttatttttttttgtctccaaaatgaaataaaaaatgaattttttttaaacttctttttctacaatttttatttcaaagtcgcacttatctttaatttttcggtcatcgtacaatgggtgacgaacgaaggctaagcgccgtttttcatttattcattttctaacttttcatttcttaattttcacgttcttttttattgcccatttcgcaccgcaataaaagcacaacatcacttaagccgtaactgaaaagtgttgaagagcgcccgaggggtggtgattaattaaaaatagaaaaaaaaaattaaattaacgaaaaggcgcaatgtcattggcattttgccgtcccaggatgatggaagtcatgttggcatgccctttcgacccggctttttcagaatgaatgccgagacgcggggagaggcatggaatttgtcattttcatattagtgaataacgaaaagttccattgccaaaatataagcgtacaacgcattttgtaattggtcaaccggattaaatttatattcattgaaattttttttttcgaattgattggcatgttaaaatatttcattcaaaaattttaatttataaggaaatatttataaaatggaatttttgaatttttgatgatagagtttaaaaataattttgtaaaaatttttaaaaataaaatactttaatcaactcatttttttaaacttttggacttcaatattatcatattaatataaaaatatttaattatttttgttgtgaaattcttgataagtgaattttataaaaataaaaataaaattttttagacttcactattatcataataaaataaaaatattaatttatttcgattttaaaatgaacagttttctgcattcacatttttccattgatttattctatgaaactaatgtcaatttaacgctaaaagagtacctctgcccctaattagcatacaattttctctgggcacaatttttccatagcattcattaacaataatttttttttccgactccattaatttatgcataattattaaaacataaattaaatcttagcaaaaatgttcttctcttttaaaaatcatttcctccatcatcaattagaacaaaatgccaaatttggcattggctgttccggcattaccattcaaaatccgccggtcaaatcgaagcagcaaaaaatagaggaaatttacggcactcaaaacaacaacattatgccaattgttacgctgctcagtgttttgtatgtgtgcagtgttgttgtgcaaacagcttgtgcaatgccaatgcaaatgttggtcatgtacacgcccatcaacagttacgaaggtggatttaaattatttcttgaaatttaaataccgaaaatccataactctcgacaaatgctaattaatattaaatgtgagaatttggtaaattgccacattagcaaacatgaatcatgataattattaataattttggtgggtattgattaagcaagctttatctgttaagaataagctttatgaaatatgaatttttagaaaatccccgacaaaattacttgcccaaataaagtccataaattatttaattttttttttgccatgtttagttaatgaaaaatttagccacaaaaataaaaccaaaattaattcttgcttatttaatttaggttcggaccaacttctgtttccgctctatcgctcagacttacatttgttcagacaaaagccccaagaatttttggcaaatgccttgctgtcaaacacggatggtaccaaaataaattaatttcttaattactataaaaacttaattgttttttaagtagtccatacgcatcccatggaattggtgccgagcactgaccacagcataaacaataacaacacccgtacacgttgatgatgaagcgcattt

SEQ ID NO: 14447 - DNA, 3174 bp, Heterodera glycines
tatattttaaattgtttccaacaaattcgactccatcaattgtgggcaaatcagtgatcggcgaaagttggtaccaaaattcgtcaccaagataaacatcaccaatgatatgattgtcgttttcatcatcatgaccgtacacaaagcatgaaatgacaaacaatatactgtaacgcaaaaaggaatggaccattttctgtaactgaaagaaaagaaaaccaaaatttttatttaattaaaataaaataaagttttttaataatttacaatatttatgtttctaatcgtaaaatatccaaagtgtagagcaaaaatggagaaaggaaaggaaaaaattgtaaaattttatgtataaatttttttatgaatataataaatatggaaatatttagaaatattaaaaaattgccatttttgaatatattgatcaattcattgagttattattttttgggtttgtgataaaatgcatttgcttcttttaataacgtcaatggaataactaactttacgaaatgtgaagcaataagtattatcgaaaaacaaaagcttatctttcaaaaaagcaaaaatttataaattaaaatttaaatattatgaaaaatattttagcgaatataatttttcattcttaattgcttgagttctcttttgaatggacaacacaatgacaaaaaaaaacttattcatcaaatatttggtttaatttttttccttttaaattctttttagggttattttcagttttacggacttttaaattttgataaaaagggatcttattaaattattacagtttcaactaacatcttttcgaaaacattgggagaaactcaaaaatttgatattataattaatgaaatggcacattagcgcctccatttttgcgcctttcacatttgcgcccagaatatttagcaatgacgaaatgacactttttaccaaatactcgaaactttttgcaaaaagtttttttacaaattataactaaattttaatcctttcaccgaccggcgggcctattggcaccgccgaaaaccgcgaaagcgttaaaaattgacaaaatttttataaattacgtatattgtaaggattttatctctttttttccccttttaattattgtgtctccgagtgttttttgacaacatattgcctggcgggctaataaattgggttctaagtaatactgggaggtgcaaaagtggacttaccataattaatacaatttatcgaaagtattcaactttgccaacagttttttacagtatattttaaatagtcgacattcaaaaatttattgttgtcatttgataaatttttaggtttatttcctttttttgtaaacatttccaattttccattttttcaaatttatttttttttctattttttcaaataataatttggggttacatttttgtatgattttgagaatttctcagactttttttatattttgtctaaaaatagaacgaataaattgaaaatttattttacattggaatgcaattaaaaggagatgatgaatgaatgaatgacatgcttgttaaatgtattcaatccacacatttttttcatcttaaagacatgcattaaaagaaatttcattgaattaaattcaattaatttattcctgtaatgttcgggcgttaaacacggcgcatttttaaacgttcgttttttcggcgtattgtaacgaataaattttgtacattaattgagctgcttataaaagagtgcccgatgctgtagcttctacagttctcctcatttcatttcatttgaacaaaaatgtattttttatattaaatttaattaataaataatttatttaataaataataataaattttagaaagggtaaaatgaatttgcacacaattttctccgtgttattgtgtgcgctggtgttgtcctgcgcagtcggaaagccaccagcaaaaaagggccagcaaagtaaaaaggctgacgtcatagctaaagccgctgctggtgaaccggccgaagtaaagaacgatggcaaagcaaaaaaatcggctaccgtcgtgcctgtcgcggctggaccggtaggcgcaagtaacgatgccaagggcactaccgccggtggcaacaaggcaaccggcgacactggcacgactaaaccaagcgccggcggctctgccacgacagatgatgatgatgatgacgagagtccttctccttcggccgccgccggtggtgcaacgacaaccgatggcaaggctaaaccaagcggcgatggcacggccaccactttgtcgggtggcggtggaaaggcctccagcgcggcaaaagctggcagtggtggcacaactgtgcccgccaaggtcattcagaaatttaaaatatatttattttgaattttttgttaaaaaaatttatataaagggagaggaaacaaccgcagtaaaggtggacgaaaactcgaaaggcactgatgagacagagaaaccggaagggtaaaattaattttttgtcaaaactttaataaaaaaatttatgaaatagaatttttcgaattcttgagtctgtttttgtttaattagcctttttaaattggaaagcgcccaattcatactgttttttgacaaaaattaatttctcataaataaataaaatcgtcaaaaaaattaaatgggaaatacatttttatgaaaggaagcacccgaatttttttaaaaaagagacactcacaaattgaaaaaaaatcatttttattccttaataccccaatttttgatcaaattcagctcaactgatgccaccattactggcgacacgtttacaaaggtcaacaaaatcgcggacgagatcacagagtgcgagttttacttcgttcatttggaaaacgtggtaagaaaaaaaacaaatgcatttttaattaaattattgttttttaaatgcccaaatttttttcacattttgcaacagaaagccaacgaaaaggaaaagctttggacacgaaccaaacaagaagcggagatcgacaccgaagagatggcagaagatagcgtcgattatcgcattgtgacgcccgccatttccaaggaccaaccggacatgggcacattgtacgagcaagacacggatgatttgccctccgatccagatagaagggcaaggaggaatatgtaagttttcgaaaaaaattaa

SEQ ID NO: 14448 - DNA, 4444 bp, Heterodera glycines
  unsure (1)..(4444): unsure at all n locations
ggtcgaaactttacaattgggcggaacggagctcaccttcgaacgccggggcaaacttaacgccatcacacagtcagaagttgtgcacattggcgaacaacagcaacaaacggtgccaaaagaacagcaaaagtcgggagaggaagggtaagttggccaaagggaattggacaccaatgaacacaaattaattgaaaggggcgcaaataagcaacaaaatggaggccatttgcaagcggaagaaaatgcaatgggccacaaaacggaggtaaggacagacagttttaagaggcatttcctttttagttcttggcaattctcatcagcccctaaaagatttttggaaaaattgaagaataaatttaaaaattcgttcacttttcatgcgccggggactgactgtccggtagtgccggcaatttattatgaagattttggtaataatctcttcattaagaaaatgatatttaaagtttgtcttattgttgacttttttcctcgannaatttgaatctctttcggtgagattcttcaaatatcaaaaacgaaanatatggaacctataattaattactcatctttttaaaatttctttttgcatatgtcagaaattacggcgttctgtcaaaggcaactccatcgcgtcttcaacggatggacatttaaggcatcgtactaatgagaacaaaaaagcagcaaacgcattattggaggggatggcacagcgatttccaacggtggcggaggttctgtaaaactaaaaaatcaagttgaagctgcagaacatttcacacactccggcttactatgattttctctcttttatttaaggtcgaaatgccgtcgcaaaatgatgacgaacaaaggtaaaatggacgaaattgccttcaaaaaatgtttataagctaaggcccgtggctgcttcgaaagtttcattaaaaaagggacgaaaagcggccaaaatggaacggaaacagaaacgccttgaggaggtgacggaaggatttaatattgttttatttgggctgcctttgcagaaggacgaaggcgagctgagcagcagtgactcggaggagccgaccagttcagaggaggaggaagaagcggcgaattctgccgacggagcggcggcccccaaaaagtcgggcgcgcgattggtcgcttctcgcgaacgacgccgcacgcgcagagtggacgagcagaagcaagttagtcgacgggacctctacaattgcactatcgcccctggggactcctattttgcctgttggttggtctgaaatcgaaataaaatatcctttcatataaaccatttttagatatccttctttggtcaaaattgaaaaggatatttatgtttttcttaaaatcaacatttactgtcatactaactttctaaaaataatgattagatttgatatcagattcagattttatccaaattgattatttcccattttggcccctttgcgtaacgagcggggagatgctgacattacctgacaataagcaatggggcggggggtcatgcaccgaacggcgcctaccgtcaccgccgaacccaaaaacgtttttcttaaaaatttgactggaaatagcaaaaatttagtcaatttttgataaaagctgttaacaaatcgtaataaaaagtacaacatttttcccccgggtcccctgttccccaaatgcttatttttccctttacattagggtgtatcgtcagcacaaaatttgcaagcattgcttcgaaagtgtttcgaacttcgtacgcgcattgtgggcaaattgagcattggacaaaaggcgatgttccgtgactatctgaatgtaatttaaccgtcacatttttcctatcagtaattttgttgtccttttcagaaaagcatttctggtgctcttcagcatcaatcgcagcagagtcagctccaacaattggtccagtcagcggcaaacccggcaactgatgccaatggcgacccatgcccaacgatgccaaaattgtgaacagaacgatcgttcgttggggcgccagcgacattttgacaattctttattttttcaactttcatttgtttgtgactgcttcttttaaattgttaatcataaaacggaatatcatttatgttcaaagtattacatggaaatcgagtttttctaaattaatattccagtagagaacacctagagcttttgaatgacactataaaatatttggttgaaattgagacaagttatgatttttattttctaccccttggcggtttttaattagtcggaaaaattttttcgaaaatatatttttattttttggatcaaaaaaatacaataatgttgtggagcggactcgaaatcgtttcactttttatttgattgatagatttttctgccttttttcccgacatgccaaaattgaaaattggcccactaatttatctcgaattttttatggtcaaaaaccaaagctgatataacaaaatcttagtttttctatacaatttagaccagtagaatccgaatatgtccttaaatgggacctatcttttcaacctgagcttgtactgctccaactccatgcatgaagttcgagctgtacaggtttgttgcgatcccagagaccaaatctaagaccatattcgaactcaacatacccgatttaccttgtttaattaaattcagaatttccaaaaccacttaaaacattatgttacttggtggtcttgaaaaatgccgtttttggagaccactttcagtctcggctctccaataattcaatttttgtaattaaaattttatatttttgtgttcttatagtcctaactttgctctatttaatcactatttctctggctctgtatctcttttatttttctttaaatcagccatcaaaaatacctaactctaaaatgaccatttttacttacttaactctaactccctacttttccattggtattgatctcttgccagaataatggcaacatattattgataataatggcgggtatcttgaatcatgattgtgttttgttgaaattaaaaaaaaaaatttaataaaaaaaatttgggtatcaaaaattatgttccaccctaagtacgggataatcacctctaatttcgaagttttttcgtgcatatttttgacaaccctgctcataaactacagaaaaaagagcccacaaagaagattatttataaaattattaatgctaaaggcgtagaaaacataatgtacctaattaggaaaaataactaaattttaaatattttagaaacgcccatctcaaattttaaatttatatttggtcaaaaaaacttaaaaatttttcggttcgattaaccgaggaatttttagaaattgccatttaaagggtaaaaaattgaaatttactcaaatccctaagaataaataaactgtaaatggattgttgtaagtaagcttttgcttacataccaatccacgcttatgagttcatttaataataataatattattttatcttattttgtttttcaataaattctgatccattctccgatcacaaatcaatgttctgttaatgttccaatcacttgccttattaagttcaccaaattgcctccactgttcattttacagggaccgaattcgccgggagaaccgccgctgaaaaagtcagactttgaaaaatttattaaaaacgttcctatgacattctgaaaattccataaaatccacgccaaggtgaaaaatcatttatgtttactgtatttactgaattagaacccccctttcgagggggttgaaaaatgaacccccggggggttctattcagtaaatacggtatttattttgctgttttatttttctacaatatttctgatttatgagtctcttaaaccgaagtgcgaatgttctgctgttgtcaatctatttcttattaaaccaatatcgtaccatgttttgttccaatccttccccccgtgccaatgtttctcccccctctcccaccttgtgctgcttgtgccgtcgactgttgcttctgctccgtgtccgtctcctccgctgagaagctttaaaggtgcgttactgtacgaatgatcgtagacggaggagacaaaatgatgaacaaaatcagcggaagggggcggaagagagggaaaaagggccccgggcgatgatgagagaggaaaagcggacgaaggaagagaagaagcggacggagatgaaggaggggacgaatgcttggcctctttgctaaaagagaatgagaaaacaatcagaagagataaaactgttaacgacaaataaacaaaaggagaagcggaaagaaaagaccggaaaaaggacatcattattanagatgaagcggacgaagagaaggcggaggagattagccatgcaaatccaaccatgggaaagccgaaaagaaagaaagagggggggggggagagagagagcgagaga

SEQ ID NO: 14449 - DNA, 1242 bp, Heterodera glycines
aaagggattgttttaatcttcgttggacatgacccgatgaaaacccaaagaggggaccatttgatttacaataataggtcaaagtaaataacatgtacctatttggtcaatgaccctgcaaatataaaatagttttgaaaataaaaaaaacaagggtctctctttggttttgctttttcatcgggccacttaatctgcaaaagtgccgtgctctctattgcttttcaaatctttcactatttagtgccttcttcgtctcgtggtccacttgctccgccccattgtgtgaactcgccgattcctttttttgaaaaacctttgcctgcgactgcccaatcgaaacgcatgccgtcatttttgacgtctacgccagttaatcgaaccaattatggaatgcccaaactgagtaaggttgttaactcattgtgaaaatatccgtttttctctttagttccgcccgagtcttcccccttttctccaaatctgtccttaccaaatgacagcagactgtccgtggacagcaatttcatccattttctgaacgacagcaataatcagcctggcaatcagtattcgaatatcatccgagaagaaatgatgatgaacaactcaacgacaggcgaaatggtccagggcagcagtaaaaggacagacaaagggacggaaggagtcggaagagggagcagcggacgacgaaaccaaccgaatttggaggagaaagcaccgggttggcacaatttcaacatttaggggttgaaataatggacgacgcgttttgggaaggacaagagtttcttccacaatcacttcgttatttatttttagataaatcagtgcgtccgattggaggagggtccaatgtttgccaagaaatgccagtgcaaataaaaaaagtttgtcgagaaattcttattaattgcgtagcgataaataaattattaaggagcccgaagatttcgagtttgagacttctcttcttgtcgacgaggaaataaaggacaaaattctgcttgcgctcgaggaggagaaatttgggggttggcgcaaaatgcggtcgaggtccaatccgacgcatcagtactattacaatgggaggacggggacgagccaaaacgaactgccgaagtcatgggaaaaggaaatccaggaacgagcgaaaaaggcattaactaaaatgacagtccaaaccaactttaattttacagtaggagtccaacaaaaagtgtttatcgtccgacaaag

SEQ ID NO: 14450 - DNA, 3584 bp, Heterodera glycines
  unsure (1)..(3584): unsure at all n locations
actccaactcccaaatgcgctcagatgttgcccttcacgtcacgcggcgtgccaaagttggtcatcagctgancagacagaagagagtaaatgaggggatggcaccaacaatntggcaaaaataggaaatcgaaattgtggccataaaatgccaaaatatggacaagaatcagagaactcttatattaaaaattcaaaaaggactgaaatttttaaaacacatatttttccctgagttttttattccttttaaattaaatttatttggaattaattaaaacctgaaaaatgcaaaaattgctcatatatttttggcatttaattaaaggtgaaaatgtgatacaatttatgaatttggagggaatcatgcaacgattaacaaatttgccttagcttttggatgatgatttacttatataattaataaactgaacagttactgactgtactgcttgaacttggtgcctatcagggatggcattccgaggccccaaatttttcggaaatcagaattccgagccatccctggtgcctatgatgaccaataaatggctgtcaaaaatgatattttatttatacttgtaacaaaaaaaggaatggcaccgaaaaaataaaattaattaataaaaaagtttcgaatttttatctgttactgttttgttttattagtagaaaattttaatttatgacttttaaatacgtcttcaaaaattcttttttttcaaaaaattttaaaactttttttcgaccacctcaaattaatagcactgattcttacaaattagcctttggaaatgatgataattaatagatcgaatagatactgtgctgcttgaacttggtgcctatgaggagcaattaatgactgtcaaaatgattatgtatattttacaaaaaaaaagatgacaccgcaaaaaatataaataataaacataaaaaaagttaaattacctataaaaaaattttcgaattataaaattttaaatttatggtttcggatcttcaaaaattttctcagaattttttttaaatgcctatttttgaccacgtaacattaagtttggcaccgattttgcccgatgctaatgcctagtccaaaaaaaaactagaaggccggacaggactggatcattcatgtacaagatttcccaggaccatagtccgggtaactgggtttgatttgaagtgcaacaaggctcggagtccatttaagacgggactttgtgtccgggaatcctgtccgggtccgactcggaaaattcgggtcctggatccgggtttttcaaaatgccagccgaaatctaagaaaaacccaacgctcattttggtgtgccaaattgatcaatgaatttgcctgattttactttttaacccctgaattctgatcagtgtttaaatcgttttgaaaatgttgtgggatgagcaaataaatgagagaaaaagcaactaaaataagcgaaacaaaaagagcaacaaaaccggcacaaacacgcagcacaacacaccttttgcgagtcgaacttgttggtgccggactggagacggatttcggtgtccggcatgcccagcggggacagccccacgcgccaacgcctggcgatgttggtggcgccgtggtagttgtcctccgcaaactccacccgtgtctgcgtgttcctgggcgtgccgaagccagttttgccctggagggttgcgggcacactttttttttgttttgttgtttgttattaaaagcataaaataaaaatggaaagcagcagcaaaagccaaattagagaaaagcggacggacgaaaaaacaaaacaaaatttgctgcaaaatgacaacaaaagcggtttctttccttattaatgtgccatttatttttgctgtctcagcggcattgatcaaaacacgcgaaattgatacactgattaggccttggataaagctaccgatcattggacagagagagagagagagagagagagatttggctggtgaaccttactggacaaaaatgaaaatccaatgatatttggagagaaaaatcttttcccaacaaataaatgagtgaactagggtaaaacgggtccgggtatccgaaatgggtccggaacccggatacccggctttttcaagacccggactcggtttttttgagtccagcaatacccggggacacgggatttatccaattaaaaataattaaggctcataattaagtttaataaattcactgacaaatgagtaaagaaagatttatggaaattatatcatttttctgatcagaataatttttgtgttatcattcattaaagaataggaataataaaaattaattattgcttaatgacaatgatgattataataattttagtccttgccttctgcgagtcgaactgattggtgccgttttggagagggcaaatgcctgagaaatggaagcaatggaatattatacacatttggcaattttgacaatttcccctccaatagactgtcttcaaaatttatacatttcgttaatttggacctaattatttttgtgatttcgtgtccctaaatttgagcccagtgccggcggccgcctcaccgtcggtggctctgagctgggccaaagtgaatttgccacttttggtgcgacggtcgttgccctccgcctgcgcaatgtcaacattggccacaacaattttgagcgcatttgggtctgaaagcatttgtgacaattagtgaatttaatttacaataaatcactatttcaatcacttgccaatttttcgttactcaaaaaccatcaaattgaaaatttttgacgaaaaattgatttatgcttacgcaaaagcaaccaaattttaattctttttatgattcaatagctagccctaaatgttcctcttttatcctgcaaaatttcaaaaaatttctcaatactatcgaatggcatgaataattataataaatctgtttgcttttgagcaaagttatagcaaacatttttttttatctggtcattttgagtagcgtcataacaccggctcaataaagaaagaaagtttcatggatttttctcttcgcgaaatcgttgttgcggcgcgtgaagaaaaagtttgggtcgagactgccaaaaaaagttcgggacgagaaaatgtcgggattggggggggggcacaaccataacaatttgattagacgaaacatttttgaatgaaagattaaacaaattaagaaaatgccgaatttgccctctttcaaaagcccctctctctttctctcacattctctcccattcgctcactgtctctttctaatccctaaattttcaatttttctcttctttcttttttttgccttgcggttgctgctctccccccccccccctcgacccccccttccagaccccttcgcaaaaatttcggttgacccccccccctttccatgtatggttgaattcttgaaaatagcagaactaaataagctgatgaaataatttttatattttttaacaattttaagatttccccggaatttaacgaattgatccaaaatttcctaatttttcgcccaatggtgcctaacggcagcgccggatcccaaattcctta

SEQ ID NO: 14451 - DNA, 1610 bp, Heterodera glycines
  unsure (1)..(1610): unsure at all n locations
aaaaaatattttcaaatggcacacgcaataatcaatccaaaaaatcactaataatntaaatttgtacctatntaatgaaaatctntaaggcaatattatttgtaaaattttattaataaaatttttttttaattttatattgaaattgttttcaacatctgtatttctttattctttaacttttattttgtgacaaaaattgactgtgattttttttattgttaattttctgccgaaaaatgcccaagaaaaactaaaaacgcgtaattctttttttataaattcaaaaatcatttaagtgaaagtgtcatatttgtttttgcactactctttttaaaataatcaaaatagggcgtaaatttatttgtttttaatttcgggttttgcgtcttggcgaatgaatggggcaattagcaaatgccattcaacaagtgcgcacatttaaatgaactggcaaaaagtagtaatggcgtaagagaggaagctgcaaaagaaagagcaaattgttatttgaaaatgataatttttttaaaatttttttattattcaattatttaaaaaaacaaaaaatatttatttattcataaaaattattttattatcattatttcaactaaaatttttcattttatttaactgttaaatttttttatgaaaatttatttttaaaatttatatttaatttatttaataaatagaattattaattcaaattaaaaattataaagaaatttccttaaataaaattatttagtgaatattatattcattataatataaaaatgcatatgtgtgtctttatcagtctccattaaacaattttttaaattggattttatggcaaaatgctaatttcaggcgtccaactaaaaaatatatgtgtaaaaaatgcagcaaaaacaaacaaacaaatgctgtttgtgacagttgacttaattaagaatgtctgctaaattcagattattcgtgcttttataaatataaacatttttcaaaaatacgattaacaattttcgaaattcgaagaatttttattagaatgatttctgacgaggaaaaagctcgtcttaaatttatgcatgttaattgaaatgataataaatgataattaggtttcctagcgaatctcagtgatgtggcaatgtttctaataacaaaagtgcattatttgaaaactacttttttaaattttgtacatttcaaatctttttattttcgagtcgatatttttaagaaagttttaggtttgcaaatttgtactttttcattgaattttggtaaaattatattaaatcgaatgagtgaataagtatataaaaagaatcaattagtaaaaatgaatcatttttatgcctatgaaaagaaaaagaattggaatttcaatagaatagattagtcaaacaaaaatttgtgccttagcaaaaagagccgtcattttaagaatgaaacaaaaggcattcaatttattcacgtaaagacagtgctaatgtgtaattattcagctaattatttccgattttattacaattgcgcatttaagaagcattagcatctttggaaatanatgnggcaatgatgtgaagtgacgaagaatgatgccacataanata

SEQ ID NO: 14452 - DNA, 2781 bp, Heterodera glycines
attgcagtaaattactcaaaaattttcccggcggcgcctatcggcaccgccggaccccctttttaccatattcttgaaaaatggagaccaaaatggcaaaaatagtattttctggagaaaaacggctaaaaattttgtaacatacaccccctaatttcgggattccaaaaaacgaaaaatacaccctgaaaaatcaattcaaaaagtgaaatacacccctaaaaatcgaattttttacttcagccgcccccccccccgaagcaaagggtctggctacgcccttgtataacctataatacaaatccctaattcacgaacactgaaaaaaatatactcacttcaaattttcttaccaaaaaagccgaaaaatacagtacttgctatagtacagataggaatccggtgttatataatgcttatgaataccgcaccaaataattaacaaaaatatttaatactaaagaatttctgactttctccgtccccatagtacgacgatgctacttaaatgtacaaaacatgcattttttaaaacattttgtgttgttttgaatttcttactcggttcatctattcttctacgatttggtgtactgtaataatcttggtccataaaatttgattctcctcgtcccgaaccttggcttgacgtacgggccaagttgtctgagaattgaaatgataaaaatttcaaaaaagcgttttggggagtcgatgccgggaaattttgctctatttgttacaaatttcataaaaaattgcactaatgcaaaaataaattaattaaaaaatatttatggaaatatttttagtttcttttggcgaaaagtgtaatatcttgaagaaaaccgtcggtaattcccagcgaaatgccatggtacccccggtgttcggttcggcctgttttcgagccgctgcttttcgattttggtttcagttcaattaaacgactgtgaacaaccctagtttttattaagttatttcattttcacaataatttacctaaaaaaattattttttataagataattcgctttcggataaccgccattttggaattttttttcaaaaatatgaccaaaattttctgaattgctcacttttcattagttttaaattacctaaaaaggcatattcccccccccccgacgcataacttttgcaaatcgtattgtaaacaaaaaattggaggaacaaaaaaaatctccaaattagcccagcccatctgattaaacgggcctgggcttccagccagatttggcttactcaaacgcgtctgcgagtttgaccgtgatcgatgtcgtccctgcctcgccttcccctttctttcacatgatcgatctcgtcttggcggcatgtgtccttcaggtgattctggctgaatttctcgtgccgctactcttctgccattttcgatgtcttctccttgctgattttcgggagaacaatctttacaatatttcccgatagcccaaatagccaaaatgcaaaaaaagccgccaacaattagcacgccaactgtgcttcccactgatcgcttcttccggcgtctttgtcgttgggtttctgtatgaaaattgaatgaatgcaaaaactattcaccatctaaaagtttttaaaaacgaataaaacttcgttgaatttttgttttttaatcgttttaaaatataaattaaaaattccagttgataattaaaattagggaaaaatcactaaaaccagtaatctgtcatgacggggaccaaaaatgccgtaatttatctgaattatatgtatgacgatttgaaacgctcacaaactttttgcatttttttaggttcgccaatccgtcgactccgtctgttgtgaaactcattatcagcttaagtatgcgcttgtttcgttgttgatgttcgcgtttttcatgagcaaaaaacaaattatttttgaataaaaacacaattttaatgttaacaaaaaagaattacaattttgctccccattttccctaaatttgtgccaaaatttggtcaactcttcgagcatgcttttctgatcaatttgttgtccatctgccggtggcataatttcatttgttgagatttgcaaacgatttgccgtaccaattgcaatttctttaatcaaacttattaaattttgaatttttgcattttggtccaaagaatctaaataaataaataaataaattatttttttaaatacaccttcattaattgaagcacttaattcgttgactgatttgtgcaattttcttattaaatcagccataggtttgtcgagttggtcaatccatttcaaaatttcaaatttatccattagagttggcttcaccgaagaatctgatttttttattattagatatacaaaaaatttaactttttaccattttttccttttttatcaaactttgtcaacgtgatctttccaatcccatcgcccccccccccgcccttcaaaattttgaaaaataaataaaataataggagactcagaattttgaaaattttttataaaaactgatgacaagctaatgtgataaaacaggttaattcttttcctttcagtatccctgcaaagtttggggcgcttctgataagtttctgaaaaaaaagataagcctaaactttttggcctgtttaaaaaggaattaaaaatttttaaaaatttattcatctccctttttgatagaaaaagcatcagagtgcctaaactaacatgtaaataaaatttggtgcgttaaaggaccctttctgaaaaaatatttaagaattaatttgcaaa

SEQ ID NO: 14453 - DNA, 3315 bp, Heterodera glycines
gtttcgttaatttgtatttcgttggtgtttttattttataagttcagtcagtgtagtgcttttcgccacttgtttctttttcgtgttggctttgtcgtcggagtaattgattaggagtcgctctgtccacttaattatttaaattagtgatgggtttgctgtagggtttattatgactttttaattatgtttggctttttatggtgtcctttttcggttttttgattgggtttggtgatccgtgtgtgtgtgtgtgtgtgttttttttttttaaattgggtttgtcaacccttgattttgtatgggcttggtgacccttatacttccggatgacgagcagttgcgcaacggtgaatttgacgttttgacgtggcaatcaggtgcagaccggacaggcagcacagtaagacgaatgggcacagcaggacaaacgggcagagcggcaggcacggcaggacaaatgggcacagcggagtggacaggcacaacagggcgaacgagcacagcgggacgcacggcaggacaaatgggcacagcgggaaaggcacggtcccgggtcgtggcaccaattcttgtcgtggcgacaagaaatttgcgtcgaactctgcggggtgaaggggacgggaaggggatgaaatgggcgaggcgcgcagagtagccggtcgggggaacgtagggggtcgggaccgatcggagagcgatgagtcgtgccggttttcgtccaggcaaatagaccaagttgggcacaattttaataagagtatgtttattgtgtcgacctcaaacttgggtaattaaaccgtcccaatcgggacggtgaaggaaacgaaaaatgggggacaaacatgataatgtgaacggggaaaaagggcacaaaaacggtgacagtaaataaatcacaaatggaaaaatgtggtaaaatcaaaaggggtcagaacggcgaaacggcgatgggaaaaggaagggcattcgggcaacggctggtccaaaaggggccacacaatggcaaaggaaagggagggcactcgagcaggcgcggacagggagggcactcgcacagacagagagcagcgaaggccgggtgcagtgaaaggcggtgggcgggtgccgggaaacttcggagggaaccgtttgtctcgaatctgaaatttccggaaaagtccacccctttaaatacgatttttttgcaccaaagtacgctacaatttctcattttaattaaaatatgtttttgtgtgttatccgtttggatttgccattttcccattaattgtttgcttttccgttttccctttacaattccaatttctttaatatattaattattaataatttgtttacgaacaatccttaacagaattcgcaatttaatattaattaattttcgttcctttcattcctgaggaaatgcacttttccttttcaaacaattttccgttattcatttcaaaaggttttttcatttttatgtaattatattttcgatagttttttataatattatttttccaaaataaatgtaaaaatattttttattatttatgttttatttttccccattttattttctattgttttttatttttcctcttttttattttgggttttatcttaggatttcgcgttgtcgcgacactcccgcgcgaaagaggaaggcaacgacacataattctatatagaataggtagtagacatggaattaggaaaatcataatgagtatgaatatgataataataaatatattgaaaaaattggctttaataagggaatagataaaatttaatatatcagttacttggtcaaatgaaattccaatagtggggttttcattagtattgttagtgggaatgatttttgtatcttgttggtgtatgtattccagattagctttcaaaataatttcagtcttaccatcgggacatataacttcacaattttctgtaatatttttcttattatatgcgagttggatttgttgttcttttccttctttatcacaattcactcggaccttttgacttggacattccacattggctaatgcggtaccaaaatttgttttgcatgatagagtccaattagcaccactagtacaggaataacatccttccaatgatattgtaacaatattacaaatatttttatcataaatagctttaaccttatgtcctttaagtgtgacttgcatttgaagagaagttgtttgttgtattttagctttaatttgggaatcgaagtatacgtaacttccctgtgttttaatgggtaaaaggttctcttgcctagcaaatatttcggtaagtggacttttttcacattcacaatgtacaacggaatcacctccgtggcattgacatgcttctggtggaaaagtgcaactaaaactttgcgcttctttgtttttacaccgtaatatatttttgagtaaattttcgttcgcaactattgctgcttttaattcttcgcgaactataataaatgtcgaaccaaataacggcgtcggtggaattgaagtcgaagtcagtgtgacagatatagaactattaatcgaatttttccttcaatattttcttgaatatttattgagcatccaaacaaacatagtttaaaaaaaattaattataattttttttagaaaaaaattataaactttattagccaaacaaattcggcaagccatacggtaggaaaccggtgctgttgatatacgcggtaagggtatcctatggtctgtctatatactgtaatgttccgaaaggatcccgtcaaacccaataggttttttgtaaacctattcacgtcccgattttgccgttaaaaaaacgctagaaaatttcctcattgtgcgtggggtagaggtgtgcgtgactgaaaaaacccgtgaatcgtgcccgtgaaatgacccctgaatagtgacggtagcccaaaaacctgggaaattcacggttttcgtgaccgggaccgttatggcggtgaatttttttgctttttacgccgtcttttttgcggtatactttttccaaaaaaaaaattctaaaagggattacggtggcgccgattgacgcgatgcacgaaaaatttataaaatttgagtgcattttgtgcacatattttgtccaaaattgaccaaattttctgaattggagccattttttaatgaattaataaattttgggagccaggcggtgccgatcggcgccgccggcgaaaaattgaaaatttgaatgctatttgttaacgagattttgtccgtaaattttaaatcggcaaattttgcaattttaaaacccatttttgaccctgccaggccatgc

SEQ ID NO: 14454 - DNA, 2534 bp, Heterodera glycines
aatcagcacgtaaaagtgggttgctaagctgaatttgcttaaatatcgtaacttcgcttatttttcccagttgggtgcctaccacactttggacctcgagctgaaccgcgtctttaccctggagaagccgtgttgggacgccatggacttgcacaggttggaactgtgctcggatatcgcaaacaaagccgatgtggctggcattgtacgcattttgctttgtgtgcttcactttctgattagcatttaatgcacaaatattttacatctcatttccgttttgaaattttacggggagaggggcaataatcaatttttttttttaattattattgacattccgtcgtgacttttcccgaaaaatgttttaggtaatgcatgaaggccttgcgaatgtttgtctgatcggttcttcaatgaccgtggtgaagtccaaaattgacatgcaggttggtcggaacgggatttatttaattgtctttttagtaattaaaaattgtttgtttttttcagatcgctcgcaaacggaagggactgacctcgcaacatgacaaaagtttggtcgcctttatgaatgcaatttgtgccgcatttgttcggcacgtgaacatcgaagtgacttccccccatttctttttcactgccaaaatctctcgccgattttcagctgatcaaatgcgttgttgtcgctagtccgggattccttcgcgatcagttcatcgagtttttctggcagtacatcgaacgcgaagggctaaagcagcagttcgccccgcacagaggtaaatttgtgctcgtccattcgtcaagcggcttcaaacacgcgctaaaagaagcactttcggacgccactgtcagccaacggcttagcgatacgaaggcactgatttttggaaaaaatggcattttccaatgttaggtcattttaggcacaggccgaagttaaggcattgaacacgttcatggagctgatgtgcaccgacccacagaaggccatctacgggtacagacacgtggtgcacgcacgcgaacaacagtccatcgacactttgatggtgtccgactcgttgttcaggcaggcgaatgaatttggcatggaaataattggcagaaacatttaaaggtccaaagaaattgcccagaggaggaaatatgtggaccttgtggagagcgtcaaggatcaggcgagaatgaagcttattggccaccgctttatatattttttctctcttttagggtgccaatgtgctaattttctcgagtatgcacgtgaccggagagcaactcacccaattggtgggttttattggcattaattgccataggcatccaacaaaaagacggacgaattgttttagactggtgtcgctgccattttacgatttcctatcgccgatttggacgacgaggagtgggaacaggagagcgaagtgccaaacgacgaggccgagagggaagagaacggacggacatgagaagaaagcggaggaaaaagggggaaaagcaccactcgagaattgtttttttcaaatttcattgttcccaaatgcctaaaatacataacaaattttatgtgttggttgaccatgaatatttttgtaattatggatgaagagcaattaaatgccttaataatttttttcgcaaatgactttaataatatattttcgttttccgaatggcgcgtcctttcattggctttgcgtttgatgccttcaaacggcgtttgggtgcccatgacttcccatttctccgtggtttcatccatggattcaattagtggggcttgcttaatttactgaattattccaaaatttatttaaatttttaattattttaaatgaatttaacacaatataatttcataatttttgttttcaagttatgatgcccaaagggtcaaagaaattggtgccgaaagggccgcggccgaatgggtcgtccgttgtgaggggaaagtgaagtgggaaatgccaaaatggccaattcaatgtttataatattttgctttctcagatttgaccattccccccacattttctccgattacaacgctttgcagcggttcacttccgaattggacccgaaaagagagtccgaccgcgtccatttggtggccgtcgatgccactgactcgtgcatgtgcgtacttttggcattggaacacaacattttcaaatgccatcatttcaattgtcttaagttcgggctggggctgtcgccatttcgatgggctcagtcgcctccaaaatgttcaatttgtgcgctgcaaatcgctgacagttggcacttttgcgtttgactaagccaaaaatgccccaaaggacaatggcctccaaatgctcgccgattcgtccgtctccgacactttgctaacacttcacatcgaaaagtgtccgaaagtgaccaattcaggcatcagacatttgcgcaaattgaagttgaattgggcaaatgttcctctaaaaacatttgctcctcttttagagtgctgaattcgctgactttgcaaaatttgaaaaatgtttggaagc

SEQ ID NO: 14455 - DNA, 1750 bp, Heterodera glycines
ttcttggtatcaaaagaaagcttatttgtcccgggaattcataaatccaagaaaagagcaaacactcgacaacaagaaaaaaaatacaacgagaaacactaaatttaacttatttttttgagtatattcaaaaattatttttggtctgttgcttcgagcccagaattttgatatactcaaaaattctatagacttagatagttttaatttaatattaaaaaagtaggtattgattgaccgagttagaattatggccaaagaaactgaagattgggctcataaaagtcgattggactcctaaattgaaaatggagtcttggttttatgaattcaaactactttttcctgtatttaaagcatttttttttcgttgttaaaggtccaactggaatgcctgctgttgattgtttgaatggatatcgcagttacattaatgatcgcaatgcagagttaattatgggagatccattgaacccaaacatggaaacggatttcgattttgctggaaatttggcgctttttgacaaggctgttagtaattacaatagtaataggatacttatgcagttttaagattaaagctaacctttaaaaaataattttaagtgcaattattacgctgtcattgcatgatttatgcggggacccaaacaaatttttcccgcccgcaggggtgcaccccaaaatttcgccgcggaaatttcgccggacggaatttcgccgggacataatttcgccaaaatttttttttaaaaaatttggaaattttcaagaaaaaattcttagaatttttttatatggaaattccaatgaaaaatttttgaaaaattttttagtgattttttggaaaatttttcgaaaaacttactaatttatcataaatttcaaaaaaaatccttaaaattttttctaatttttttttgaaattttcttataagaaattctatgattttttcttaaaaaatttctaagtctaattttttgattttatttttttgcggcgaaattttgtctcggcgaaattccgtccggcgaaatttcggcggcgtaatttcggcggcgaaattttgtcccgtcccccctgaaacacacctccccgtcccttggcaccgttccgcccgcagcagcactgtcagcccgttttggcacgcgcttcgcctcgtcgcctccctcgtcatcgtccgtgtcggaagggcatgcgcagtcggagcattcgaaacgcgagaatttgcttttggccggcattttggtcaacggcgggtccaaacagccgatgtggtagtggcacttgcacgtgtcacagtaggccaacagatgggcatcggttgtctgtttttgttggggggggggggtaatattagaagcagacatttttccttccgtcgtttccccaacgaaaaatttgaatttttttttcatttaatgtttaaaatttttcaaaaaaaagttgagaaaaccacaaaaatttttcttgaaattcttgttgaaaatttgaaggtttttgaaaaaagtctgtttaaaaatttccaggagggaaattaagtgcacccaatttacacaccgactcaaaaaaacgagacacgtgacaataaagagagagtgtagagaaaaaaacatctctcactttggcgtactgtttttttatctctgttaatagagcaaaagtgaatttacttttttctgttcaactttttttctgcctgttaaatccgcttcaaattttgcatatcgatagagaaaaaattctgca

SEQ ID NO: 14456 - DNA, 1646 bp, Heterodera glycines
ccacataactccaaaaatcccttttttaaaatctatgatttttagaaaattaaaaaatacaactttttcaattttttaaaatttcgaaaaaattgtttaaatgaaccctatgcggcggtggaaaaaacttgttcttttggtttatgaagaacaataattattttgtttggaagatttattatttttcaaatattttctgacggttcaaattattgcatacaatcactctcaatcatttatttaaaactatttaagatcgctaacaataagattgagaaatgtaagtttgaacccgattttagacataggcgcaaatgcaaggtaaccggaaaaaacggcgcaaaaaaggcataaaatttttaacaattcttaaattaatcaagcaaattgattttttaaaattcatcaatcaggggctgccctttgttttgacttggagtggatatcgctgcccgaggcaaccatttttttctgctttttcagttttttgcgacgtttttttataaaaaaaattttgggaaggaggggcccgggggaaaaatgaaaatttgtgaatttttgaaaccctccctgcctgatgaatgtctttgagaaggccggcgccaaatttgaaggcaaatgggcggccgggacggcgctgaactcctccgcaaactgtgccccgtcgaggccgagcagttcatgcttttccgcaaatgcatcgagaaggcgcgcgttggtgtgcaacagtttggcacggcgttgctaaaaaattgacgaaattctgatgaaacaaagctattaaaacgttaaaaaatgcaaaaatttgaaattttcattaaaaattttcatgaaaaaaattattttatgtaacttggattaattgagcaagaattaggtagcttattgttttttcaaacttttcaaaaaagtcttaaaaatttcaagaaaaaaaataataaaattttcagcgattttttggaaatttttttttgaaaacttattatttcgtcataaaattaagtctctattaaaaaaaaaattcttgaggacgaactgctcccctccaacccaccgcgggcggcacaacaaccgctggcaccgcagcggcggtgctgctgctggccatcgaagtcgtcacgtcaccgtctccgccgtggcactcgtccaccgccggcactggcagcagcagcagcaagcgttgcatgcgctgctgatagtcgcgcagctgggccacccgcttacgcgcctggcgcgcgtccaacgcgacggacacgcggcggttccactgggccatccgacgctcttccgcctccacaaagttggcataactgttgttgggaggaggggaaaatttcaaaattgcccaaaatttttggattttcaaaaaaaataaaaaaattaaatgctatcctataaatttagaatttttttaattataaaaaagctttttttggattaattggtcgattttgttccaaaaatttaccccttcaaccactttctccgataaagagaaatcgctggaagattttcccattttttgtttgaaatattgcaattaataaacttacgcaattcgcatgcgcgacacggacgcgtccctgggcgcgtgcttctcgcagtacaaatagccaacatcggccggcgaatgattgtgctgctgc

SEQ ID NO: 14457 - DNA, 3592 bp, Heterodera glycines
cttggacctttattatttttgatttatattaacgatcttcctgatgctttgccatcaggagtaagaattaaattatatgctgatgatgttaaattgtatatttgttataaagcaagaaccgaaacagaaattatgcataaagcattgcataatttatcagaatgggaaaataaatggcagatcagaatctcaattaaaaaaacttttgtattcatttggggaataaaaaccccaaagaaatatataaaattgatggaaatataataaatgttgtggatacaattagggatttaggcataaatattgataataaattgcaattttccaatcatgtcacacaagtaataaagaatgcatatttacgtatgcgttctttatttcgggttattaaatcaaaatcttctaggatttggattattttgtacaaaacttatgttagaccgttattggaatatgctcctgaggtttggaatccatctcttctaaaaaatatttaaaaaattgaaaaatgtcaaaaatatttcaccaaaagagttcttttcaaatgcagccttccacccattccataccaacaaagattagaataccttcaactgccaacacttgaaagcaggccgaaagctttctgatctgttcatggctcataaaataatttatggccgaacagatctgaatccctttgaaatacttaaaccttctaaacgctttaacattcccttttatagacttaactcgaaagataaattaggcaaaaaaattataccttttgcggggcgggtaacaaaaatttggaaccaactcgataaaaagcttattgaaataaactcattaaatcaatttaaaaataaaattaaaactttcatttctgtaagattgaccggaaaaataaaagtcgaattctcaatgtaagcggatttttcccttttgtggactttttctttattgacaaataaacaaatcaaaaagggctgtatttcaggggaggggatttaattcagtaaatacggtaataaaaaagacaaaaaaatgttgttaaagggataggatggcatggcttatgacttttactctttcctttctttgcctttgagtaagaacaacaactgatcaatactcgtgatcagtctctcttcccctttccccctcccctccatctctctgtctttctctctctctcccccctctctttctctcctccctccgctgtttcacctgtctgtccgagtcctccatccaattgactgagaaaaggtcgcccaggcaagtgtactctaagccgacgattggtgtgtcacagtaacaaccccaactcgactcgaaagcattcgaagcagtgacggcgaacactgagatcggcgacagaaaggaaggggaaaagtcaatgggcaaaaggggggggggaaggaaaaggagggtaattagagggtaattaaggggtgatcagaaaaatcatttattgttggtattgatgaggaagaaccgtttatttgctgtgcaattttctggtcgaacatcgatcccgactcgcaggcctccaaataaaatgtcatttggccatacattcgtttcgcgtgcattttttgcaaagtttgcgttaattcctttacggttaactgttggaagagaaagttacgatattaaaaagggaagaaagttacgatattttcagtgtaatcgccgccgtagggaaaagcgaccaaaccaaaagcgccgtgatcagagaagaaaacgaacactttgtcattgctggtgctaaatgaggaacaaataagcaatcaatcagtgggatggaattagaaaggacgaaaaccccaccaaaaagacaagcaaaattagccaaaagtaaaaataccatttttaaaaacaatttataaaattgcattttataaaaacgattgattttaaattacaataacaaaaaaaaataatattttccaaattttaaaaactcattgtaaaaggggagatgattggggagatttcaaatcaacatttttgcctgaaagaagctgaaagttggtcgattttttcttaaaagtacaaaaactaattaacttaccaaaaaagtaggaaaaagtcaaataaaatcatattagaaacttcaaataaaatgtaaaatattttttaatcattttaaggctctttgtgtcaccagaaaaaagagtcatttgaaagcaatcagttttgaccaaaactaattcaacaattagtcggactatcatttagctaattgccctttgatttatcgaaaatcagtccgactatctttactgatcatttcaaatccatcaatgttttgtgtacccgccttttcagcactctcttcccctccaccgcttcttcgtttccgagaagaatggccttgaaattcgccggtgtcacttcgtcgcctctgtagtcaattcgaacgcctaaataaattaagacgagaataagcaaagtttaagcaattcatcagaagcattgccttcgtacacatctttcattgtcggattgttgaagagtttgccggggtaagggtttctgaactcattagcacagctaattagggtaattttgcgaattggccgtgccttttgttgtgcgcaatgtcgtcgtaaatcatcgtaattattctgtccgggctcactccgtggtcgactaacacatgccacgcatggcaaacatccgcctgcaattagcagcaattaattggttaattaatggcgtgtctttagtgttaggcttttgctttgcctggtgcctgtaattccaccatccgttggaccccgcgaccaaaacggcccaaatgttttggtcagcggcgccttcctcgtccgattcggcccttttaatttaaattatcatttttatttaattaaattaaatttataaaaatactttgtccgagaatggaaaagaaatacaataacaacaaaaagaatttgcttattttttagcatttctttttttgtttccttaatttttacattttattttagtttaaaatttatattacatattagcaaagaaaatcaaattaaaagataatggaatacgttaattaatttgtgattgtattccgcggttttcttaccaaaaatggcgactgatttcttctcctgaaactgataaaatttaataagcgaaaaaaaggaaaaaagaagaattagttgaatgaaattgcaattaaatcggcaaaagataaaatgggaggaaaaataatgggaagaatttagaaaagaaaatcaaatcatcaattaatttgctgaaaaaaaacaaaacaaaatgatcaggccctttaaaaagatgtgatttcaattttgtttttgcatatttaaacgcctttttagacattttaaatttttaaattttaattgccaaattaattttgcttcaaatcattttcaatttatgtaaattcaaatggaaaggaatcacttcgcttgcgcactcgggatgacctcatttcgggaggtgctaattgtgtctgcggggattttgtggtgtgtcactccgttttcattcttcgccgccctttcgctcgccgttctcatgacaaatgacaaaatgacagtcattcgcccccccccccctcactttgtgccgatca

SEQ ID NO: 14458 - DNA, 1477 bp, Heterodera glycines
  unsure (1)..(1477): unsure at all n locations
actaaaaacatttgtgcgagaacacttcggtaaagcggacgattttcttgagaggtaaaagaaggagtgaattgttttaaaaagttcagaatttatttatttatttattcaatattattttaagcccacaaccgatcgattggaaggaaaatccaccgaaattgcaaaacattgcggacccagaattgaagacttttgcaaatcaactgcatgatctttggaaggaattgggcaaaaaaatgccagaatcggtaaaagggaagaaaggggaaatgaatgtttagcaatttcaggcgaaagaaaataagtcgacgctgatttatgttccgaacccttttgtggtgccgggaggccgtttccgcgagttttattattgggacgcttatttgatcgtgcggggactgctcgcttcaggtcaattggggggagtgaattagggagtgattgggagggaatgccaaagacaaagtgatcggagaaaggcagtaaaatgatcggaaaactgatcagagagaagagaggggatgagtgagtgtcttttgaattcaaaattcacaggaatgaccgaatcggtgaagcacatgtgtgacaattatgccgagatggtcaagaagtttggctttgtgcccaacggcggtcgcatttactacaacaaacgttcgcagccgccctttctcactttgtccgttcgtttctcataattttgggaagtgcctttagtttttgtaagacgatgctttttgccaattatcagaatatttgataatttttaataatgttttatttcctctatcagcatggtcaacgattattttgcggagaccggcgacacggaatacctcaagagcattctgccggttcttgaaaaggtccgttggaggggcaaaacgaaggcccattaaaattacaaaggcatcgaaagagataaagtcatttgctgatttgtgttcttttctgttggccttgggttgtcttcttcactttctttcccttctcatccatttttgataggaactccaattttggcgcacaaaacgatcggttaaagttaatgcgaaagggaaggagaggactttctatcagtacagagcggaaagcaacgtaaaagtggcagggcaattggaagaggcaacacttttaaggtgccccgtcccgagtccttctgccaagatgtcgacttggtcagggacatcccggacatggcggaaaagaagagaatttggaatgaactcgcttccgctgctgagtcgggatgggatttcagctgtgagaaggaaaagggaaggcggaaaagccgaagacaaattcagcgcgatggatcgagaaggacgaaagtactaataacgagacgttacagtggaaactgaccagactaatgatcaccaaaattgtgccggtggaccttaacgcgttgatttgtggcaatttggaaatgctttccaattagtaccaccanaatcggtgagtgtccgcagaa

SEQ ID NO: 14459 - DNA, 957 bp, Heterodera glycines
  unsure (1)..(957): unsure at all n locations
attttatttacatatttcgcgctttttcttacataaacaatgaagccctgctaatgagtgggcataaatgcagcaattgcagataaaattttgtcaattggataagctccttggcgtttgcaatctgatttttttaaattttggtgcggcctcgtaacaggaaaataccgaatatttttattaaaatatttatttggccaaaatttttatgaatttataatatttgtatcacaatgatcacttgagtaggtaatagggtcgaggagcctttttctttggatatattgtgatttaaagttatattatatcctacccaaacaattgatcactgtaataacattttacaaattcatataaattctgtgattggagcttgattaagtattcaaataaaattaattaatatatatttctttttattattaaataatgatgtggctattgattaaaaatattatggaattttggttaacaaatttaattcatttcctattggcgattaataaaaggaagcaaaaaggtattcttcatatgtatttttattttttcattagatggtaaacaacggaagtttcattagtctgatgcaacgccaaaaatttccattaccttataaatttcagtataaatttgaggagcaaatttgaaaatattcattaaaggtttgataaaattttattgaattttatcctttgaaataaaatgaattttcctttatttattattatttttatttttaccttcacaaaaagtgctaaaagtgatgaaaatggtaaaaacaatgcattaaattaaaacaattattatttttattaaattatatttagttttcatattttaatttgcaaatttaacatttaaggcaacgcaatacaaaattatgtggaagacgcatttaaaacactggcgaagttatagttagctaatatgcattgattgngctttacacgcatgatt

SEQ ID NO: 14460 - DNA, 3241 bp, Heterodera glycines
aatattatttcttcgttcggtttcgaatttgtaattttgcctaatttagtaatcacattgctcaatttgcccccgtttcgcttcttccgtctccctttccaagagaagcgtttgagaaagcaattgctgttcaggaggtcaacgaataaaaatgcataacaaccgtcaattttataaaatatttaatttaattagattaattaattaattgattaattaattttataattaaatgattaattaattttctttccaggccatgcaattgctttacttccgcgtcggctgcgatttcgactttttgttcgaagcgtacaaagacgtggtgaaaacagacaaacaaataaaacagatggtgcacattttgcgagaagtgcaaaagcagggcataaaacagccgcagacattgctgataatgagatcggcaagcaaattaattattgttgattaattaattattagctaatttgggatgaaaatggtcaattaaatataatagcaatttcattttttgtttttgtataggattatatgctgaacaaagtggggagcaacacagagaatggaaatgatcactacgagattaaacaggcaaaaaatattgagttaaaattaaaaaaaaattaaatttgaaatttattttcggatcgaagcgaacaccggcgccatcggcggattgggaaatgatcggcggacaagcgaattgcaccagagactgttaaaacgcattggcatggacccgacaaatgcaccacaaaatgagggcgacgcacatctgatcaactcactgtttatggcatggtaaagggggcgaaacagctgaaaatgctcggaaaggatttaaaaattattatttgtaatggcacattttcaggaaattgtataaatcgggaaattttttgaaatttaaggaaggcttttgacaattgcgacgctcttttggtcattttgacgcatgtcaaattctcctacaaatacgaactgcgcaaaattgaagatgaattggaccgattgtctggtggacaattgcgtgttgcttacgtttcgctgaatgacggatattatgagtaaaagcatttaaatattagtaaattaatattttcaaaggtttatttggtaatagtaccgatggtagtccgtcccgtccgtccccctttttcggaaaatgaaattttagaatttttttttcgagaaaagaccgtataagggggtttaagggtcgaagaatccgaatctgacagaaatttcgacctatatctaaccccgaacccggattcgaacaaaagtcgaattcaaattttaaaatttctctttgttcctttaaaaatggtttaaatgatctttttttaaaggaatgttgacttttagtttgtctcccttccaaatccaacattgttggtatcattcgaaagcttaatctatttagaagtttttccaagatattgcgttgcgattagacaattgttaaaaaaagttatacatgaaaactgcgaaaaagtcgaaatttttgaagttttttcttaataatttttttccaggctttaaaatcttttcgctttttgtaaggctaatagagcctgatgagcttccgaatgataccaagattgtcggatttgttcgacaaagaaaaaaatcctagtggaaaaacatgctggggccctaacatgccggctcaaccgtgccgaccaactgagctactccgctccctatatgtcagccattttaagatcaaaaatgaaaattcgaaaattttcattttcgactttttgttaaaacccggcttcggggttcgaaataggtcgaaaattatgtcagattcggattctccgacccttaaaaccccttagacggtcttttctcgcgaaaaaaattcattttctgaaaaagggggacttacccccttcggtactattaccgtttattttacacatttactcactttcactatgaccgaattaaagacaaaatttttagttttaaattggccgctgattcttcgcttttgttaaatggcaaagttgttggcgttgtgtattccttgatttccgcacttggctataaagcaaatgaagaagcaatggaagcacggaaaatgattgaattgtcgacagcaattgtaaaaataaataaataaaataaatcaattaaaataaaatggaaaaactcagtgaatttttatagtctcactgacaacaacaaacttaatctaaacaatgtcatttgaaagtgctcaatttgctttaatttttagaaggcgccgtcgttggcaattgcaattagcagttcgaagaaaatccaacaggtgacagcaataaaagtccattaaaataacaattaatttaattgttcagcttctcgcctcgcctggcggtgttgagagatttttccccgaccccgcagaagcggacaaagtgaaggcaatccgcgaaattttcaccggcttatggggcctcgaagggcatgacgagaaaaccgaacggatcattgcggtagaggtgaacggcaataaacaataattaattaattgtttaggatgccatcgaaaatccgtcaaattacgtgctgaagccaaacggcgaatgcggcggaaataattactacgacgaccaattggttgaaaaactgcgcacaatgaccaacaatcaggaagaacgagctgctcacattttgatgcaaaagttacacccaatgatcacaaaggtgagagacacaaaacggtggtgtactgtaagagtgaatcgttgaaaatctaatacggtaccggaaaactgaagtacagttgctattctttttgaatgttttgttgaaatttagaactattttcttcgtccaaccattttgccacggttgggcgtcgttgtcagcgaattgggcgtgtacggtactctgatgggaaatatgctcgaccgtaccgtatcgtacaatgcgcagagtgggcatttgctgcgtacaaaattggccggggtaagtgcaaatggcaaaatcgtcaataaaaatccagtttttatttttatttatttttctgaatttgtcacatttttccccgcaggccaacgagggtggcatcagtgttggcaccgccgtgggcgactccccctaccttttttaggccgatggactccgaattgataaagtggcattcccttcgttttagtcattatttccttttctttcggttcttgtccgatgatttgtacaacaatgcctattaatttatttttgaaaaatcttataataaaaa

SEQ ID NO: 14461 - DNA, 873 bp, Heterodera glycines
ctagcttttttctctcgctctcttccaccacccccactctatcatttggccaatttttgtttatttattttttttattttaatctttagtccttcttttcccattgctgccagctgccgttgtgttcttgcgtcagccgcgcacgattctcacgaggacgcaaaaaaaaaaattcgctcattttctcctctttttgaactgtaacactctctgccctgtctgactgtctcgcttcctcaactatttcacaaaattcgtctctctactatcattcccgaacgcattcataacacacattttgttgtctgctgccagctgcgtgcgtcttccagtctttttggccattacatgcgctgaattttgtgccagccgcgcacgcttcccatcacgttcatttgttcctcttttttctctatctctctctccctctccggttttccatcgtcgtccggttgccgttaatttcttgccgctgctgctgccagccgcgcacgcttcccccaccggcgcggcgccgttggcccgtcccccttttcatgctctcgagattttgacgacgtaactccgttcttcatgcgctttctgttgtgtgtctgtcttgcatgcactcgcaactcttgtctctgtttcttttcccctccactgtacatgtttcaattttcctccatttctccgtgctcctacataaaaaaaaaatatctcctttttttttttgcgctcccctctggggattcattttggtccccattctcgttttgtgttctgtgtctgtgctctctaacaattaccttctttctcgactctctctcttttctctctatctctctctcttctctcgcacttctttctctactctctctctcttctctctct

SEQ ID NO: 14462 - DNA, 2228 bp, Heterodera glycines
  unsure (1)..(2228): unsure at all n locations
tcgagttctctgaccgactggtgatcgaaactttattcatatatctgtgattattactgtgattgccaaaatgatcagctcttttctaaaacactgattctgacaccattttcttatccaaacggatcattgtgaccagtgataaaatttgattaggatcaaatgacccaaaaatagattatccttaaaggtgtatcaaacgacataaaaacataactccgatcactctgttaactgatcagcagtcagacatctagctgcacataactaccaaatgctttcaccatccgccatttccaaccatcgaatgctggcaacaacggtgatgatgatgacgccgttcggttcgccacaaacaccaatggcatttgagccggctggcagcaattgtgccaatgttgtcgccaccaacatggcacaaccgccgccttcgaggcgctcaaaaaagtcacggcttgactactccaacagtctgtgtgccatttgcaacgcgccagcagatggttggcggaatatttaaatttggcattcatttggcatcgttaactcaagggcatactgtatatatttgatgagtaacataccgtagttgttgattaatattgacataccatattttgagccgcgttaattgatttggcataatgtcaccaaattaaaggtcttcattatggcgcaatctcatgcagaagttgtaatgccttttttcggcgttctgtcacctacaaacaggcaataacattcagttttgatctaattaagtaattaattgcccctaattaattactttttaattaacatcaatttattttgtcagcattttgtttgccgcaagggtggcaattgtgatgttgacgtgagtgtgcgctgtgcctgcagggcgtgccgtttggcaaagtgcaaattggccggcatgcgcgacactggtgtggcatttgaaattattaaaaagggaaaaaaataaaataaagcaaataaaaatagacatttgaattgatcaattttgtatattcatatatgctaagaaaatcaattaattttttatttattcattcatttcttttcatttttatattattttttaaatattaaaaattaaatttaattcaaaaagttttatgtaatattttagaaaattgaaaaaaaatatacgaaatgaacttaaaaattgtcaataaattctcaaaaaagggaattatccgaacaattatcaaaaattatattataaatttattttcaattttttcccacttaattaaggcaaagggatttttaattaactaattaagtatctttttttaaacgatgtactacatttttacatgaataaaatagatgtacaaccgaagcgggatccgaccggcagtcaaaagaatcgtcgcgcaccccaacggcgccggcataccgatgtgctgaatggcatcattgagggccgcgttttgaagacggagatgatgccgtcaagcgtcgccactgactgtaagtttaatgattactactgtaatcgactatgtgtgagttgacactatatgtcaataaaatattatttttaactgagtgaattggtactgtaaataatgagttactttgtattggtgggtttactgtcattagtgtatttggaactactgtcatcagctgatgagcattataacgattacagtaaattgattaacggttttgttggttttgctttttattcgatacctattaaattgactgctttaatttaagtcgagattaactgtgaattgtttggttacttttttattgattactgtaattggctttaattatgataaacttcacttaactttcacatataacagtttctccgaacacgttgctgccctccgtggaaagctcaatggaaaagcattacacaatgccagaaggtaaaatttaaaatttgttaattaaaatatttaaaaaaaaattattgaaatttcagtgaatgcatgccatcagcaacaaactttgctatcctgctgcccgccctcaacggcacaacaaaatttatgccagttgaaaaaccaggagcagcacagtgattccaggtaaaatttggaccaaatgctgattaatttgaacaagaatttgcaaaataatttaattatttatatcaaaaatttatttaaaacacattaaacaaagtatttaataattatcgaaaatttatataaaatacctaaaagttattttaaacaaaantttaataaaaaagaaat

SEQ ID NO: 14463 - DNA, 2258 bp, Heterodera glycines
tttatataaaataaaaaaaaattattttaaacaaaattaataaaaaagaaattagattttttggtcggtggcagatattcagcgctattgttagacctttaataattgtaaatcctttttcattgatgatttaaaaaaatccggcaattttcaatacaaaagccaattacttttaattggtcacataatttagagcggataatgcggcaatccaatttataaaaagtatcaagcgcgaaacaatggatgacgagaacgatggagacgacgtggaggtggaggtggagcaggacgacacggcggagcggctgtgccatgatgccatggaacagccgacgacaagccatggtcctcaacggcacattgtggcatcaaatgttggcaatgcgcaacaacggcatcagttggcacggcaacaacaattaagcaacacggaggaggccgaacagcgcgaatttgacgagtaagtgttgaaaggtggtcaaataattggtcatgggtatggtattgggtgttttttacttggtgaatacggtacagactgttcggaataggccatttttatataattatcatgataaattgcttaaatagagcccctccatatgatggttgtatgattccgtattttcctttttttgagcaaaaatattttttgggcttatgtgcctaatttaaagaatagctaaatttgtcttaattattagtagagaccgcaaaaaaaggcaccaaaaatcgcgaaaaaggcactataataggcaccaaaaattgaaaaaacggcatgaaaaggcacgaaaatcccgaaaaaggcatttaaaaaaattttttctaaggtttttttagggagcaaaacacgtaaaacttaaccaaaaacttaatttggtcatttaaatgattattaaatattttataatgtttttcgaataaggaaaatttttaaacctaaaattttttatcaagaaaaaaaaatgaaattttttgagaaaatttttcaattcttaggggtgtattttctgaaatttttcaattcttagggatgtattttctgaaaatttttcaagtcatttcttaggggtgttgttcccgattttattccattttttaatggaatttacggaaataacgccaaaaaaggcatcaaaatcggaaaaaaacgccaagaaaggcaccaaaacggcaaaatgccaaaaaaggcatttaaggcacgaaaatcccgaaaaaggcaaaaaaaaaggcataataaaagtcaacgtagaagccctcaaaccaagtggaaaatgcgttatttatgcttaatatatcgaaactagtacgcagaaaaaaaaggcatatgcctcaaaatgcggtttctaattattcgatctttaaaatatgttgggcgtgtgaaccgttttagaaagaatatacgaaagaaaaattgttagaaaatctcaaaaaattaatttaaataataaaaatttaaaccaatcttgttgcttctccttttatatgcatgtagttgtttatcatatgtttaaaattttccggaatttcttaggaaatttttttttttggcggtggcgggggattaccttatttagaatttttgaaaactcgaaatgtcaaaacaataatttgcaaaaattgccgaatcgtttcccatatattttgcccaagcatttttcaatttttaaatgtttcaattttgtttttagcctagtacggagctatcaagaacatatgattttgatgcacagggcaatgacaccaattgaagcattttggtgtgcccaatacggcgaagtgggcaaatttatcacattggcacaaattggcatgccgtaatttagtgccaaaaatggagaccaatggaacccacggatgtggacttgttgagtaaagtcgaattggtatgggtaaatttggcaaaaaaaaagttttaattttagctattatttttttttcgaattattttatgcgaattttagcggcggattgttcgataattgaaatatttattttttttttaataagaattattatattaattttttatttccaaaataataataaaagagaaattttgaatatttataaacataataaataagaaaaaattatcttaaatatttaaatgtttaaaattatttaaataaatttctccataaattactcagggtggtctgatgtattggatagacaagctgaggccgttccctgatctaccagcaaatgctcgaaaggtactgttcaagcggtactccgttcgaaagctagcg

SEQ ID NO: 14464 - DNA, 1691 bp, Heterodera glycines
gtaaagcgaatgattagaggacttggggacgaaatgtccttaacctattctcaaactctaaatgggtatgaagccagggttgcttgactctgaacccagtcgttgaatgtttgagctccaagtgggccatttttggtaagcagaactggcgatgtgggatgaaccaaacgtggagttaaggtgccaaagtgcccgctcattagaccccataaaaggtgttggttgatatagacagcaggacggtggccatggaagtcggaatccgctaaggagtgtgtaacaactcacctgccgaatcaactagccctgaaaatggatggcgctggagcggacctcctatactccaccgtcattggcttgtgcacgtgcttgtcgcgtagtctggccatgacgtgtaggagggtcgtggtggttgcgtcgaaggctttacaccccgaccaaacaaaaatttctgagcaatttgaaattgtcaaaaagttcaacagaatgaaaaacaaaaatccatttctaagtgataggaaaatcatgcaaaaattgggaataaaaggtgccaatttgagaggatggaagaaaagttcgatcaaatgaaccaaaaatagataagcagagagcgagagagagagatggagagagagagagagagagagaaagagagagaaggaaaagaagacagacaaaagggaaatacaatgggaacatttctttttgtcgcgtcctttattctagcccataataaatttcttatttaatttaagaatattctctcattttgccgttttttttatccctggtccttctgtattcggacgatgaaatctttcgccttttactaaaggtttccgtgcaggtggacgcttatgggttaaacccaatttttggacagcgctttctccagggagggcgcgaaaatttattagaaaaatcaataattatcttttcctcacccggcataagcagccaacaaatgccaaatggcatgcaaatacggcgtgccaagctgaagccacaggtcgcaaatcattttgtcggccagccaacagctcactgccattatccatgcgaacaaaatgcgtttagtcaattggggagcctcggaaatgccaccttttctgagtagaaatagcaaaactatttcacacaatttcaaaataaacttttgccaaacaaaccgagtgccctcgtggtaaatgaaaatggcacaaggcaatgaagaagctatcaaaacgaatgcattcactgccggttcaatgaaaccgagaacggacaccgaaacggacaaaagaatgacggccaaacgaaagtgaggcctaagggggaaaagaatggtcaattagtgggaaaaaatcaataatttaattattttaaactcatcgctggagcgctcaggaattgttgtgcttttctgccaagactaaaagtttatttgtaattaagcagaatcctcaattcggattatttgccttttctcgccacatttcaagaggataattgtcgaatcgaccgacccaaggtagccgtagaataagcactgatttaaatcattaatttagacatacaaaaatgtttcagcagatagtataattccttactagaccagaatttttcgagataagttaggattctaaactttttcgatcgatatttttcaaaaaaataacaaaaaaaaattaaatatcgaaaaactgaaaata

SEQ ID NO: 14465 - DNA, 963 bp, Heterodera glycines
cccccccccccccccccgggggcggggccaggttttttgggtccccccccccccccggactttgactcccgcaacccccgccccccggcccttcccccccgggggggcgcgggggtgaaaaacccacccctaagaatggcatattcgtgggaataaggcaaaaaacgtagacaattttgattttttttaaccattttgacaaattttttatgaattaaagttaattttattattgttcattgatgtgtagtgttgtagtggttagtgaatcaacattgacattactttctgtcgtgagttctattcacgttgacgttttcttttttaattttaaaattcgcctggcgctgcctatcggcatcgcagggcccaaaaattcacaaatcttattaaaaaaattctctaaaaattgcaaaaacttataattttttggacaaaatctattaacagatccatcagttttcaaaaaattttcccggcggcgcctatcggcaccgccgtccccccaaaaccctattttttttaaaaaattagccaaaaacccttaaatttggttatttttaatgcaaaaatgaattagattgaggcgatatattataaaggaatgtggagcccaaacacaccattcataaaaattaattttttgtgggttttttttgctgctaattcaaagcaaacccccgccccgtccccgggggcgagtcatttcctcacacccgaacccgtgactctgttccacgctaaccccaccccgcaaaaagtcacccccgcccacggagctcgaaccctagttattactttgaaaaaaaataacgaaaagcattcaaaccaggagggcgtccaaaaattgtatgcgaaaggcgtacaaaaatcgtacgcccctgcacggagcacgggaaatggaaaaggcagaaagaacaggcaaatggaagaggatatttttgatgggttggaaaaggagag

SEQ ID NO: 14466 - DNA, 2888 bp, Heterodera glycines
tttttatcgtttatttgaaaatggcattttcacttaacaatttaattttaaaacctaaccttccattttttcttttccctcacaaatttttttacgccgctcaatgaattatgtacggacaacagagatcaaaaccaattcgccgtaatcgtatcgactaattcattcattatacaattaaataaattgtgaattgtattttttaacgttagaaattttggtggattttctacgtgttataagttttaaaaagtgaataagtaagttattatggatgagagaatttttacgtacaaaaaatttattttatgaaatataaggaaaaaatttaaaaaaaaagaggagacttttttgctatttaatgaactttttctgcaaagtttttttttcaaaatttacaattagcacgatacaaaaagtaattattatgcgtaagacattacttaaatatatttaaaattttgaattaaaaaatattttcagaaaaacatcttgcccaaaaaattaaaaacaaaaaatttgacatttttaagatattttcaaaaattaaaacaaataccaaaaatggctaaatttggtactaaaaaaatttggcccagcgaattttttaggaatatcaaaaatacggttttttgcattttgttctgattttgaaaatttctgctttgaactatgtatgagctataaacttctcactttttgttatttttgagtttattttattttggctttttgagaaatttccttaaaatggaaataaagtaaaatttacccttaacaaataagagacttgaacaaaagtcttttgaataaaaagagcattttaatttaaatttaggttaatttgaatactttcaaataaaaatctaaaatttttaataaaaataattttatattttcacgaaaagcatacattgaggcaccaaattgattgaaatgcaatccatcttttttaaacgtgtcataattcttttcttaatttcctttctaataaacaacatttatatacattctttaggtttaattaaataatttattattatataattttatttattcagttatgaattactcaatttttgtgtctgtaatttttgctgggctaattattgttggtttggatggcaccgatgagaatggtaaaatggagaaaaataatggcaaaaaaataatcaaattcctcgaggatttccaagaaaatgacgcaaaagatgagaatgatttgcagattgactttaacagtgaacattctcgcgaagtgacacaaatgaacaatcgaaattttatcagtgcgaagcaaatttttaaatttttgtttttatttaaatttttttcagcctttcttcgcggaagctcttctaaggcatctgataccccgaagcctccttcttcggcatcggttttattgccaaaagtgcgaaagtttttagaaggaggcacaccaacaatgccatactatcaaatgccatttttgcagcaaaaggtatggcccgccaagggcaaagtcaataaaagatttttcaccaaaagagtggaattttttaaaatagggcaaacactggcaaatcgaccggggaattttgttacatttattataataaaaaataatttaaaatgaagggaataaatacattcaaatttatttgtatgacaaaatttttattccgttttcgcgcgagtgcctgttttagcattagaattgttcagaagtatatgtatagtatattcaggttgaccaagtttttttttcttctaattcaggataaagaacactaaaattcagattttttgcaaaacaagggggtgagcggccaattttccaatttgccatgggtccggccatgtaaatctatgatcttttttttgctttcaacaccgcttattacgcggcgcgttttttccaaattacaagaatcctattcttaccagtgcaaatttttaccggcggtaccggtactagacaaacaggtaccggcacatttacttttgaaaaaaccggtaccggtacatttacttttgaaaaaaccggtacatttacttttgaaaaaaccggtaccggtacatttacttttgaaaaaaccggtaccggcacatttacttttgaaaaaaccggtaccggtacatttacttttgaaaaaaccggtacatttacttttgaaaaaaccggtaccggtacatttacttttgaaaaaaccggtaccggtacatttacttttgaaaaaaccggtaccggtacatttacttttgaaaaaaccggtacatttacttttgaaaaaaccggtaccggtacatttacttttgaaaaaaccggtaccggtacatttacttttgaaaaaaccggtaccggtacatttacttttgaaaaaaccggtaccggtacatttacttttgaaaaaaccggtacatttacttttgaaaaaaccggtaccggtacatttacttttgaaaaaaccggtaccggtacatttacttttgaaaaaaccggtaccggcacatttacttttgaaaaaaccggtaccggtacatttacttttgaaaaaaccggtaccggtacatttacttttgaaaaaaccggtaccggtacatttacttttgaaaaaaccggtaccggtacatttacttttgaaaaaaccggtacatttacttttgaaaaaaccggtaccggtacatttacttttgaaaaaaccggtaccggtacatttacttttgaaaaaaccggtaccggcacatttacttttgaaaaaaccggtaccggtacatttacttttgaaaaaaccggtacatttactttttgaaaaaaccggtaccggtacatttacttttgaaaaaaccggtacgggacatttacttttgaaaaaccggtaccggaacatttacttttgaaaaaa

SEQ ID NO: 14467 - DNA, 2000 bp, Heterodera glycines
aaaccggtaccggtacatgtactttgaaaaaaccggtaccggtacatttacttttgaaaaaaccggtacatttacttttgaaaaaaccggtaccggtacatttacttttgaaaaaaccggtaccggtacatttacttttgaaaaaaccggtaccggtacatttacttttgaaaaaaccggtaccggtacatttacttttgaaaaaaccggtacatttacttttgaaaaaaccggtaccggtacatttacttttgaaaaaaccggtaccggtacatttacttttgaaaaaaccggtaccggcacatttacttttgaaaaaaccggtaccggtacatttacttttgaaaaaaccggtaccggtacatttacttttgaaaaaaccggtaccggtacatttacttttgaaaaaaccggtaccggtacatttacttttgaaaaaaccggtacatttacttttgaaaaaaccggtaccggtacatttacttttgaaaaaaccggtaccggtacatttacttttgaaaaaaccggtaccggcacatttacttttgaaaaaaccggtaccggtacatttacttttgaaaaaaccggtacatttacttttgaaaaaaccggtaccggtacatttacttttgaaaaaaccggtaccggtacatttacttttgaaaaaaccggtaccggtacatttacttttgaaaaaaccggtaccggtaccaataaaaccagtaataccggccggtaccggtaccagtaccgctctaccctatcgaaaatattaaaaaatttcttttatcagttgttttttttcgctaaaaataataaatttttgcttaattccatttttcttttaaaatgattcttatatttagctgtttcttacttttacttcacaattagcgaatctgaagaaattttgagaacttataccttatgcttggaaaatatatctcccatattttagtcactttatttccatataattatttacacggtgttaggtcgaagtccgaaaagtgcaagtgtgggcgtagtccaaattgggcaaataattaagtttagcttaaaaataatatttataaaatgtttttttatttttatgttttaaaacatttggatacacttttgagctttttaacctagaaatttatttttaaatgaagttacatatttgttaatacgtaaatatgttttaatgtacagtcattgtcatatctttacgacacccccattttattccgtaaatttgtcaaatgacggtcaatattaacaatcttgatatcaaaaaatgccttaattaaaagcgcagttgacttatttgcgcattttttggaagaattcagttaaaccgttaaaccggtttaaaaagtaggcactttctttttaggtagtaaaacacataaaacttatttaattttgtttaagtatttcatttttaaatgaaattattaaaattttatatttttgaataaggaaaatttttaaaccaaaattttttcaaaaaaaaaatatatttatattaatcattttttggaaataccatccctattgattaattaaaatcattaatttatctttagatattttttaaattaaatttaatttcttgccctattcggatttcgcccacacttgcactatacggacttcgcctaataattaggtcactttgttgaatcaatcagattcccatgaattggcaaaaaatggtcgtacctatcaaccttgatatgcagcaacaacaaaagacgaacacagctgaagcagcaaaaagcattgcttcatcagtttcaacagttggggcaatcgcaattccgaccaaaaatgaatcccgaaagaaaaggcccccaattggtcggtaattgttggcattaccacaatggcttgttcagggaaattagatttatcatttttgggattaaactaaggccgcattccaatttaagcatcagccgataaaaattgggggggacgaaaacacactgtcgaaaaaggggaaagctcaa

SEQ ID NO: 14468 - DNA, 3667 bp, Heterodera glycines
  unsure (1)..(3667): unsure at all n locations
taaatagccttcgaaaatggaaaaacaantttggagacaatatttaattcaaaggtaaaattaaaaataaaaaaaaaattaattgaaagatgaagtttgctgcctttgaaatttttcaaaaactgaaaacatttcatttagcacttttaattgaagaaacagtttgtatgagaagaaatgaatttgaaaatatcaaagttgcttgaagaatgaaattttgattttttttttgaaaagcattaggcttttcttaaaacccgaataaaaatttgtaatttttggcataatattcagtttgttcattattatttatattattatttcctttaatatttatgtgatggttaaagcttaaatggattttttattgaaataacaattttctccgttccccgagaatttaaacccccgattgttcggggaggaaatcaattttgaataataataaatttcgaagcgttaatttttgtttgtaattttgaaaattttttcgatcataaaatgtcctgactggttttttacactgctttggtaatcaatccattaagatgtaattttgtttacatctataaaataaaatattttttcgttacaaaattatgccactttttttcctacaattaattttttttattaaaagtttttgccaattaacaaatgaataggtggtacaccaagggaaattattataaagaatgattttttgatgttttctttatttataaattattcattaacaaatataaattattattcttatttaaaggaggcccttattttgttgtgataatgttttaaaaatagctttgttttcgtccattttaatcaccgtttcactacaaactttcaattaacaaattccgatcacttttaattaaattttttaagttttatatactgttgtgtatttacaacaaataaaaatttttgtggacggtgaatttgcaaacaaatttattggagaaaaacagcagaaaaattggtcggaggaaataacctaacgagtcggggtcgttttggcgccgacgttttggcgctgacgttttggcgcccatgttttggcgccaaggtcgggtttttaaattttgtctatgtttgaataatatgaaaatatatattctttggttttctgggtcgctaatcacgaatatggtattcattttgacaactgcgaagcccgcactcgatttcgaacaaaaagggtttttgaacatatagatcagggattgtatcagttttgttttatcagaactgttttaatttggagggtccaaatcttggggtagtgaccaaattttgttctaatttcttaaatataccgtcaaggttatgtttataatcacaaacttttttgaaattttaactagtattcatcaattttaccaaaaaaaaatttatggggtttggaatttttttttgaaaattagagtaagcccattggaaggtaaaattttttcaatttttttttgtaaaatttttgatcaaaaaatttacccttttaaggtatatggcttggcgccaaaacgtgggcgccaaaatgaccctttcccacacctaacatatccattgtttttcacttcccaaattagttgagataatgtctcaaaagtagcttttctttttcatccattttaatcaccgtgttttcactgaccaattaattaccaattaacaaattccgatcacttttaattatttaatttccatcatttttcacttcccattgatcacttccgctttgatttttgctgcaattcgtcgcctcacttcgtccacttcactgttttgttccatcaattcacgtgctgcttttgctgtctgaggacgcgaatcgtttatttgtttagcggcctccttaaataattttgtttaataataaatcaaaataatgattattttttaaaataattttaaagatttattatactaaaagcgaaaatagaatatatataaataacatttttttaaaccaattaagtaattaatagtttattatagagtatacaaaaggaacatttaaattattatttaatttttaatttattttaattttttaaaatttgtttaatttttaattctataaaaaataattaaataatttttactaataattgtttttcgcgctcttgactttttttcttcaacaatttgtccctctgttcccgtaaatattgccttcgatcacttaattggctctcagaaatgccatcacgctcctttagtagactctgttgaaaatataaatatttaatccgataaattattatataaaatactatagaaaattcttacacggtatgcaaaatcgccgcccttttggctgtaaaaaaaaattaaatttacttatgacattttctctatttcatagaaattttttgaaatttattatttgcaaatttacagtttcgttcttcatttcttttctttgttgaggaacgtggatttggcccaaagagatccgcttttccaccagcttaggcggctttggattttcctcattaatcgatggcttttcctccatttttatgtaatttgcattttcattgagcaaatccgccgcacttttccgccgtttttcaaccgagtttggcacaattttcaattgtgccagacttgttgctgttggccttgtgccactcgtgattggtgaagggctaatgatgaaatttgctttttcgtcaaatttcacagatttttcggcattctctaatttttgtgctgatgtgcctggtaatttttctgcttcttcgttgctcaattttaacctactgaatgaatgagcactctaaaaaagaaataaataaatcaaatcttttttaataacgaaataattaatttttttttgctaattgaaaaattcattatttcataaaaattaaaaattattttaaaatattattttgaagatattaaataataatttgtgaaaataagctatcaagttcacaaatttcaaaaaaaaattttgttgggtttttccctgtttatattaaaaatatctttttttaaattaaaaaaaactataaaaaactaagaaaagttataataaagcctttttcctttagagtttttttaataatgataataaatcaatcggttgcttcaagaagaaactcaaaaaaagtttcctttttgacaaattgcatacaaaaaaaaaaccctcaaatttttatacattattttaaatttcatttattatttaaataaataattatttttttaaatttatactttattcagtgcttgttccatcaaaaattgttctctcctacgcatttgttccagtgccgatttgtccattagactttcgcgaattgccgcctccatttgtgaaagcatttctttttgcatgcgctgatcacgttcccattcatcacgactttgtcttaattttaatttatttttattatttaaatatataaaagtttttgtaattttttttttaaattttttattacttgcgaaaaatgtatagaatgttttggttaatgaatgaggtatcaagctgggatctaatcataatcatgaaaaaatacactatttatattaacataggtgaattaatttccaagaaaatttaggaaaataaggctgtattcctcccagaaaaaaacaaaataaaaatgggaggaaaaaactggcacttttcgaaaaataggaaacaatt

SEQ ID NO: 14469 - DNA, 2549 bp, Heterodera glycines
cattcattaaatataattagagtcgatcaaaaaaaaacctctgtgactgataaattaaataattcaattcacaaaataacgatgccgtccagttaactctaatgtacgtcgggacgcaattcatttttaattttttgcatcacttctcgccaattttctccatatgtagtagacactgccggacgccattgatatcgttttgtagagctcatcgagctgtacaaataagccgctgataccggcacgctcagcttgggttggccatcgaccgggtcggcggcgaggctgagtgtcctccggcagatgtgcccgacccatgacgggttacaagtgagttgatcaaaaaccggacccggcctgggagatagcccttgaaaaactgaaaaaaaattgttcttaaccgggccggttcggattccgcatcaggcactttttgtgccccgaaagtggtgcgatcggcttccggaaaatgaccaatcaatcacaaacacaagaactgacagaatattagaagaaagaaaaaaaaattcttttaaattagcaaaaattaaaatgtgcataatatttaatagaaaataaaattgtttctcctgagatatcaatttaatatgaatttttattgcctgaaaatactaaatgatttttaaacttttaaaaatatttcaaaatctaacatcattttatatataatatttttttaataataagagaaatcactaaaaaataaatttattatcaaactaaaataagccactgattatatgatttggttcatagattccaatcatgaagtcattaaatatatgtttcgatttgatttaaaattaaaaaatttaatatgaattggttgtgcgcctgagataagaaaaatacacaaaatatttttagtcgatcaaatttaatctgtgttgagtttaaagagaaaaaatattatacaaaataaataatatttaaaggaataataaaaagtgaataaattaaatgacaaatttcaaacttttactgattaccttctgcatttatgtgaaatttacttacccactccacaaattcgaaaaaaatttcgcaaaatgaaataccagaactatattaaaaagatttctaaactaagagcaatccttttccatcaaattaaaacttataagcacttaaaaaaaaaagattattgttttctttgtaagaaggcaaaatttttaatcagaaaattccatgaacttaatacgaggaatagtgtcttccgcacctagactttttaaatttgttcgaaacaattccaaatttcaaccaaaatccctaccttaaaatataacgataaatttgaaacttcgtcgcaagaaaaatgtaaagtcgatgataacaaaattatttaacgcaaagattttaaataaatgattttaaaaaatttgattaaaaaaattcacaaaatttatttattttttaaacaaaaatgatttttaatgtttatttaaaaaatcaaaaggaatattaaaaattatcttttaataaaaagaactaattgtccgaaaaactatatcgcgggataaaaaaatagaataattattagtaaggatgaaatttttaagttttaaaaactgtcaaaataagcacgtcttcggcctaaaaaactccaaaaataaagaaaaaattcttcttctttttttctaaggtgtatattttttgtttttattgcatttttttaacaaattgctctctaattttcaaatttttcccctcagcgcctatcggcaccgccagaccccttaactcaacaattgtagtaaaaaatgatgtgccaaaaatagttctgatcataagtaagtaattttaaaataaaatttaaataaatctatttctcatttttgataaaataaaagtggattttattttagttttttttttgttttctaaaattacagaaaaattgttttattttactataattttttcacttggaaaaattatattaatttttatttcacttctttgaatatatagtaattaccaaatagttttgaaattatatttttgtttatacatctctacaacatttatctttataaatttttaaaaaaattatgctaaagactaaaatcattataaaaattgtcaccttattgcaacgataattaaagaaatgatttctaattaaggatctaaaaagaaataataaaaaattaataaaattataaataaaaggtttcaaaatgaaaaaatgatcaccataaaaaaaacaattttgaactttattaattattgttaataataaataataaatgaccaaattaaaaatgagaaaaactttaattaaataaattcaaaatatttttttgttattaatacttttttctttaagttcatttctttgaatattatagtaattatttaaaaatttgaattttatttatcttaaagaaaataataaaaaatcataatgttgaaaaaatataaaataaaacaaaatcaaaattggaaaaataaattatctaaaatttacattaaaaacaatagtaattttttaacaattatgctatataataaaaaatatatta

SEQ ID NO: 14470 - DNA, 2944 bp, Heterodera glycines
accataactttgttcactgtcaatcaaattaagaattgttggtgttgttcgatagctctatgtgtttattattaatttgctaaatctcaaaaattttggttaagtttcaaaaaagttatggccagaaggaactcaaaaacccagtaattcgaacttttttgctctgatttttttgtgcataaataaaaatttttgaaaatttgcaggctaatagcatttttcgaatgctttcgaataataccaagaatgtttaatttgattgagaaagaaaaaaagttatggtcgaaaaattcgttcgacgacgtttcggctgacgacgttttgtcctactccgatttttggcgcctgattatgagtttgttaatctaatgatatgtaaagaaaacataaaaaattttaattaataaccacaaaatttagctaaaaactaaaaaattataaatataagtaaaaatagaaaaatcaaaattgaagagctctcaggcagcacagaaagcaacagtaaaaataaattataaaaaaattatgtgataaatattgaatttataaataattaattttttaaattttccaaattatataaaacatttcttatttaaataaagaataattttaataaatttcgaaaatatgaattaactgtttgctgttcataataatatttgtttaaaaaataatatcatttaaatttagcattagaaaaaacatttaattgtataccataaatatctctcgaataaaaaatattagggccttaattaaaccgcaatataaattacaaataataattaattaagacaaaaataggtgataaatatgaaattataaaatattttaatataatttcaagacaaaatataaatatatctttagaatctaacaaaattctaatatatataaataattaaatatttttaaaaaatttgaaaaatttgaaacttaataatgttttaataattataaaagactttaaaaatttgaaaatttaaaaaaatttaaattttattaaaaataaaaatagtgatgctttacaaaaattataaatgaatgttttttaaaaatattaaataataagatattattaaataaatctaatggcttaatgatataaaaaatattatattataataaatatttttagttagaaataaaattatcaagtcaaatatatttgcaattaattatttttaatgcattgaaaaaacttttatatgcatattttaaacaagagaataaatgaaataaatttacattcataaatcatttcatataattgtactatttaataaaaagtcgaaaaagcaagacaaataaaatcaagacagaggcggcgtgagattaaagagcaaaaagagataatagacaataaataaactttttttacaattaataaaagaaaagaaaaaatgtaaaaataacaatgcaattcataataaatcaaaaaatcacataaaaatgaaaaatcaacaaacaaaagtaatcaattcaaaattaaaataattttatcttacataagtaatgtccgtttatgtatcagggatcagagatgttaggaaacgtttaaaagaatatttttactgagaaaaattctcatttttttgaaatatttttatgtcttttaatacgaaaaaagttttgatctgaacttgtattttatttgggatcagaataaactaagatttttccaataaaaaaactaaaatttattatttattaaattgaaattaaataaaaatcattggagcagatttattttttttattttttgcaaaatttaccgtattcgtatgatcttttttttattttttaaagtttttaattgttattttgttcgtcatttttttggtactgaagtgccgattttcactaggacgtcccaaagtttaaaatggaaatttcccagtgatatcgtattaaatttatataattttattataaaattttataaattctaaattattattttgctttaaaatttcatgtttaatgattgtgctatttacatattcttatttgaaagtattatataaaattttcttttaaataatatttttcataaataatttatgaatgatttaaaatatttcaaagatttaatgcgaaaaatttaatatcaccataaatataaaatatttttaataaatgtcggtgtcgctgacagaattgttaattttcatctttggttatcataaatttttgttaaaattcttctttctctctctaggcttaaattcaaaaattctttttctcttttcttttcctataatctgatttattttgggcgagttaaaaatttaaataatttatattcaaaaaataaattttattttattatttttttataattttcttaagtgcattctgaataaaaaaaatattgttctctatccaatggctattccaaacgacacgaacaagaataaaaatgacaaaaattaaaatataatttaaaaaaatataaaaggaaaaaaatggaaaatattaaaagaaaattttttatagaaaaaaagttagttgaattatacttaaccccccagaaaaaaatgatacaaatgatataccaatcaatcgttaagaggagctaagtttggaaaataaatctccagttgcggaaatgggtttcaacctatgtttaaaccagttcgaaactcaaaaattgaagtccttaggcattctaacgttttaatgatcgaattcggacaaatttttttttctaagttatatttttgattttatataaaattcatttttttatcctttttttggtgctatcattttctttttaatgtctttttactcattctgacacgctttatttaattgaatttaatttaattataaatttatcaatttaacttttttaaattattaattaaaatttttttcgaaaagaacaaaatttgaaaccaaaaatttttattaagaaaaaaatattaaattttgt

SEQ ID NO: 14471 - DNA, 2206 bp, Heterodera glycines
  unsure (1)..(2206): unsure at all n locations
aatggatttttcccccgccccattttattactncgatagctcctccttcccgggcgctgggaagtcagctaagagatcagtcgagtcagtcgggagccatttaagagacttggccaatcgatctccgcctgggagacgtccccaggcatctatcataatcccctcccttccaagccctgacaaatgaggggcctaattacggacgcgtaagaaggtctcctggaattaaattcccttattggcactgggtagtgggacctcacggctttattatatggtcatagatttcccaaaatccaggacaatttttttttaaattttgagaaaataaaaatacatttagttcgttacaaaagcaacagaaaaattatctaaaagttaagaaaaaagcgttttggtaaagagaaaaatattgaacatattggtattgatttttaggtaaattaggacaaaaattattcgagtttcaaaaacctaagtttaaaaaaaaaatgaatttttaaagctgcatttgcatttttacgaatatgcagaaaatggatttgaaatgaataaggatataaaatgcttgaaatatggaaaaaaagttgaaatgagaatagatcatataaggctttctttatccaagccaaaatctcaatttacatgctaataaaacattttgcgaaaaaaaggaaatccacccaaatcccaatagcaatgataaacttacttaaaagttctgtgttcaaagtgggttttcttttaactgtttcttgcgccgcttttggcacggcatcatcttctcgctcagaatcgctgtcttcgctcgttttggaccccgtaaaacagccggcaaatgtgtcggacacaaaaaacagaatgcaataaagtgtgaataacttcattacatccaaatattgaaatctaaaatttatgcttaaaaaatatatttaataaataaaaatatattttatagatatgactttgaatttcattttaatttgtattagatttttttaaattaaaaaaatataaatatgaatttattttttattttctgaataaatgaatacttaaaaaaaagaatttattattttttttttcattattttatgaaaatgaataaatttgtgattctgtcgaacagtgaaaaagtaataatatcatattgaatttattaatgttataagcagcaaatttgatgtaaacaacaaacaaaactagacaacaattaaatatatttgcaatattaaatataaattatacattttattattactatttttctgcttctatgaatttgccaatgcgaaaattcatacaattaaattttgtatttggttatatcgactaattactattattattaaaaataataaatattatacgcttacgtaagcaaaattttatgaaaaatataaaaataaaatatttcattgagaatataaaattgttttaaaatatttggttggaaaatgtaaattataaacagaattaatttatataaaatagagttgagcgggaccgggacccgaatacggacaactgagtacaactgagtactgaagtcccggttttgaccgggaccgggactagtcccggttttttcccggttttcccagcaaaaaattcccggtttttcaacccgaaaaggtcccggtcccggttaagcccaaaattcacggtcccgctcaactctaatattaaatattggaaagaactaaatataaggaaaaaaaggatttgaaaaaaaaaatttaattttataaagtttttgctattttttgagaaaaagaaagctttgtttatttttaaatgatttattttttagaaatatttttttcaataatcatttaattttctaaaattattttcaaaatcgaaaaaactaccaattataaaatgaaatggtgatttttttttactcgtctcgactctcgagacgtcaatttcctcaggtgtcgattctacgtatcggtctcgagtttggcatctgtttttagcgtgccataataaatgggaataataatgtaaagcaaaatgatcgtagatgataaaacacattagttgaaaaatgagcaaaaattgtctcaattattatagaaaaatttaagccattttttaatcactagggctaggatttttatgttttaacatattttttttgcggcttagttatggcgaaagaagcccaaaaatagcattttctccgaaccaattttgg

SEQ ID NO: 14472 - DNA, 1220 bp, Heterodera glycines
  unsure (1)..(1220): unsure at all n locations
gataaagaatgagatttttgggaatttttatgcaaaaacacacttattttttcaattttnaacacatattttagcacatattttggcatttttgggggtttttagcacatatttcagcattttttagcacatattttattacatatttcaggatttttagcacataaaaatcctagccctattaatcaccatttcctaagtgaaaccagcagcagtttccaaatatgtaaaaacaatttgtcataatatgagcgccaaaaaacaattcataattttttttgaacatttctattttttccaaatgcgggttcaaacggagatgcaaattctattttttaaaattataaaaagcgaatttttttgcagaaataagttttgtaacattttgtcaaaaaaattaaaaacaaaatacaaaaagagttattcataataaattttatattttaaacaaagatccgacccatttttatttttacaatgtcttttttttataaaagcactttgctttacctctcgcaataatctccatcgctttcattgtataaaattttggggcattgattttcatttaataaaaattatcattttataataaaaatattttaaaaatagattttaaatttctcttttcatctttatggaatttgcttttctcttcgtatttcgctgaaaaacttcaacagttttggcctcccaaaaatgcatttgttcccaattttgtcccccattttttcgctgctttttgctggcattgtgcccgtcccaattggtggtagtggcggtagcatttttgcaatctgcaaaaagagtgacgtagaccgaaagaatccgatgccaaaagtgaaagcatttgatacgccagcgacaacaccttcaccgccaactgatcgcacatcgaccgaccgcaaaacgcagggttcttaacaatttaaatttaatttaaaatgaataatgattagagctcgcattttgaggcatatgcctttttttctgctcactagtttcgacatattaagcataaaaaaacgcatttccactttgtttgagtcttctacgttgactttttttatgcctttttttgccttttttggcattttgccgttttggtgccttttttttttgacgttttttgcgaaaaagtccattaaaaatgcaataaaattggtaaaatacaccccaaagaaatgacctgaaaatctttttagaaaatataaataaga

SEQ ID NO: 14473 - DNA, 2143 bp, Heterodera glycines
cgattggaataaatggcaaaaaaagcaaagtcaaaacgcaaaaccttaaagcactagccgattgaaataaatggaaaaaaaagcaaagtcaaagacaaaaccttaaagcactagccgattgaaataaatggacaaaaaagcaaagtcaaagacaaaaccttaaagcactagccgattgaaataaatggaaaaaaagcaaagtcaaagacaaaaccttaaagcactagccgaagcaaagtcaaagacaaaaccttaaagcactagccgattgaaataaatggaaaaaaaagcaaagtcaaagacaaaaccttaaagcactagccgattgaaataaatggaaaaaaaagcaaagtcaaaacacaaaaccttaaagcactagccgattgaaataaatggacaaaaaagcaaagtcaaagacaaaaccttaaagcactagccgattgaaataaatggacaaaaaagcaaagtcaaagacaaaaccttaaagcactagccgaagcaaagtcaaagacaaaaccttaaagcactagccgattgaaataaatggaaaaaaaagcaaagtcaaaacacaaaaccttaaagcactagccgattgaaataaatggacaaaaaagcaaagtcaaagacaaaaccttaaagcactagccgattgaaataaatggaaaaaaaagcaaagtcaaagacaaaaccttaaagcactagccgattgaaataaatggaaaaaaaagcaaagtcaaagacaaaataggaactttatacaaatttaaaaaagtaatattttgtatattgtatatgcatttaatcaaatttctactttctttataaatgttagctaattagtcagcgtctatttattttctgtaaaaatttgcctctttatttaaaattaaattaatataatttcatgaaataagacactaaatgtatagagaatgaattaacgtggtcgattggaataaatggaaaaaaaagcaaagtcaaaacacaaaaccttaaagcactagccgattgaaataaatggaaaaaaaagcaaagtcaaagacaaaaccttaaagcactagccgattgaaataaatggacaaaaaagcaaagtcaaagacaaaaccttaaagcactagccgattgaaataaatggaaaaaaagcaaagtcaaagacaaaaccttaaagcactagccgaagcaaagtcaaagacaaaaccttaaagcactagccgattgaaataaatggaaaaaaaagcaaagtcaaagacaaaaccttaaagcactagccgaagcaaagtcaaagacaaaaccttaaagcactagccgattgaaataaatggaaaaaaaagcaaagtcaaaacacaaaaccttaaagcactagccgattgaaataaatggacaaaaaagcaaagtcaaagacaaaaccttaaagcactagccgattgaaataaatggaaaaaaaagcaaagtcaaagacaaaaccttaaagcactagccgattgaaataaatggaaaaaaaagcaaagtcaaagacaaaataggaactttatacaaatttaaaaaagtaatattttgtatattgtatatgcatttaatcaaatttctactttctttataaatgttagctaattagtcagcgtctatttattttctgtaaaaatttgcctctttatttaaaattaaattaatataatttcatgaaataagacactaaatgtatagagaatgaattaacgtggtcgattggaataaatggaaaaaaaagcaaagtcaaaacacaaaaccttaaagcactagccgattgaaataaatggaaaaaaaagcaaagtcaaagacaaaaccttaaagcactagccgattgaaataaatggacaaaaaagcaaagtcaaagacaaaaccttaaagcactagccgattgaaataaatggaaaaaaagcaaagtcaaagacaaaaccttaaagcactagccgaagcaaagtcaaagacaaaaccttaaagcactagccgattgaaataaatggaaaaaaaagcaaagtcaaagacaaaaccttaaagcactagccgaagcaaagtcaaagacaaaaccttaaagcactagccgattgaaataaatggaaaaaaaagcaaagtcaaaacacaaaaccttaaagcactagccgat

SEQ ID NO: 14474 - DNA, 4411 bp, Heterodera glycines
  unsure (1)..(4411): unsure at all n locations
ccatgagcttacaaattatcgctacgttgttgctaatgagagacgattcattatctctcttctgccacgncatgnccacgggtntaagccattanaataaataaataatattcaattatttattattctatcctcggaattaaataattacataaaatttttgaaaattgattcagaaagcggccattcgcgagcacttcactgagggcgttttgaatgaacttgaaatgcgcttcaatgttggcctgactttccatccgttgccgcttcatattgtaagcataatgaattgattttgtgggtcaattcttatgatgaatccattaaatttggcacaaattatccttaaacaagtttttatttaatttttatttttttgccttttgataatgtttttgtgggtttatttcttttaattaaatattttaaaaccaaacagccatgggacgtttgtatggtgacatttttcgccacttatgatgcctgggacgggttcatgagtgaaatcagcgacgtgctaaatgaagtaagctaacgtatcaaacaaattaaatgcaattttcaaatgcccataaaaacctataataaaaaatagctgtttatttttatttaaaattaatccattgatttttttagtgattcattaaaacatattttcttgcacttttcaaattatagctttatgcgcctagtccaccgccgccggctgattccccttctgaaatggagtaagaatgatcgacagaaatgctcttcgtcttacctttttctggtgccattcgtcaagtgcctctcattcatccgcctctcttttttgccacctttttcctccaattttctcgtcccaaatctcatttggtccggcattttttctaccgttttctttgtgcattacgtccatctctcacatcatccataacttacgaaaaagctcacttttctattttttgcttaacttatacattttccaacaatatattcgtggaagcgtttaaaaaagatttgcgtatataaaattttcaatttgaaattttgttctacaacttagaaaatttatttattctaaaacaacagccaaaaatcggaattctgaccccaaaaatgccgtaatcggaattccgtgccacccccgctgttgatactgtcgatggttggctggcccttttaagaaattcattattgaggtaaagttattattaattgatttgtctttcacctattcttacaaaccaaattgggactctgaaaattttttttttatatagacaaattaaatatttttgcttaaaaaggtaaaaacgtcataaaagtgcaaagaagtcaaataaaatgctatttgcaaagaacgcttttaacttattttacggtcatttgactcaaattccgatcgctagaaatggctgaatgggtattaggtatcatttaaaaccttcggatacaattatttggaaaaatttaggtcaataaataataaaacccattaaaaaagaaaatatttcttttttaaatttccaacatggcacaaaatatgctcattccgctcaagttgtctgatcaattgcgcgtaaatcccattgatcggctgtttttttgttgttaatcgatcactatcttctcaacaattttatggcatattttcaaaattttcatttaaaaaaatattttccccatttagaaccgactttgcgattcatttgatattttgtagaaaaattaatgaattcacgcataaaaaaagcaacaaaaatttcatgcaagaagcgactaaaaaagataaaggtatcgtttttcatgcacattattttaataggtataatacggttggctaatgtaccataatgacaaatgaaatccaaagggtgtgttttacagttaaaccaatttctatttatcgcaaaaaacagttgaacaaaaggttcaaaaatatgttttttttgatctttaaaataacaaattctgcttccatcgtttattcattcaattagtttttaattaaaattttatgtgtcgccattttaggtatatttattttgaaattttttatttagttttaaatgtttttcgaaatttccaaaatcccgcaatcccgcacggcgggatcccgcaatttattggaaaatttcatttgtgattatgatttttttttcttaaattaccaactaaagaaatttttataaaataaaattcacatctattttccattcttaatcgacaaataattaatgatattcctttttttctttccatcctttgtttcttctttaatttgatcagagctgctgctgtcttttcgagcttcccattctttgtgcctttgattatggtaaattttaaagaaatttaatgttttcatggaattaaaaattataaattttgaatagcgattcaaaaaaatatatataaagtgttcaaaaaatattataatcactagggaagcaacttttagtgaaaaaactttttttttgctcaattgttttgaagaaaggagctcaaaaaacgcatttctgcgttaaaattttttcatttggacgtcacttttcgtcactagaaatcactattttggcgacttcgtcactaaaatagttaaaaatcactattttggcgttttgtcactatttcgacattttttggaaaattccttaacaaaaatgcataaaaccaaaaaatacacccctaagaatcgacctaaaaaattttcaaaaaaatacacccctaagaatcgagcaaaatttttcaaaatatactcctatgaaatgaaaaaaaattttctcaaaaatttactttcttggcaaaaatttttaattttaaaaatttttttaggtaactattttgggttttttggtcttaaaaatcccagtcctactcatttgcaactgcaaatagtgaataaaaattatttttgctcaatttttggctgaaaattatgtcactattcgtcactattttggacttttttcactattttgtcactattttggcactttttcgtcactattttagttaactatttcgggatttttcgtcactaaaagttgctaccctaataatcactaacgactcaggatatttaaaaaagttctaaattatctcattcaatgaatgggaagttaatttttggcacttttacttgattgaacacgcacttgtcagtcgaaaaaaatacatcattaatcttcgtcatgtgttaatgactatcacgtaagttgaccacacagaatgttcatttggcatgtaattaattgctaattggttatgcttgttaatacggaaaatttttttcggtaattgaaaagtctaaacattttcctttcactagcgatccaaatatatatatatataaagtattcgaaaaatattataatcactaatgactcaggataaaaattacttttaaaaaagttctaaattgtctccttcaatgaatgggaagttaatttttggcacttttacttgattgaacacgcaataataatattttttttccatggatttatttcttatatatttagcatttttatacatattttatttacatttcgcgatttttcttacataaaaaagaaagccctgttaattagacatttgaataagaccgaatttatatgtattcaaatattttttttttgcaatttatttagccagaaaatatacatactattttagcttggttttaagcgtctaagactcgtttttacttccatattttacatttttgtccatattttccatccagattttagtattttcaaaataaatttgaaaaatacacccctaaaagcaaaaaacaaaaacaaaacaagaaatactctcttaagaccgaataatttgaaaaaatcaaaatttaaaaaaaattcacttttattttgttggaaaaattcgttttcctcaatatgaaggaaactttttttttttgcaaattaccataattattcgataattgcttagcttgtgtcacatcggataatgaattgcagtgactccgctaaatattcggaacttataaaagtgcgtcaaagcactgaaattgcttatgcattgttcagctgttcatttttcattttgtgcgcttttcccatgttcaaattggcccgagaacggcacactttgtacattctgatcagcaaggtgagcaacacaaacaacaaattttccgttttgagacagtttgtgccatgccatccacaggggtagagcgcggaaacagaaaatcccgcgattgcggatacaatttgccacgaatagagaaatgttagggctatcgaatgatatcaagaatgtttaagtagttgacactagacaaaatgaaccaattttttagagaaaatttaagaattttggtaagcgaaccgactggagaaaaattggaatttcgaaattctttggggaaaataatccaaatccataattctct

SEQ ID NO: 14475 - DNA, 2103 bp, Heterodera glycines
tttgtgttctttccaatgggcttactcaaaatttccgaaaaaatttcccaacctcctagggatttttttcgaaatttttcccgatttcaagccatttttggcttttcagatcaccatggaggagtgatttgatcaagttgctgtaaaagacttttttaatcagcataaaaagttagattagcaagtattttttcagaattttttggcgcacaaatattgattttattatgattgaataaagtgatcataaacatatgaccacctaaaatgggaggcatgttcgtctactcaaatgtgattttattattaatcattattccaaaaattaaattatatctttagaaagcccacaaaaaaatgctacaaaaaaatcgggcgccggcttttcgacagcaaaggaaatttcgacaggaaaggactttttaacagtaaaacaaaaaaacaaataatgtttattaaaataaattatattgcttgttatttttactaaatttcttttaaattaacataataatatatatatattgctaaacattattgctagggatacaatttttacattttacctagaaaaatttcagaaaaatacaccttagaatcggtcacaaaaattttaaaaatgcacacataagatgaataaaaattttctcaaaaattcatctccaaattttatttatttttttctttttgattattaatagagctcccatttgggagcatatgccttttttgctgcctattattgtgcttttttcgctatttttggtgccttttttggagctgtaattattaaaaattatttatctcaatactgttttggtttaattttattgttttggagaaaattttaaaattttgctttaaatttaaaatttaattacttttactgtcgaaaagtcccctcctgaaatttataatatttctgtcgaaatatcctttgctgtcgaaaagtccgggagacgtctaaatcaaggaaatagtgggtatattagggccaaacaaaacacacacgtctacgtcggttcgaatcgtacattgagcgtcattgaagcaaagtcacgaaaaatattaaaatataaaaaaaccatatgactcctcatcgctgttaaataaaattactgtaatttgcactgttttttaagtaaaaatgcaattttttacgacttaaaataaatggaaaaaaattaaaatggtcgaaaatgctaatttttataaataaaaacgattaaaaaataaagattttgcgagcgaggagcaaacaagccgcatgacttccgctatcacctggagcggatacaccgaaatttgaccattccgcccaatgtggagggcgttgaaatggaatcccgaccgggccatgtgataggaatttctgtcgctgaccagaacaatggtaaagaatttttaaattgacaatccggcgaaacaaaggaagtgaccataaccttaagccgacatttgggagagaaatgcacacatttcaatagttttgttgatttaaagccagacccgtatccagaaaaaaatatcggggagggcacgcgaagagctttttttttcaaaaaataatggttaaattcgggcccggcggtgccgataggcgccgccgggaaaaattttggaaaatttaatgcaatcttctgataagaaaatatgctaaattttcagaaaacaaaactttcccatttctttcagagtcgatttaagtaataaataagttgtccagtttatacagttgcagacatttttgtagcatttcctgtgctctattgttatgcaaaattttatcaaattagttcacaattatttcaaatattgggaccggaacaggaggaactgaccactttggaacggaaaaagtcgacaaaaaagtcttttacaccaaattgatcagatcacttcttaccctaaaatacactgaaaatcggggattcgaaaaatgcccaggggaatggtaaaattattctagagtaaatgagcaagcccaacacaaagtttttctaccgaatatcgaatgttttcataaatatctaatttggttgataatgagaaaaattgttagcaacggctccgaaccggtcggcgctgaattgggctgttccc

SEQ ID NO: 14476 - DNA, 1223 bp, Heterodera glycines
ggtaaaagtccgccgggcccccgggcccgtccggtctctaataaatatgttatggtattaatttaaagatttaaaaaaatagaattgatcactttaggctttaggacaaaaacagcttgccatactaaaacaaccctctgactataacgacctgactataatggccagattaaaccgtacccaaccggtcgaaatcacagcaccgtatatgcattttgcttattttttctgaacatttgctatgaaaaaagggctcaattttaaatactataaaattggaaaacacaccccaagattggtcgaaaaatacactccctaagcatcgcctcgtatcgacaccgccgaaaccaaattacattgaatatcggcacaaccggactctaacattcaattaaatttttaaatcatcataaaatcattgtgttggaatgagtcaactaattaataataatcattttatcaatttttaaatcatttttattccgtgtaataaatttttaattattaacaaagttaattgagatatttggaaatatcttaatagtttaaagaatccaaagggataatttcaaaaaacctgtgggtcgtcggtaataaaataaaaatccattgaataatggatgcttgaattcactgtacatacaatatactattaagcttaaattcgccgggttgtcatgaagaaaagatagtaaaattcttaaaattcttttatcactataaaggcattccgacggaagttatcgctaaggcaatacgccgacagaacattcaacagccaagcttcaccataatgggagattttgccatggacctcaatgcgagggtaacttttacacataaaaggacgggcgggccactactccccagccccacttcgcttgcaagggctctgctggttggacatttcgacaatgaccgttacaaataaaaaataccatttaaaaaataaatcttttggtttaaaatgaacagaatggaaagctttactttggcaaactgaaaattttttgccagagcatctggcgaaacgttgaaaaagtgctataaatgtcgatttaattttttctgtaaaaaaacaaacaaaaaatctcaaaattcatcaacagaaaattttatttttcgttaattggcgaaagtaaaaaatgaagaatgcctggcataattgaaggtacttttccgtgactccaggaaaatgcgtcagtgatgaaagtatttgaaat

SEQ ID NO: 14477 - DNA, 2637 bp, Heterodera glycines
  unsure (1)..(2637): unsure at all n locations
ttttntcaatcaaaaaggtctgtctataggtctttaataaaattcacgtttcatcacagttaatacatattaggcgaaacaattgatcacaagtcatttgaaatgataacacagagacataacacattgataatggtgatcaaccaacaacagacaattatggtcgcttaaacagtaaccaggcgacataatactgtacatacagtgagatacaataatacaatctttacagttgggatcatatgtgggaatagggtcagttgaatgtgtcctcctccctcttcggcggttgtcttctgcatcctctcccatccatcggtcgtttgtcgtgtcatctcatcgcgtggttcttcgtccattcacgggcaattcggttgtactcctcgcggttgtcgcggtacatagtcgcaatgtcctgccgcagcgcactgttcggattcgggtcacagagaagcgaagagatggagagcagcactgaaatggagaggggataaggattaaaacggcatttccgaatttgaaaaatcccattttcacacgacaaaagatcgacacttttccaaaaagtccggttttggtggtcgttttgtcttgtcgatattttgtcggcgttttgtctgctatttcacctttcgaaatggtcaacgacggcgcccacatctgcttcagaatgtccaaacaaatgtcgcccctttctccaacgttcggatggtaaacgatcgtgtcgaatttcacagttggcggagtgaatgggtagtcgcgacggaaaacgatgtccaaatggaaggtgcctccttcgtacggcgactcgggcggtcctttgatggaggccttccaatggtacaagtctctgccgtcatccatcggtgccgcggtgtaacccgtcgtgaccagttcctgatgcagctccgccagttcctgcaaattggtcaaaacatttaaagcattggttgatcagagagttgtcatttgccacctttttgatgcgtcgacgtgccattgcgaaaacggcgagcgaattgatgtgaagaacggaagaacgaacgaacgatgagaaacggcgatgaggtcgcttttgaagtgttgttgttattgcacaatgaagggatgatgatgataaacgcaaatagttctgttctaaaaaaggaaaaaacataaaaacaatacataatgaaatgaattataaatttaaaaatagggaaattgcagtttttgtaaaaaaaatttgataaatttaggttcaaatttggtagtataggccagggaaactctgataaactttcaggtcgatgtcgataatttttggaattcgggtttggtatttactatgtctttttgaaacagtgaagtttatgaaattcacaaactgaaaattgacgaggaatcagaaaaacagagtaatcatccataaaagaaaaatgagtgaatgaaaagggaggaaaagggggcacaatatttatagtacgacgcaacaagggagggcaaaagttaggtaggtacgtaggtaggtaccattgcccaaattccaaggttttctctctatataaggaggtgttttctcattggactgacattttttgcattacgcctatatgcttttcttacttgttccctcctctattcagtccttaatgttctgatttaattttttgtgttacagagtacgcaaaatataattaacccgaatgtttccaattgttttttcaatcaaaattgactgtttctcacagaattttcctgctggacaatctaaacttggaatttaatcaaaaaaacacaaaaaattgcttttccctatttttaaaatttataattcatttcattatttatgtttttatgctttttcattttttagaacacaactatttgcgtttatcatcatcatcccttcattgtgcaacaacaacaacacttcaaaagcgacctcatcgccgtttctcatcgttcgttcgtccgtccttcacatcaattcgctcgccgttttcgcaatggcacttcgacgcatcaaacaggtggcgaaatgacaactctctgatcagccaatgctttaaatgttttgatccatttgcaggaactggcggagctgaagcaggaaccgatcacgggttgcaccgcggcaccgatggatgacggcaaagacatgttccactggaaggccaccatcaaaggaccgcccgagtcgccgtacgagggaggcaccttcaacatggacatcgttttccgtcgcgactacccattcactccgccaattgtcaaattcgaaacgcccgtttaccatccgaacgtcaacaagcagggtggcatttgtctggacgtcctgaagacgacgcattgggcgccgtcgttgaccatttcgaaaggtgaaagcgacgcgggaaagagcagacaaaacgccgacaaaatattgagacgacaaaacgatccaattcaaaacgaccaccaaaaccggactttttggaaaagtgtcgatattttgtcgtgtgaatgggatttttcnaattcggaaatgccgttttaattcattgtctcncctccatttcagtgctgctctccatctcttcgcttctctgcgacccgaatccngacagtgcgctggagatggacatcgcgattatctaccgcaacgaccgcgagcag

SEQ ID NO: 14478 - DNA, 1681 bp, Heterodera glycines
caaaaattcaccagcaaaacgcacagcacgagaactcttcccctttctggtcgatttggccggaaggttggccttttttgtttggcatttaaaatgaattaatcagatgccattctgatcagtcaaaaattgttgtccaattgatttttttatttttatggaacagcgaacgactcaaagggatgccaaatggcggagaaaggcagcgggagggcatccgcataaaccaagtaaaagtgggcagcagccaaatcatccagaaattaactttgctgatcattgatcactctctatgtaattacccatcaaactttgtttgtctaatcagctaaattgtccggttattcgtttctctgagcatattttctgatcagtctgatcactttgactgtcccattcgttgatcagtccctctcaacattgggccgagtgatcaaagcgttgtacgaccgccaaaatgggaatggcacttcatctcagcagaaacaggtccaccaatattagcattgatttcgtttggcaataaacttgcgcagattccttaccgcgactctgtgctcacttcgctgttgaaaaacgcttttggcggcaacagcaaaacgataatggtcagtcattgtcagtggacgacggcacagcaaagaaatgaatgaatgaatggcacccatttttaattgtttggtaccaaatgccaaaatccagtgcatttcggcaattttatgaaatgccagataatttgtcattcattagccaatcactgatcccttcccctccaatcagattgccaccatttctccggctgatctccattatgaggaaactctgagcactcttcgatttgctgacagaatgaaagtctctttctgaaccccgagaacagttgaaaaataatgccaaaaatgtaattcaggcaatccgaacagtgcccgttgtgaatgagtcggccaccgagcgactgatcagaacaattcgatcggagaatgatcggctgctgcgggcgttggagcggggcgaattggaggaagtggcggaaaaggtggacaaaaagcgagagacaatacgaaatttaaaaaacgaagcgagtcaatggcacggtcaaaccaaaactatttgttggcactaagccaatgatttgggtgattttctgcgtttggcaacactttgactgccccccccccttttaaaatggctgctgcttatggtccgttttcagcttcaccccctcccccatttccccttcgattccgcaaagtaacaagtaaaataatgaggctaatgagtcagggtacggtaaagaaacaattatacgatagttactgtaacaaatattcggtgacagggaagatttgtaaacagatacagtggttcatgagtgagtgaggttaccgtacggtaaaaaaattctcaaataccgttaattctcgagctttttgaaagacaattccatgaaataaataatagctttaccccctttttataattaatgaatcattttaaaaattggatattaattacattgattcattgcgctcttaccgctgccaaaacgctgctgaatgacaccgtacgtgtcgtcgagctgaaaaccggagctttgcgacgagaatgagcccttgcgcttattggtgaccacattcacttcgctgcggtgcttgtcatcctcatcatgttgaagaggaac

SEQ ID NO: 14479 - DNA, 2684 bp, Heterodera glycines
ttctcatgccaataaataaaatttacttggaaaaactcccgtgcacgataatggcctgggaattggccaaattggcaaaccgtgaacgaaaggtctcaattcagaaggaattggaagcattgcgacaacagttggcggacaaccagcgggaaatggagaagttggaacggaattggcaacagaaagaagagacattcaaaaaggtcaaaaggacgggggagaaaagggaaaagggggagaatagggaaagagtggaggataaagaaagagggagcaatcgcaacagggaaaggcacaatgggatgtcaaattgcgaatggatttggaaaaacagaataaatggagggagaatcaacccaacaaaaagagtgatcgatcccccgggcgaggaaggaacaaaagtgatcaaagggataaaatggatttgcaagtgatcggagggagaaaaagtgcccgatatggttgggctatccaccaatgttcaggaaatgagtgcgatgagtttgggcgagttggagcagtcactgaacgcgtaccgggaggagacgccgcacctgtggaatttgaacgaagacccggcactgagcgatgtgattgtgcactttttggagaaaggtggcacaaaggggggggcacaaaagaaaaattgggcggaatttgggccaaagcgccgatgttggcaaaattttaccaaaacattaaacatttggggaaaaagagaagtttccgccgcaattgattcaattttttgctttcttttttaatttcctcttaaaataaccaatggattaattttgtttttcatttttattaaaatttaaaatgatttttgtatttttgtgcttcaggagacaacaaaatcggtgcgttattttttggctttgtttttgattttacaattcattttccaatgcccagggagtgggcaaaatgcgcaaattcaactcaaaggaatgagcgtaagtttttaatgagttaattagtaccgtggcttaatccaacactcgagtgaccaagtaaattaatgatggatccatcagattctgcctgatcatgcgttggtccgcaacagagaaaacaaacggatcactttgatgccgttgaacggatcagaaattttggtgaatggcaaacgcattttgacggagagggaactgcgacagaacgaccggtagatgaacagctcaaaggggatgagagggaattgggtggatttaatgccattcgtcactttttttgagcattcatttcggcgccaaccatttgtatgtgttcagcaacagaagggagaggaaaagggaagcgaaggaggggaaggagaagatcagttacgaaatggcacaaaaagaaattgcgagacaaaatttgaaaagtctgtcagaaatggcagacaaaaagtcgaaaggtaagaaaagggatgggaaggccttgccctttctcggcattgccattcccgccgatcattgaccgttggctgatcacttttttgcgtctgatccgttcatccgtttttgatcagatgaattggtgctggaggaggagttggtcagtgttttgccgtacgtttaccgggccaattcaatggcggcggaactgaaacaggcgaaacgtttcgaaattgtgctgatgccacaggaggaaaagggcggcaatggccgaggcggggcattgacagaggcaaatttgggggaaaggggaaaagtgagggaaagataagcaaatggaggagagataaagcatgaacaaagggaagccaaaggcaatgaagcaaaaacgatgttcatagaaaaagccgattttgctgatcagatcagtccctcccccttgggtttaatgggcttttttctgatcacttagacaaagtgccataattaatgttcgacaaaagaatcgaatgaatttaatttaccaaaggaaaaaaacaaagttgatcattaattggtccgtttttgcaacagatttgggtgaaagtgcacgacaattcggtggccggcagcagcagcagttcgctgtggtgagtggagaaaaaagtgccaaaaatgccaaattccttttttaagggacatcagccggtagcgaaacgaaaaacataactttgtccacccaaaaaatgccatccaattgtttttcaggttcatgtcccgttactaccgtatgcaggtcggacactgactgaacgacaaccacacatactgtaccaatgcaaatactgtattggcattctgtttaaggaactgtacgaaaaacaattggaggagcaaattgacgaagaacactcgtccacttctacagctgaacaacgccaatgtgaagacaaagcggcggcagcagtaagaattggcactgtgacagtgtttctgcaaagtttggcctatttggtcggaacggcggatgaggtgggcacggacgaattggaagggttattaataacgtaatagaaaagggacaaattgggggttggcggattttgaatagtcgggagggaatttgcttctgtaattgtagaaatgcaagaatcgctgaccatttctcgaactttggttttggcattcgtggataaaatattaaacaaaacattgtgcgaattgtgcgaaggtgcccatccaaaattaccacggggcgcaggtcggctggctgaaggtggagctgagagtgcgcgcgtgggacgaggagggcgaggagga

SEQ ID NO: 14480 - DNA, 1587 bp, Heterodera glycines
  unsure (1)..(1587): unsure at all n locations
aaattcggattcgctgatcagtgatcagattggcttatcaattggcattgatttagcgtgccattcgtccnccttttccatgcttttccctcccctccgccaaatgtgtgccacgccttccgcttcttctctttgcttcttccctctcatcgtccggcttttgatcgctttcccccgtgaatggatgaactttgccccttttttcttaccgccgctcggtgggaatggcggcggtgatcgcatttgggttgactaaattcaacagcaacgggggcagcagcaacccgcggtttttggcctcgtcacaaagtgcaaatggtttttgtttgttgggggcggaatgccaaaagattttcaaaaaatttaaaaagcgttggcttttggtgtgacgggaaatgggctttttagaccgagggatgatggctttgatttcggagtgtttgctttactgcctctgcgaaattcagtcagcacggccaatccaacgcggaaaagcgccgcgggggacaaactctacgccttttcaatttgctcacctttagggaatgggccaaattttggcttaatgacgtgccaaaattacaacgaaattttaattggctgtcctttacatataattttatggcttcgctgattttggacgtgtcaaacgattggaatgcttttttctgttgggtcggctcggcttttcctccttcgatttctcatgccctcaatgctttatgttcttatttggttaaggcgtccctttgaatgcatttgtctctgtttctcatcccatcaaccagcaactctttcttcactatttcttttatctttccttctttccaccctactatttctctcttatttttctttttctttgaatctcttcaattaattgtttccgtggtgaaatgcataatgaatgaatggcctacgaaggatcactacgaaatccgtccggcggtgaaatggccaaaagagagagggaaggaaatagcattgaatattggagagggaaaaggaaaaaagataatgaaaaagggagagaaggaaaagagaggggaaaagtgaaaagggagagaaggaaaagagaggggaaaagaaaaaaagataatgaaaaagggagagaaggaaaagagagaggaaaagtgaaaagggagagaaggaaaagagaggggaaaagaaaaaaagataatgaaaaagggagagaaggaaaagagaggggaaaagtgaaaagggagagaaggaaaagagaggggaaaagaaaaaaagataatgaaaaagggagagaaggaaaagagaggggaaaagtgaaaagggagagaggggaaaagaaaaaaaagataaaaccaatgaattgacaaaaaaatgattggtcaaacgaccacaaaaaatagaaagacagcagagcaaacggagtttggccaaaacaaaacagtcgcagttggagaagtgcccaattgaattggaggttaattcctaaaaataaaatatcatttttatttttattttaaattctgaatgttcgcctaatccgacttttgcccgaaggcaccaccgctattcgccattaagtgaattaaattggataaaagaaactga

SEQ ID NO: 14481 - DNA, 2236 bp, Heterodera glycines
tgaaaagggagagaaggaaaagagaggggaaaagtgaaaaagggagagaaggaaaagagaggggaaaagtgaaaaagggagagaaggaaaagagaggggaaaagtgaaaaagggagagaaggaaaagagaggggaaaagtgaaaaagggagagaaggaaaagagaggggaaaagtgaaaaagggagagaaggaaaagagaggggaaaagtgaaaaagggagagaaggaaaagagaggggaaaagaaaaaaaagataaaaccaatgaattgacaaaaaaatgattggtcaaacgaccacaaaaaatagaaagacagcagagccaacggagtttggccaaaacaaaacagtcgcagttggagaagtgcccaattgaattggaggttaattcctaaaaataaatatcatttttatttttattttaaattctgaatgttcgcctaatccgacttttgcccgaaggcaccaccgcttttcgccattaagtgaattaaattggataaaagaaactgaacaccattttttgtgaagtgtattgaaataagaaaaacaaatttttggaaatcggattaattatcaatttaaattctaatgaaaaatgtatttaatacgccgctattttctggtgccaaatagcattttttattacaagaaaaaacttctttggtctgatggcatatttttgaatttttgcatttgccgtcctttgccttacctttggcacaattgtccatttgccaattgaaaaattaattggtaattttgaagagtatattctcgagttttttgatctcctctcttcaatttgagcctatttaaaggcgatttgtcctccgcttttgcacatttcgaattgcacaataaaaattctgctgctgatcaccgcattttaacaaagtaatgcaaaatattctaagaatcttttaatcttttcccggggtaaaaagagtgtttggaagcagcggcatgggacaaggaatgggaggcggtgggggcggcggcatgttctgatcgcgattttgaaagacggcgtaggacggagcgagtcagaagcaatggttggtaaagactgactgatcagcagatgaaccaaccaaacggcacggcgattagtgaccgtaccgtactgtacagtcaatttgcgctttaaaactcaaaaattgtcccatttctcaactcgtgctgataaagaaacatttttgttgctaatgttaacactgtgcaaaagtagcaaaaattgtgaaaagagaccaaaacattacacaaaaacagcagaacgatgagattccatccgatggtcaaaaataccgtatcttcgggtactgtcgttggcctacgccccctcaatttgggaaaggaaaattgtagaaaaatttcaataggaaattaactattattattatttaattattatttaaaattcatttgagtgtttttccattgattaaaatgaaaaaatttcattcgttttcccatttttgttgattaaattgttgaaattgttggtgcgaaattgtcaaaatgggcaaaagctgtttaaatttcaactgcggcggctgcgactcgcgtggcatttggcctcgtttttacgccatagaaattcaaaaaaaaaagccgaaaaggtgaatttttaattgatgaatggtgatgtttgattatcggaatgtttctttttactgccgttgcgaaattcactcattgccaaatccaacgcgaaaaaacaaacaaagcaaaatttattcccctttaattacctttcatttgtctgccaattttatttgttggccaaatgttcagctatttaagggcgatcactttcagcttttcatcatttacaatacaataaatatttctttttattctgttcatcattcactaattaataattaattaaaaagacaatttcgaatttaaaattaattaagacaaaatgcgtccctttcgcctcccctcgattcgtcaactcgacgattcgtgaacccagccaaatgtgacgattcgtcaactcaatcaatattacttaaaaaatggaacttaaatttaatcatcattttgattcgtttttttctttgaatttttgtttaataaaattagtttatgcaagtttttgattgaatatttcatcggaagggtcgtgattttatgtgttcttgtttataaattagcctaaaagaatgctataattgtgctaagcgtacaagaaaagctcttgaaactgctttttaaaactatttttgg

SEQ ID NO: 14482 - DNA, 2739 bp, Heterodera glycines
atttttactggacagcggtggtgcaattcatggggactccccacttgatctcataaaaaaataaatgaaattcgagtcggtcctaaaataaatgcgagctttcatattttttttctcaaaacaacaagactaacaacaatgatttggttaaatcatggataggaaatcccgaaggagataaaacattcagtcggataaatggggctgggctgtttacataaaaaggcatttgtatgtttaaaaacgaataaccggctaactcgcgataattacgtaagtgattctgattcttctgcattcagcgggacaatggtttatttgctgaggcggacatcggcagtcttacccatctgttgcatggaattattttttagtaaatgtccgcttcttttggcccgtttaccttcttccgctgccttttgcgtgccttccgcgtcaaatttgccggatcggcgaaaaaggtgcgctcctccgcgtccatcacaatgatttcgtcatcctccgccattccctcctcctccgttttcaccgtcggtttctcttcctccgcttcctcttctctctcgtccaaatgtgagtagcgttttcgcttcgtcttttgcgtctccccctcttcctccactgtctcttccaccgtatttccatcgttcgtcctccattcatttgtcgttctctttttgctcagtttctcaacaattgtcgtggcccgaatggtccccccattaacgatgttcccattaacatctgttccacgggcattggtctgcaaaaatgttaaatgaataaaaaaaagaatctgtcctgactcttctttagtgattacacattcgacgctccttgcaaagagtggacttttgacgatttattaaaaaccaaggaggagtgctttggtttgcaattttttaacagggattagaaattggtcaatgtcagattcgtgatcaccgatccgaaaaccatcgaaaccatacgacttccgcaaattcccacagcatctccaaaatcagttaccgttttctgccttgccgtcagcacgtagttgtcgtacggactgacccactcatgttcaattctgttccgaatttggttcttgcgtcgctctgcttcgttgtggtactgaaaagagcaataaagaaataatattaggtttttttatctgtcgtccatctgtaacgccctttctttctctctctctttttcactctctctatgacagtttcttctttttcagtctattctctatgtccctctttgcttctctcacttcctctccatttcccctttgctctccgtcattgtcctcctcctcgtcgatcagcacaaccgttcgaatggcactcatccgtctgttcattgtcagcaacttcttgagttcattattagaaacactttctttgtccgtccgtccctcttcctcatccgttcgtttgttattcgtttctttcaaatgctcccaacggttcgcaattccgatcagcttaatttggtgttaaattaaattgcattcttttggggtttttccctacttttctcattgttccccggggcgctgttccctctgctcctccgtctcccctctgtctgtttttgttgtttctgttgtcattgtccaacattgctgtttcgcccgtcgttgtcattgtcagcaacgatttgtacgctcgggagaggtcaatgcgcagttccaatttggcgcgttgtgccgtaattcgattggcatcgaattctccgagcacttcgtccgcgttccgttcacgcgccggagcagcggactgaacggacgaaatgacggactgttccaacggaagatcacgagcatagcaaatgatccttattagaagagagaaagtaagaaatggcaaagccgtggatgtatatatagtatgtattaaattaaatattccggtgtcttcgtcgttcaaaatcaagtcccggatttaaataatttttgaacgtgaaattgccgactttaaattccgtaagatggtggagaacagacttgtgcagtgctgcctgttcgctacgcacaattggcggcaccggagcacaacatgcgagaataccactcggttcacgaggcaaagtctggacaaaaaaacaacggttgagtcagcatgtcctattagtctgaaacattatcctcgtaggattagcagaagggggggggtgtcagggccaaaatttcaaaatttttatgattatattcccagcgaaatacacttttattttcaattcttgaattgtcgacacctctgctatttgcaacatcatatgctcaggcagcacataatgcagtgattcgtctttttcgcgcgccgttcggtccctccacgcccaaaggcgggcgagtgcctccaattggcgattgttgaaacgacgaccacgcctaagcaatttcatatgacccatgggattgaagcggggctgtttgaacaccttaaaaacgtattacgtggaatttaggatgatgaaaagtttagaaaacaaaccaattgacaaatttggacactttgcatgaacacttcgcagagcgcagaacgggccgtgtcgttgtgtgaacggtatttggccaattccaattttaggcggtcatagcaatccaacagaaaatgagtgtccgccctcgcataattaaccatcggttcaattaggggtctaatacaatatttgaatttatatttcttggggagggccgttgcacccacctttctctccaatacagcccatttgagacctgca

SEQ ID NO: 14483 - DNA, 943 bp, Heterodera glycines
  unsure (1)..(943): unsure at all n locations
ttgtttctgtcggttgcgttgctgcgaagccatgccgaaccgaggcgacagtcaaaaagaccgaccaagtaaatgccgaagtcgcgttggagccaaagcacatcggaatcagcagaaaaagccacctaacaatgtggaagaaggaataattcatcaaaaaataaaataatggcacatactttgacaatgtttgggtttgtgaatggttcgttgagcaaatgcaagtgcggccataaagggaagggatcgacgaggtaatcggcggaacgagtggagatttgcaggagacaggagaggccgagaaaagagcggaacgaatggtgctgaaacaaaattggcaatttcagaggaaggggggattattcaaacctcgacatcaaaggaaaactcgtgaacttcgtttagtgtgtcgatcaatgcctccaagtcctttaactgacggacccaaattggcggagaactctccaatggagtcggtttcttaaagagaaaaaacaattgcataaatgtatacaagtgaaaaacactgactttgacagtttcgggcagtgccatcatttgactgtgttcggtcggttcgaattgtgccaattcctcagcgtacggatgctcctccaccgcttcgtcttccgcagtcgccccattgcccagcgacatccgtccgccttcgtccgcttgcgcatcgctcggccattccctcgccatccctttccccgtgctttcctccattcgtccattttcctccatcgcttcgtcccctcctgctaacatcagtcgcattttgcctttgccaacactgcttctgcttcccacggcttttgctgtcccattgttggcgttgtgtttgaagcgcaatttgggaacgaaaggcaaatcgcaattgttgatcagttcgcgaaaagctcgttgaggtttctaaagtaatttcaaaantgtgttatta

SEQ ID NO: 14484 - DNA, 2158 bp, Heterodera glycines
  unsure (1)..(2158): unsure at all n locations
tttttaccattttggagtcaaaatttcaaaaaaattaggtaaaatgaggatccaggatccagcggcgcccatccgcttgggaaaaactttaactttttgaatggtattgttattatctccgtatttttaaaaaattgatcaattttcgggaagggagggggccctgaagggatcattttcaaataaattttgctaaaaatttttgaaaatttaactataaattggtgtcaaaatttttttgtcattttctttatgttttcttcatcatttttcagcttcctgtttattgtgtgatgctgtataaaattacatcatcccgacacggacacgccaattaacaattttttgttgatgtcgttatttgtttttgtttttttccacctaatgtgttaccaggtgctaattaatgatcattgaatgaaattgagtgtgattaattgcttaattttaacagagacattaatagattatatgattcgaaattatgataaattacaatcgttaatttgtttattgtcactaattgaacgtggattttgttgatgagagaaagtttttgtaaaaaatgattgacataatgaatgatgaatgacattcttaaaaatattactaaaataatatacatagctcattattacataaaaattcaattaagcgaatttaataaaacaaatcgactgatttttctgaggggttaaattttttttttgaaatttccaacacttttgctaagaaattttgaaaaataaacatttttctgagggtgaccatttttaaaataaattttgctaataatttttgaaaaattttaacccacaaattggcatcacattttttatctgtgcctttttttaattaacattaatttactttcactaatatgtaattatttcatacataattaatcataatcttttgtcattttcccgctctgttttttattaattggattttcatcatccatcgtcaccgtcaccattgtttgtcatctgcatgtcatatgcaattcataattaataattgttagagcttcctttttaggcacaacaaatcgcgaaacaggtacttaaaagggcagaaaaaatcgcaaaataggcactaaaataggccaataaattagtgcttttgctttttagctagaaaaatacataaaaatttaatcaaaaagaaacttttaatttttgttatatttcaattgtatgcaattattaaatattttaaagtttttttagaaataaggacaatttttaaaccaaaaatttttgtctagaanaaataataaattttaggggatgaattgagaaaattattatgggtatactttaaccaagtagaaaatcattttttcatgcttatctgtgcgcttcagtgcgcagagattttaggtatttgttctttattaaaaatattttaaataaatttatgaccaaaaaaaaaattaaaaaatttgcaaatctaaaaaataaattttcctagagcgggcggggagttgccgagctcggggatacagcaaaaaaaaaaaccgggatttatcgagaattaaggttggtccaagaaagctggggactcggtgccacttggtcaggggtgccaccctatttattacacttattatttattcctcacttcctttttacccgccattcgttcgccattggcacgtgccgaaacccacaaaagctgatgagcacattttgatgagctggtgcgtgaaaagtgcaaatgccgtagcccgcggacattcacacggatgtgaaagctaacacttgcatttggtgccgccaaacacaatgccaatggtttcctgttgctaatgaactctctctcgttttctctcgcgctttctctctctccccctttttctctctatccctctcgtttttttcttggcttcttttatctcttttttcactttcactatactcactcatcttttagtgcttctctttcctgctttatctctcctcaatccttgtgctctctctctcttacaacctcacctttcactctttcttttccattttcttttcctaatctctctgtacgtctatcacccttttattctttttctctcaaatactcatttccttctttttcttgttttctttctatcattgtccctgtttttctttctctctctcctctcattgtttctctc

SEQ ID NO: 14485 - DNA, 1412 bp, Heterodera glycines
attagaaattttcatatttattaagcaaaaattttgcgttgtccagatttaattaacattaaaaaaaataaataaaataaataatatttttattaaaaaaaatgatttacaaattcttcataaaaatgttttcatttaaatatttcctttttggacttgttccatgttatctccacttgaaacagacaaaaaatttgttggatttatataattttgggatagaaattttttcgaaaaaatcttatcttttattcaaattcatatgaaaaaaaattctcgaccttactctgacaaaaattcacagaagcatctgtctctacatatatatatatatatatatttttttattatttttagacattttcagattttttgagccgagaatttacgttgtcaaaatttaattttaacattttatttataaaataaaaaaaatttatttaaaaaaaataatttactaattagtcataaaaatgttttcatttaaatattttttccatttttgaatttaattcttcttggaattcatttttttccgtctcgtttttttggaaggattaaattcatatttttttctacttaaagtcagtccgagtcaccaattggccaactgtaatggcttatgcatgagtagtgccacagccaaaatttgaggccaaggattaagcaaacttcccaagaaatgggcatttttaagccaccactcattcatccccaatcccccatgaaaatattaacaaaaagaaaaaactaaatttaaattattttttatttttttggttttccttttttgtaaaatattttttcattattaatttaataattttatttctttttgaatttatgcaaatatttaaaaaattaaatttcttttttgtttttaaaaggtattagctttttctcaatttgctattttcattaccataaaaatattttaagtttaattttttttaaatatatttttaatgtattttattatttaaaatggtccaatttcctttttcatattaaaaaatatctcaatgaaattcatggttcatcataaccatgagcccatctctcatcagcagtccatcatctcgaatttctaatatttgttttgttggcatattgaaattgctccccatttcaatttccaagaaaaaaattaaaataaacgaataaaaatcaaaatttttttttcaaatttttggccagactgtcccatgctaatttccccaaaattatggccctgtcaagaaaacatttcctaacttccgtgtcactgtgatgtgctgttgatgacgcaaaaatgtcgatagacagcacagcccacggaagagggatagactggacaaataaattacatttgtccaaatagaaaaattaaatccccgactaatccataagcccataaatgattacaaaaaaaa

SEQ ID NO: 14486 - DNA, 921 bp, Heterodera glycines
aatgaagaggaattaaccgtaatggagcagcgtcgcggtgatatttataatactaatattttattctaaaaaagataatttatttaaccacagcaatcgcgcggaaaaacctatctattcaattctgcgttaattgttaaaattggttgataaccacaacatcttctctaaattttttaaaaagtcgacttaaaagtagttcgtttgcaaatcacagtttatattttgatcattaaagatgcaaattctgaatctctctggctcatatttcaatttcgatcatttgaataaaaaattcatcaatttttcgaaaacaatttttctttgctttgaactaaatgtttttcttttattaattatatatatttttattttatttttttgctataacatttgcttttttcaattaggtatgttaaaaacaatttatatttagaaaagcggaaaaaaatgccttttaaaaatttttttttcatgtgatataatttgtttttttttaatcgataatgaattcgcatttttttcattaattttttaataagcggatatgcatataatccgtctaatgattcagacggatatagaacggaaagtgaaggcatgtgaagagaggccattgttgtggcatagacatagacattaacgaaaataaccaattctttattccttaaactccgccgatcatttttcactccccgtcctttccctccccccctttcccttcctctcgccagtccgtccattttcgtcccgcgccccccccttctttctctcctaaattcgctccgccgatcatctttcactccccgtcctttccctccccccctttcccttcctctcgacagtccgtccattttcgtcccgcgcccccccttctttctcacggaaattcgctccgccgatcatctttcactccccgtc

SEQ ID NO: 14487 - DNA, 1238 bp, Heterodera glycines
gataaggatgggatgatgccaggacaattccgaaaaggaaatgtttgcgtgatgcgtgggaatgaagttgtgtacgtggcaccggatcacaaaaccttggatgcaattgcaacgcaatttaaaaaaaaattaaatgccggttttaaagaaatcaataatccaaaggaggacggtccaactctagcagcatgggcgcattatatgtttgtaagtggaatttttaattttaacgttttctaacctgagaaactcagtatatacctgtattattttctgtattcttccgaggtttactatcaaaccactcgaaaaatgctaaattttcataaaattccgacttaaaatttcggttttttaccaggtaaaagcgcattttttcgatgggaatggaagaagtgctcgttgtattatgaatatttgttttttaaaaatgaatctcgaaccacttgtgcttgatagcactaccagaaatgactataatgaagcgttaacgtgtgatgatcactttaaatttgcatcatttattgacaaaatatggaaatccaaaagttggtttcgtctcaaatgaactaagcattctcacaatccctgtcttgaatgctgaaaataaaacaacttgtataggtattttattaaaatcaacctagataaattttagaatttttgtactttcgcattcaagatcttggaatattttaattaaattaatcggaatattgaatttgaaatttatataaagtacatgatttcagatgcatgaaatgatggtgaactgagagggagatgaaaaaaggaaagaaaaataaatggaatattaaacattaaattttatagtgttgattcgcctttgttgacatcggttcattaataaatgtgaatttttatgaaaatgaatactgaatttttgatcgacttcgggccataaaatcagaattagccgaaatagtcaaactctgattgatgcgttttaaaattttaaaacttaaaaaaattgtaaataaattaactgtttatagacagtttttctcccgcccatccgtcctcctctccttttcatcctccctccttttccttccttcccttcctcttcttcattcattctcttcctctccatccctctttctcttccctccatccttccttctctcatttcatcctccctccttttccttcgttctcttcctcttcatcctccctccttttccttccttcccttcctcttcttcattcattctctt

SEQ ID NO: 14488 - DNA, 3102 bp, Heterodera glycines
caattattaaaaataaaagtaataatacaaatttaaacattccttggcttgcttaaattaaaaataattaattaataaaaatttattgaaaaagaccatttttaaaatacattaaattgagcttcaaaattattcttccatttttaagtgtaaaatgtaatttaaaaaattgttttcatatttaacattcgtaaacttgctaagaaaaatttaagaaaattaaacaatttttatatttaatccatttttcttaacaaattttttgccctaaagtaaaaaaaattaataaaagcaaaaaatgtaaaaaaaaaaaaatgacaaaaaaaatgatgaatgttttcaatgaaagaaatgttacaccttaaaaatgacatttgttttatgcaaaaggccaatgacagaaaaaatgtcagcgaaaaacaattcaccaaaaaacatttttattcattttaaaattattttaaaaatttttgaaaattaaatgctttttctgagttgtcgaaacttttcaataaattctttttccggctcaaccgcattcatttttgtgctcaattcgtccattttttgtttatactccgtgtaatttgttaacatttcattgaatgcatccgcaaaatcatttttcaatgttttggagcgaatgtctgaaaaatttaaaacaaatttaaaacaagaaattaaattttaaaattggcattttaccaatcacttttgccacccctcgcgccgccaatgcctcggcattgttaaactgatcgccaaagaatgggaacaaaatcagcggaacgccacttttgactgcctcattaatgctgttctgtccgccatgggtgatgaacagtttcagcccgccggctttttttaaatttaaaatttaaaaaatttcaaatttattttttaaaccaagaattgccgactgttccagccaactcttggcatacacattgtccgccaactttttgtactgttcgctcgtgccaattggcgcccttttgccccatttgatgatcatgttcatctgcgggtactgcttgaacacttccaccacaatgttcttcagtgcaactgcgtgtgcttcgccatcattcatctccaccacagagccaaaactgagcagcacaacgccaccattttcatttgcactgttgccagatttaaatatttgtttggtgtcctgtggaacaattaatttggcattttatttgcgtccagaaaactaaagcttggctaaaaattattattttataaagctaagtccatcctgaaaacacccttgcctctgcgaaaggttgcttaacaaaatttcgattttccatgttggacttggacctggatttcctggacaaacgaccagttaagtcccggtcaggtaacttaactgaaaaaaagtcacaagaaataacaaattctaaaatattatccagaaaatccagggtttttcgtgcctaatctggatctagattttttaatatttgctgcatttccgagacaaaaatcctgaaaattcaagttaccgaaaaatggcctggacctggacccaggaaaaaccaggcctggataaccagtccaggttattatgaatgtctatttcatgacattttttgctaataattttaaaaacccaatattaccccattcaattttggcacaacaccctttggcattgtgattccgccaataaaagtgacacgattttctatgtgcatttgccgttctcgctcaatttcctgctcaacaacaggaaaatcgaggaatggttgcacattggtgaagtacaaatccatccgatactcaacatcccatgatgaaaaacgctcatgcgtaattaattctccgtaaacatttcttgataacagtgaccggttcaatgccctcaaaaacagttcttcctaaattcaaaacatatttaaaaaatgccatttgtcaaaatgccatttggaaaaaccattttttaaaggattggataacataaaaattttgagaaaatgtcatgattttctatttttgttttttaaatgcaaatttgggggcgaaaaattaaaaagcatttggttttaggctttttgaaatataattaaaatttctaaaaattaaaaaatttttagacaaatcatttaaatatccaaaaaattcatcaatttcttgcgtaaaaattcattaaaatttcaataattctctggctcagcgggcatgccttggaatttttaatatttttgccaaattggctaaaaaaaaaatttgtgccaaataattagtgctccgcctctgtttaccaatattttctcggattgttcaattgctttaatatataaagcctcgtttcgttcccgaaaataatccggattttctttaatggcactttcagttgcaaatttatgatcaccaatcagtgccacgtctcttccttaataatggtaggtaaatttaaaaatttattaaaatttcagttaaaaaccgactatcatctaccagagacaaatgctcatcatgaaaaagacactaatgagcttgtaaaattcttccaaatcttttttttaatgctgaaattttctattaaattccttgaattaaaaaaaaaaattttccaccgctacgaaaattgaataaatccttattttcttgaatgccttttgaaattggcaattggtccgttggtatagaaaattaaatttttcattgaattaaaaaacgtaaaaaaattctcacacgaaaaaaaacataaaaattaaattcatccatcatttatttatttatttcaaaaaatatttttatttacataatttttttatctgagtgatctcggactggcatcatctctattcccttatttaatagctctataaaacctcgacttatttattgattcgacgctttgtctgttagatgcaatgtccgccttattaacttttattttgtttttttaatttggcacacctggcattgcgccaactattctgtcatagcccaaatatttccattgcgaaattggtggagatgtgctttgcgtgccgacatattttgtgatggttggaaattctcgaagaacgcttatcgacaaatcgccggtgccaacttcaccaacacccacatgaaatcaaa

SEQ ID NO: 14489 - DNA, 1500 bp, Heterodera glycines
  unsure (1)..(1500): unsure at all n locations
taagcaatcattaattttgactattattagaaaaaaaaatcnactcagattataaatcgcaatattttgggaatacgaaacaataaaaaaaaacaggccttgaaaacttcaaaaaagacatccaaattacttaaatctttattatgaattcatatttttgcgaaaataattatatttaaatgtgacacacacgaataaatttttgctatatattttcttgcataaatattaaaacagaaattttctttaaatcatttaacggcgtttttatgatattaatgagatcatttgattttttaatataatgccaaaataaaacaaacaaacaaaaaattgttctgataaaactcactaaattttgtcacacttggtattttcgctaattttttaaaagttagtttatttatgtcaatatatgatttaaataattaaaaaaattttatagaaatacttacttaattttgagacgcttggtttgttcggatttggcaaaaaaattgcaccctcccaaatgtgcctgtgctctctttcacgctgtctatgctgaagaaccgcgtccgtacaatttttggcatcggcccaatcaaaagtcatccggtgccacaccaaaaggcgcccatcaaattttggtggcacttcagttggctcggcacagtccaattcatggacgagaagaagctgaatatgggatgcataaattactgttttgttaaagaatactttaatgaaagggatacgatacgacacgaaaaaattgaaggattagcgaagaaaaataaacattaatgaaaatatatggtaaatggctactgtaatgaatgaaaatgaaattgtgtaatagccttaccacttgctcaacattttctttgtcggctgctagcagttcagcaaggtgtcgatgcagaacataatgtgtctcggtaataccttcttttgctaccataatcaaaacgcgaaattttggcgaagtgtctaaatgataaaaaaataatagatagaatttaaaaatatatttaaattcaccagtttttaatgatgatttgttgtttatatttgttaatggcaatgcattgttaaaacaaatttgtaaaagagtgttgaataaaaataacaataaaaattgtttcatttatgtaataatttgcttttaaataaaaattattacatttcaattattaaatataaaaatccaaaagtatctattttttatatgcgaagtaggttattggcggggaacaatacgtcaaaacctgtaaaaataatatgaaacatttttgtgtggtcccgtcgcgcacgatttattcaagttttcggcgaatcgtttgctttttgttagcgcgtcaaaacaccttctcggcccattagttaattacccgtcattaaaaatgcaaattacttaatcaggcgcgagtaattagtcaatgcagagattggattgacaatcaaaaaagaatttgtaaaagaagttgcgatctgtcagaattatgagagacaaaaatt

SEQ ID NO: 14490 - DNA, 1209 bp, Heterodera glycines
ttactccaagacgttagagggcaatttgaataacgaactcttaatctaattgcgaatgatatctaattaaaggtagcgattagcagcagaaaaggttcgtaaatactgataggctaattttgccaaggattatcgtcctattttggccattggacttaaaagggttacggtgtacaatcaaaaaatttcggtctcccagaggaaaattatttattgacctttatgcacaattttaatcataaattaggatttaattgtacctcattactcggacgctaaggttctaaaaccaacaaaatcacttttatagtgtcgaattgccacaaatgccggcgaaatatttcgaaatgtttgcgtaaggctagaaaaacaaatctatttgattctttagtggttaaaatattgcgagtctttactccaagactttagagggcaatttgaataacgaactcataatctaattgcgaatgctatctaattaaaggtagcgattagcagcagaaaaggttcgtaaatactaataggctaattttgccaaggattatcgtcctattttggccattggacttaaaagggttagggtgtacaatcaaaaaatttcggtctcccagaggaaaattatttattgacctttatgcacaattttaatcataaattaggatttaattgtacctcattactcggacgctaaggttctaaaaccaacaaaatcacttttctagtgtcgaattgccacaaatgccggcgaaatatttcgaaatgtttgcgtaaggcgagaaaaacaaatctatttgattctttagtggttaaaatattgcgagtttttactccaagactttagagggcaatttgaataacgaactcataatctaattgcgaatgctatctaattaaaggtagcgattagcagcagaaaaggttcgtaaatactgataggctaattttgccaaggattatcgtcctattttggccattggacttaaaagggttagggtgtacaatcaaaaaatttcggtctcccagaggaaaattatttattgacctttatgcacaattttaatcataaattaggatttaattgtacctcattactcggacgctaaggttctaaaaccaacaaaatcacttttctagtgtcgaattgccacaaatgcaggcgaaatatttcgaaatggttgcttaaggctagaaaaacaaatctatttgatt

SEQ ID NO: 14491 - DNA, 704 bp, Heterodera glycines
atatgtacataaatatgtaaaaaaaattcccgaaatatgtaagaaatatgtataaaaacccaaaatatgtacaaaaatatgtaaatacattttttttaatgcttaattaatttttttaaaatttattacaaattgatatagaacctgtaaaatataaacagattgatttggacggactagaagcttttttgaaggcgccagccaattttgaccaattttgctcggaaaaggcaatcaccaacaaacaaatcaaaaattcaatggcacaaatgtatgccaatcatcttggcattttgtattttatgcgccatcattggtattgtgccaatgatggcaacgatgagcgaattgagcagcaacaacaacaacaaattcatcaaaataagtaaaaaacttttattttttgataattaagcaaaaaataaataaataaaattgtgagacaaaatgccataaaaaatgtattttttaagaaagagtccaacggttttccggctttttcgttattttcaataaaattccgagctttttttagaattagcaaaaaaaagagaagatttttttttgcttgaagcataattaaaattctggatttttctgattttaattaaaacccagatatttttttgcagcccttctgccgatcgtccggcatctgaatggcaaagctaccgtaaatatgtacacatttcatatgaatattt

SEQ ID NO: 14492 - DNA, 2215 bp, Heterodera glycines
  unsure (1)..(2215): unsure at all n locations
tgagactgaattggttttttatnagggaagaaaatttagaaaatttgtcggacgaaaatccgacgacggaaagagcgcggaaaagggcacgaattaatggagatgatggcacagcaagagcagaatttgaggaaaaaatgtacaaaattttcaaaatggtagaagcaaaagtattgggaaaggtcgacaaattggcaaaacaaagcgaaaatgccaaaaatgaaaatgccaaaaatggaaatgccaaattggccggcgtgagaatgataatgatggcaccggctttggcattttcggtgccggaaactgttaccgccgagcaaatttgtgacgctattttaaatgggccattgtacggattgtccgatgcggtcagtttttgttaagtgctcgcagtttttcgagaatttaggaatttttggttgaacgattaagccaaattttcaaaatgaagcgctattgaattttcattatttttttaaatttaaaaattgcctcaaaagccgcgaaattcgctactttaggataaaatcttaaaaaaaatcgtgtaataataagtcgtagaattttttatcataaaaattatgaaattcaataaataaaatgaaaatttttttttttttagaatcatttttatggccatcaaatatagcaaaaattcaaaatttcaaaaattctcagtctgcgcttaacagccaaacttccttaaaaattttttacgaaacggactcttttgctacacagattgaggacgaagcactgcttcatttcgtgaaaggccgtagggatttaaacaaaatattgacccatgtgaattggattttgccaaaaggggcatcgtcacttcgttacacagtaggaaagcatattgctgagtttgaaaccatgctaagtctactgtatttgatgcgcaagcgttggcattgtgccaatgccaaaaagcgcgtcgccaaaatcggcattgaatgcaccaaattgcgccaatacgtggacattatgtatgaatatttgttccgagtgcgctacgcaaagccggcagtgatgccgatgttccaaatgcgcggacctcgattgtaattattaactaattaaccattaattaatggaaattgcaggccccactaattagtagtgataaattaattacaaaaaattaacacttcaagattttttgattgtttaaaaattttcataaattcactttcagggagggttagtaaaaatgttaattaccggaacataactagaaagaatagaatttaaaagttgaaaatatttacctactagtttttttcagaaaatttcaaaaattttgaattttttggcaacaaacatttacatgttgagaatttttgaaaaatttgatcgaaaaaaatcgagtaaatgaaaaattgctttgcttgtacagcagggccccaaaaataagggaaactttggccaaattttatcttaaatttcagttcattccgccgaagcttggccagtatcattggcattttaaatgtcgcttcggcattttattttgcccagaaaatcgagcgggtggtagaaagtgtgatgccctggctacacacgctgaaaatactaaatgaaaatgtattgaattatggaggagcaaatttgggtaatataaaaacaaaacaaaaattagggggacatttggacattccgagcctaaattttagtttatttttatttttttgaaaattacttaaaggatttggaaaagtaaaagatttaatgcgatttataaaaataattcattttccaaaatgagttttccaaagctaatacctctttcagaaagtataaaactcaataaatttatcgatttttctttagatgaaaagatttttaaaaaatccaaaaaataatatttattttcactaaatttttaaataaagattaaaaaaacttaaaaaataataatttatatttttttaccaatttttaaaataaacatttaaaaaagaatcaaaaaatttaattaataatttttcactattttttttcattattttacgaatttagaactttcgagaatgacattccatgaaaatgttgtgcaaatggcgataaatgcgaatgacccagccgaacaataccgaccaagcgctgcgaggcttgaaggtgaaatggtatttcctggttttgtcacccccttgaaaaaaattttgaatatttctctagggctaatttttggcgctgatcaaga

SEQ ID NO: 14493 - DNA, 4367 bp, Heterodera glycines
aaaaaaacggaatctatccttgtaaatgttccaccaaaatttgacagctccttctcctccgtccaacgccttgagaagcacatggccggcgcgcactgctccttcggcacccaccattgtctgttgtgcggcagtcggttcaaatacgagtacaatttgttcttccattaccgccaagtgtgtccgtacacgctgaaaatgatcagtgcagaaatgcgacaacaggtgtcatgaagggcggggcggaaaaaggccgtagcattcattttatatttactaaaaaacatttacgctcaataaattctcaatttaaaatgtaagtccatacggcattttaaaactattttaatatatattttttggaatatttattcattttattccctaaacattatttggcacacagttggaatcggtggacctgaagaagactgtccgtcgaattgccgccgcctcaaccgcgtcgtcgcattcgcctgttttgctgccgcatctccacgccggcacttatatgccaatgccatccgcgctggtgcagtcagcccactccgccagcagttgggtcgctcgttgttcttcgtcggccgccatgcagcaacaattgacttcatctcatgacgctgttgccgaagatgtcaatggcatgccgccaacctcttcctcctcgtccgttgctgtggccaccgccgcttcaactgccgatggggaggcacgcgtgccgatgctcgattcctcctctgttctggacgccctctcggcaccggtggtgccctcctatcacagtcagccggagcttggcgactcggtgattcggcgccaaatgatgaagaaagtatgcgctttgggtctttattttgggaacaaaaaggtcgttcccgtaatttatttacaatttcgattttttcgaaataaaattatggaaatttcaaaaaatgttcataaataaaatttcaaggaacgttttttgtgtgtctatcttataattcggcattgattttgcggtgttattattattcatttattaaattctttttagatcatccaaaaacatcgccgtcacccgggttcgttctccgcctccgcaaaccttggccctcttccgcagcaacttttacagcccgttgtccgtccaaatttgcccgatggaatgcaatgtccaatttgtggtcagttcgcgccaccattaaatttgtatccgaatctcacaaatttcttttcatttttgatgggatgggttttagttttcttcatttactcctaaaataatttttttttttttttaaattttatggatggacatgagaattgtacttttaacttggaatatgttcaccacttttcctccccctcttttagcaattgtcttctacgggctgaaggtgttggtccgccatttgcgcgctgcccaccccaacgagtcgtccgtctgggagcacactttgtccgccctgggctcctcctccagcggtgacaacggtggtgcccactgtggcaatttgaggctttcatcagcgacaaaacacagtcccagccaattgtccacgacacggaagaggaaaatttgtaaatttttggcacatattttttaactgattataaaatatgaaatatgtccgctaattccatttttggaaatttcagttcgcgacagcagcgaggaccaaccaccactgctggaacttgctgattgtgtgcatgtcgactcggcaacacaactgcgacaaatcacatccaattacactgaggtactcattaaataatgattatttttgatttggactgtttcgctagttttgccatccctaatactcaaacataacagtgcacccgattcaggagttggggctttttttaacctattttggctaatactaattcaagaatcttttgggaaatcctttttaaatgccaatatttttgaattttctttttcagcagaatggacggagggaatagcagcacaaaacgacaacaccaacacgaattggatgacagaagaaaaaatgaaaatttcctattttaatcaatattttttgcaccttttcatttggcaaataaataaattactattttttgcaatttcctttttcattcatttgctaataaatgatgtagtccaacatttttgtgatttcctctaatttctgtttctttttgcgatcaaacaaatatatgtctccagtttttaatgaaattcaggcctaaaaggcattgttggcaacaaaagtgatgagcagcgcaaaacggagcattggcgacgccggcggcagcaacgacaaagcgggcacaagtcggagtccagcaatcggcaacaagcagcaaccgcaccatcagcaacacaaccatcgcattcgcaacaacacgagtaacagtcgttcgccaaccaaaaagcggagggaggaggaagaggggacgagagcgaaggtagcgacgaagaacggcaccgccggcagtggaagcaaaagtccacgacggcacagccaacaccatggcgggttgggtgcggcactggaggaaatgcgggagcgcaaatgggccaccatcgccggcccgtcctcatcatcgggcgcaaaggcacagaaattgtccacggcatcggcaaagtcggtcggggagaaggcagtacatcgccaacagcaccaccacaatgacaaaccggcgaagaaacgcgagacgaagggcggcgcacagcgacgggtgcgtttggttgggtggcgctttatattagttaatgtggtcaatgtataaatttccgctgttgtgttcgggtcgcgaccaaatccggagaattttctcagcccgcgagcatttcgtttcccgcgctccccttaaaaattttttttataaggtttcgtttcaagaaaaaaaattctatttttcaaaacctaaaaaataaaaaaaaatttttgaaaactcagttagatttttttaattttcggggacgaagcaacgaagtgcatatttatcggtcctttctttggttgacacagaccaagcaaaaatgcttcgatgatacaaaacaaaattttttgaaatgaccgacaattttttaaaacacgtttccgtttcagttgaccttcgccagcaatcacaaagccaatgatgacgacgcggaggatgacgacgacacggcggcgggaccgtccggcgccgccgacgctggcacttcgtacgcctctgcccaaatgcgggtgcttccgctgagcaaagtgcgcaccatcatggaggcgtcgccgaacgccaacgaaatgaaaattagcggcgaggcaatgttcgcgatgagcaaagcggcggtgggtgaagaagcattttagaatatgatatgtcacgaaacaaattgggcagagcaggtcgccccccccccccccccgaattttttttttaaatttccaagcagaaatttttattgattcccgggccggggggcgacaagacaaaaagtcgtcgcttggataaaaacggaaaatgcaccgaacaaagccctaattctatacggcctcagcctttgccaaaaataaccgctaatatttcaaaatgatttcaaatattcaaaaattcgtcaatatttttttataattttccaaaattaaaaaatggatcaattagtaattttatcatttttggaaagccacttcttcaggaggccttcatttcgatgcttgccaagggcgcttatcagcaaatgctcaccggcagtcacacacggatcaattacaacgagttggccatgttcgtgcatgacactgatgagctgaacttcatccaaggtgaggctccaatttttggaaatctctataaaaatggatgttttttgttttggcctcttaacggaggggtagagggccgaaatcggtcagttcctcccgccaactccgttccagtcaagcacagaacgccataaactcttcggtaatagtaaaacttagtccccccccacccaattttcgaaaaaaaaattatttccaacagatgaaaaatgtttccaagggttatcggggtaaaatgttttaatcaactaagtgtaatagcttctaaacattttgtagcttttcgaatgaagtcaattgaatggtttttcatctttttcatcaataaagacgaaatttatgctttaaacttggctggaatggactctcgggacggactgagccccccaatcggaaaagggtgttttttgctttgaaaatcccgcattataacccgccctcatgttttttaattttttcagatattctcccgcaaaaacacaaattttccgaggtggacaaattaatgacaacgaatcgacggtgatcacgaagaaggaaaggagcgtctaatgaaaagtgatcagcacaattgatcttcatttttcttgtttttattcg

SEQ ID NO: 14494 - DNA, 4389 bp, Heterodera glycines
  unsure (1)..(4389): unsure at all n locations
tttctgatcattccaatgcgtattaatgttcttctcgtttcagcgtccaaatcagccatcaaagcccattccaccgccaaatccaccgccgccgtagccataacgcttttgccgaagtggaacacttaaaatttaatttaaaaaaggaacaaaaaactttttgaaaaatcttcaaattataaaattaggttgtttttttttgcacttttgaagcattcaatttttaagaaataaaacttccaatttttgccgaaattttcctaaaaattggcggaatgtgaaattacggcgtcaaaaagtgccgtaattggtctggcacagccattagaaagaaaaatggaatgccaaaaataaaaaataaaaatttatacctttcaatttgattgtccactgctggcatggcaattgttaatgaaaggcaaatggcaattatcagcagaagaacaaaaatggtggacgaagaagacattttcagtgtgaaattttgctgaaacaaaaatattctaatgatttccaattaaacactatcatctgcctttaaatagaaaggtttgcgcacattaattagtaattaatacttgcaaattactaattaaagacaaattaggtgcacaagtttttgtaaaaaaaaaaaatccatccccaattcgatgaatgaatgaataaaattaaaataaaattcatcaaattacgtgatactcttgatactctttggtcggaaacaacaaaattttgttcgttgaatccaaaacactttgaataggcttttaaaaaattaaaaaaaaaaaattcaaattaccatttttaattagaggtacaggaaaagcacacgtttttaggacttcaagacgaatctggcattccacagcgtaatttgatcaaagtaacgccagaatttgttttttcataaatttttatgcatttttagggaataacggtccgatcgaacagcattcttttaatgttcgaatgattttacgaaaatgacaaggcaaaatcatgggaaaattttgccagttatttgaaagaaattaattgttttttctaattaaaaaaaacagtttcaaaattgtaagcatttcgtaagttgctagtggtgccgtccatccgctgacgaaaaacaaataaattatgccaacattttaagtgcgtgccacgtttttttctgcttctctgtttatatacaaaaaaattttaatgtttgacattatgaaactatatataataaattgtttttacataaacatattaaaaaaaaatccacgaaatataacaaaaaattaaaattaatttcaattaaatattatttagcgatttaataaatgcctcctcatttttgcatctttataattttattcaatctcatccaaatcacacataatgttccgccggcgggcctacgtggtggcttaagaggcggtaatttttaaaaatattttaataataaataattcaatacttgtatgagggggggggggtcaaaaaaaccatccaaatgaaaatattttttgatataactttgcttaaacgcaaccaaatttttaattcttcatatcattcggaatccctaatttgtaagtgttctctattattcaaaattttaaaaaagtttcgttaagttttaagaaagttatggcttaaaatgttcaaaaacttggtttctttatcttttcagtttataacttttttgaaacataagtaatttttttttgatatttttcagtataataggaaacgcttagggctagctaaaaataccaagataataaaatttggttcgttttgggcgaagttatgaataatttttctgtccaaaattttctatttgatggttttttgactaacgtcccaacccaaaaaacaccccaacaattctttccgatttcagtgttcaatgatgtttattggacttttcaaaatcttgaattttttaattttccacaccatgaagcacgccatgttgtgcttgaccaattatatttggaatattttatggagaaaaatgagcaaaatggaaatgaaaaaaggctaaaaattgcaacattcacccttttttatatgattcgatggaaaattgaacagaaaaaacaatttttattgtcaattcaaagtgtggatgaggatggagaatacacaggcagaacattatatgagaaaaaaaaggctgctataagagggtaattcatagtgctgaactcgagaccgagacttgacccccgagactcgagaccgaaagtcgcgagacccaaaaaactcgagacgcgaggcttttttcaaaaaattttcttattaatttaaaaaatcggttaaaactttcttaaattgaaaaaataaaaattttaaggcttttcctaacaaattttcgcttttttgatttattcaaaaatggtcaaaaaatttatacataaatatgtataaaaaattatgtataaaaaacccaaaatatgtaatttttttggggaaaaaattcttcgtaaaaggtgaaataggcacgaaataccattaaaaaatgaccaaattgggcttagaatcacattttagtatttttaaaattaacttttgatatatcttttttgaaggaggaaaaaaaacgattttaaagggtaaattttcaattattatttaattatctcatttatcgatatggtgccaaaaaagaaaacaaagcaaaaacataggggtcagcaaaaaaaaagtgattggaatttttataccaaaatttatttctttttttatttaaaatttatataaattttagcataatctgtgattatataaaagaagaaacatccataacaacattatgtttaatggtgattaggaaaaattatttgttggaagttttagacgaaaaaagcccaaattttaacaaaagtcacatcgaatcaccggctaaaagtgacgaatgttttgacgaatcagttgctgagcgcataattgatgaaaataatgaaggaattgttgaatggatgctcagcgatatgctccacttttttgacaaaagacagcgattgaacaaatatttggagtaattaaaaccaattaaatttttattgaatttaacacattttttagaataagaaatttatattattttaaaaatatacaataaataaataactaaactttaatttaataaaaatataatgaaaaatattttaagtaatttaaatctgataatttttataaaatttaagacatttttttggaataagaatactaatttatttaaaaaataataaataactaaaatttaattaataaaatcaaattaaaatattttaagtaattaaattaattaaatttttatttaatttaagatattgttttgtactaaaaaaagttatattattataaaaattaaatataactaaactttaatttaataataatataatgaaaaataatttgagtaattaaaattaaataaatttttattgaatttaaaacaatgggattttantacattaanntaataatataaaagtaatattatatatttatattaaagacagattttgaaaaagaaagatgaaaatttaaagttcgatgcatataataaactggtaattctgttcggaatcgctcgatcggcattgatttgcaacgcatattttgttcaattgggtgaaatttgtaagtggggagtagaaatgccaaaacatgcaaaataatgatcagtaattagtagggttataagtagggtcaagatttttaggttttaactaaattttttgctcaattgatttgaagaaaggagctcaaaaaacgcatttctgcattaaaaattttcgattctgatgtcattatcggtcactagaaatcactattttgacgacttcgtctctaaaatagttaaaagtcactattttggcgttttgtcactattttttcactatttcgacattttttggaaaattccttaacaaaaatgcagcaataaaaccaaaaaaaatacacccctaagaatcgagctaaaatttttcaaaatatactcctgaaaaattttctcaaaaatttactttcttggcaaaaatttttaatttagaaaactttttttaggtaactattttggttttttgctcttaaaaatcccagtcctcagtgaataaaaattatttttgctcaatttttggctgaaaattatgtcactatttgttactaattcggacttttttccaccattatggcactattttggcatttttactcactattttagttaactatttcgagatttttcgtcacttacgcgaccctatttataagcgcataaaatatgcactanaaaccagaaaaaggctaaaatatgcactannaatatgccttaaattacttanaatggcttttaccatcanaaaatgacaaaattgtgtaaaatacagaatt

SEQ ID NO: 14495 - DNA, 3097 bp, Heterodera glycines
cctttgtctccaatgcgaataatttgatattataaatttgaaagaataaaaataaatgcttagataaattcttttgatccatcaaaaagatgaatttataatttagaaaatttggaccttaaactaaactgtaataaaattggatcaatagcagttcgtacaattggaagttcgtacaatagacagttcgtacaatataaatttttacaaaataatgcctaagcctaagcttggacctaagcaaaagcaagcttaagcttaggcctaagacccggctcaaaccaaagcttaacccgaaagcttatgcttatttgaagcttttataaaaactgtctattgtacgaaactccattgtacgaactgcctttgtacgagctatcaattgtgcgaactgccatgatcccaataaatttacagcaaaattaattgccttcaccactgcgctccctagggctcggaaaattgcatttgaggacccagcttaagaatattgacgaacataaaaattcatgattcatttttaaactgacaatgttattgaaaaagtgtatttttagactttttagaatttttcagaatttttgagactattgaaaaattttgaattgcatatttatttaaatttattaaaaataataattttgtgtgtaataaagcattgaacaaaatgatagcatatatcatttacatttgctttttcttatattctgtttattttacttctataaaaatcaatttttcactccatttatgcataaacattttattgcctaacattataacacccacagattcacccccccccccccaaaaaaatctatgtttaactatttgcataattatcattattttattatttcattatatagaaaactattgcatcattaattaccattgatcgtctctatatttttttatttgtaaatatgacctaaacgcaaaaatggcctaattaataagataaaacttcattcaactaattttccaaatttgtgtttgaacatgcctataattatgtgttttattttaaggcggcaccttcaaaggcttacaccacccaataggtttgggaaagtttcttggagcggcaacttcaaagggaaacagccccacatggtcgggattttgcgggtgaaaatcccgaggcggtaacttcaaaggaaaacaaccctccaataggttagggattttggaggggtccttccgttacccggacggtttcagggtcatatactattggcgcctcaatcgtcacctaaatcgtgctaaaattaaaatctactaaaattcctaatccaagttttgcacctgtgatgacttttttcaatctgcattagctctgttcgatccgtgtatatggcgaaaatacgagggagagaaagtctgggaaaatggaaaaaaaggcgaagggcaaaaaagcaaaataaaaatgttatcggccgattggcctttgctttaaagaattgtcaatttgctctttcaatttttgagccaattgctgaaatattgggtgactaattttcctatgtcaaaatttgtcccttttattctgctccttttcttcgtgtgctcttacgcatttttttgactattaaaattttctcattttacattttcttcacttcacttcttttcttggactcaatcgaataaagcgcggttacacctaaggatatgcgagaaatgagttttcccgagaatcaagaaacgagagcgagaaatgaccccgagaaacgagactgagaagcgaaaaacccgagagatttctcgagtcgcgaatcgagactctcgcacatccctagttttcccacatttgcgcctcggacatttgcgcctatgtccaaaatcgggttcaaactgaagttttttcaatccatgatagcctaaatagcattaaatgatagaaagtgattgtatccgttaaactgataattttcgaaaaaatcatcaattatccaaacaacagaattactgctcctacataataaactaaaagactgtttttttaaatttcaattctgtttcggctatcagacagggtttgaaaaagtttttttgccacatttaaaaaatttcaagatggacaaaatgctgttgctcttcctatttctgatcatcgtcatcggattgatcgctgctgacaaatgcaacaacttgtatgatgaatgaaatatttgtaaacaattttaatcacttgttttagtccaaggctgaatttcctgtcgcttcagcagcagcggaaaactcgagaatcgcgttgctgctcaatgccaacgagtcgcgtcatgttcggttcagaaactggtccttacgacaaaggcgacgtactttgttcaatttatcatcaaaaacaagtgagtcagtaaaaaaaattctgcataaatttaaaaaaacagaagaaaacattaaacccgtttaaaactttatcaaacaatttttttttggcatttcgtgccttttttctaaaaacttaactttcgtgtttttgaggttatttttgaaattccagatcatagacccatagggctatatttttttctttttttttgcattttttattgttaatttccaaatatggatttattggcggaaacccccaaaatatggattaactgttaaatttatgtatccattaagaatggcctaatgagcagatgcagcggagtgctgttcaacccttctcttgtcctcacgtgtgctcatttctgggaaaaggcagagaaagacggtgacggatcgatggcttatgcgggaatcgaggatggacaaagtgtggaggagggcgtttccaagaaggtgcagttttacaataacaaaaattactacccacttataattatggcaaaaacccccaaaaatttaatttttagttgaatgattcattatgcccctaaccttacccagctatttaaatttgaaataaaaattgaaatatcactttattcacaaagtcaaccatggtttagcccatctaaacaaaacaaaaccatgatacaatattcaaatcttgatttttctattttttgtttttaaatttaattagccattactctgtctaaggacgataataggggcgaaaaacttaattataaaattt

SEQ ID NO: 14496 - DNA, 1913 bp, Heterodera glycines
aatataaataattttttttttttttacggatcactccaaaatgtgcccagaatggggttgatcacaaaagcaacagttgtccagtcacaatcatcagctcatttcgtgtcaccagctgaccccgccggttcggcgggcgacacttcggccaaattaacctaaaaatagaaaaatatttgtaaattaattaatagttaatttaataaaaattgaggaatagaaaaagattaattacataataatattaattaatagagttttaatagagttaatttaatattcttaccggaacaatggcagaagcaccgcctacagcaaagccaagaagaaagcgaaagggaaggatagactaaaagaaatattttttcgatattctcagtggatttgggaggcggaaaatgcgacaccaagaaaatccgacaccagaaaatgcgacaccggcggaaaatgcgacaccgtagaatttttttaaaaaacggaaaatccgacaccgggaaaatacgacaccaaaattaaatttttaaaattatttttaatttaataaatgaaaatgaactacttattttccttaaaatcgaacattgagctataaaaataatttaaaatgatttaagtaatataatataaaatgaactatgattagttcaaggcaattctcatgaccctttagtaaagtggacagcagataatacaaaaaattcttatcagtttcccatttgcatatggacgagaattttcatcatcggcaattaattccctcaaaatatttacccacccacccattctcctgtcgatttctgcaatgtctgaagaaggcgaaattcgtgaggattcgccggaagcaccggaggcagttccacctcaggctgatcagcaagaagttgatcagacaatttttcgtgagaagaaatcgacgcacaaaaaaacaattcttgtccacgacggttatgagtacgggttcgacaaattaagccgtgcagaccccagtaatatttttcttttttaattcttatccgtttgtgtaagacattgagttctatcgctgtctttaccgcggagttcgtggcaacgaatattgtggtggtcgaattcacgtcagttcagcttggcaacatgatgcatccggccgattcaaaatgggacgaattgccaatgacacccatcgccatcccaaaacccacgaatcggcatgattttcgccaatcttattactttttcggcacttacagttggggggggggttagtgtaatacaaagaaaacaaagggcaaaaacgagtttttagttaaagtgccacattttcaatagataagggacgcgcaattggcactacaacaacatgctgtggctccaaatccagttcctcctcggcaagctgtttctcaagcgcgtggcaatattcccatcaatgtccgagcagagcaggggacttcatcagcatcgatgtcgcgaacttaccgcaattacgttgcgagggaggaaattgaacgtggcgacgatttgtttgatctcgccgatgtctcgcaaatcgtaattcctggtcaccttcaagatgcacttattcgtgacaacgttgttgatgggcagcgtttgttcgtgtttgcttctccgtttgcaagaaacattttggcacaatatggtcagcatgtcgcagtcgatggaaccttcaaagtgacttaacccgaaaaattcgaatagtttaatttttataatattaagtgttccccagctcattttacccaagtctacacaatttctgtactgatcgataaggtggccgtcccctgtgtttatggcatacttaaatcaaaatcagaaaatacataccttaatgtttgttttagattttttttaaattagtgatcagtgccaaaatgtttaagatgttccaagcagttgttcaatcagtccca

SEQ ID NO: 14497 - DNA, 2674 bp, Heterodera glycines
aaaatgttctaaggcaattttttggctaaaaccgatccctgacgagttatgggcccggggactcaaatgtcccgctgaggccaaaatttttttctatttccgggaaaaaatcgaaatttttccgaaaaaaataccagtcgatagagctcgaaaaactatgttttggaagtggtctccgtttctctgggaaaaatcgttaaaaaatcctaaaattcaaaaacccgaaaaccgttttttaggcctaactcgaaaaattttgaaaattttcgaaattttaaaatttcaaaaaatcgagctttgaaagctctacaataagttcgctgaccaccccccgctcagatcaaaccctggcgcggtattcacctggtactgaagtgtactttttgagcacgcttcagttgccattttttgcaggccaggggtttgctcaaaaaaaattttaaaaaatacctccttgtagaggacccttaggcggagtgccctttcagcgggcactttttgattcgagttttacaaaaaaagttaggggccgtcaaacgcacgaaaaaatgagaaatcagtccctggtactcagttggcgctcggatcaaaaaacctatagttttcccgaattctcctcaaaaagttgtaagacccttccactactttcagacccgtcccattagccgttaagctcaaattagtttttgaaacgaaactccttgtcaatataacgtatatactagcgggtgcgtgaaccgtcggctatttagctgggaaaaagcgcttcgcgctttgggagcttcgctacctagattagctatcgggttgtgaaaagatttggaatttttaaaaaattatcagcgatttttaggccgcttcgcggcctcagacgggcgctacgcacccgttttttaaattcggtgatttttaggctgcttcgcggcctcagacgggcgcttcgcgcccgtttctaatttttgttgtgcttttcggccgcttcgcggccgttttttaaattgtgttgagtcggacgggcgcttcgcgcccgttattaaattttgatggactcagacgggcgcttcgcgcccgtttctaatttttgttgtgcttttcggccgcttcgcggccgttttttaaattgtgttgagtcggacgggcgcttcgcgcccgttattaaattttgatggactcagacgggcgcttcgcgcccgtttttaaatttgttggccttggacgggcgcttcgcgcccgttatttaaagtttgttggttcatacgggcgcttcgcgcccgttattcaaattttgttggccttacagagattagaagaggtacaacagtgattagaagaggtacaacagtgattagaagaggtacaacagtgattagaagaggtacaaaagtgattaaaagaggtacaacagtgattaaaagaggtacaaaagtgattagaagaggtacaacagtgattagaagaggtacaaaagtgattagaagaagtacaaaagcgattagaaaaggtacaacagtgattaaaagaggtacaaaagtgattagaagaggtacaacagtgattagaagaggtgcaaaagtgattaaaagaggtacaacagtgattaaaagaggtacaaaagtgattagaaaggtacaacagtgattagaagaggtacaaaagtctaacttgttatgagatgtacaaaaataatttcataattttaaatataattttatagaattaggtttatttaaaaatttaaaaaaaacaaaataataaaaaatctaaaagtttattttttaattaataaacggaataatttattttactttattttgaaatgaattattatgcatccaaatttttaaatctaattttgcttaaaaataaatctatttttcaaaagaaaaattaaatttaattaaaataattttgttaataataataaaacaaaaaataatttctttaattaaaaaaaaataaatttaaataatttaaaacaaatcttcaaattaattataaacagtgaaaataacccaaaaatgcatagaaaaataatgtacaccgtccgggtccgaacctgccgcccccccccccctcctcataagggtgcctcagaatccccaatcacacagggattctgaggtcttaaccatgtcaaaagtaaaatctgattacgtattcgtgatcaggggcccaaataacccctaaagacatattttttgaagatttttggtgaaaaaatttttcaactcaaaaatcctatgctcacccctttggtccataatcccaaaatcggttttatttttgtaacaattcgtaagaaagtgataaaaatgtaaaataaaatttatattataaagaaaaaaattgcggatttttgtagtattttaagtttcaaaaatttcttttcagaagggggttatgaatttttttctgaaaaatcgaaaattttcagaaattctggaataacttgttttctttttaagatagaaatcccaaataaatcccataaaattctcctgatttttctctatttttataatataattgcacgaaaattgatccacccttcgatttgttatgaattttcaaatattaggccaaaatcccgagggccaaaaaattgccaaaaaaaaaggaatttttaaaaaattccaaaaattagaaacttaaaatagacatcatattcgtactc

SEQ ID NO: 14498 - DNA, 3184 bp, Heterodera glycines
  unsure (1)..(3184): unsure at all n locations
aataagaacgaagaagaacatttatgcatgataattacctcacttgttgtttgagcattattgaaacgagaaatgttttatgaaacacggctcaatttaaattattgtcccgataaattaaaaaaatatttaaattctatggaataaaataagaaaggatgaaaaagtttttagctgcgattcattacaaggtgaaattgcatttttttagctgaatatacataagtagagtgctcattttgcagcatatgctgttttgccactgctgcacagttcgccagcactataattttttggggtaataaaacgcaacttttaaattttaatcgcagttgaaaaatagccttttaacaggtttcttcgctcaaattcaaccaaatgcatttttaatttaacattgattgtgagtattataatattttagaagatgaatgctgaataggtcgtaataaaataatttttttttaaatctgtagttaatcaaataaatcgctgagtttttcaaaaaattttggtaacgtctggcggtgccgttaacgaaatctgttaagaaaattggtgcaaatcttcaaatacattcattccatttttggactgggcattatttttggcttttcgcaatttttttttgcttcagattttattttttggcgaaaaaatgctaaaaattccagtaaaatacacctcccccccctaattcgggatttcaaaaaatgtaaaaatacaccccctaaaaatcgagttcaaattattgaaaacgagtgattaagctttgttgacagattctatgtttccattaaaaaatttttattttttgcagtaaaatccccatgaacagcatttttgtcatttgcattgatatttatgatggagttgcgccctccccccttattttatccgaaaaatcgtgttttagcagtaaattaataaataccggtttatttgcagtcaccattctgattcaaggcatggcccaacaagtgctaccggacaattgtaaacagggctcaggtgaaattttcaaaaaatgtcacgagcactattgcttatttcataagttttcttaaaaaaaagtaataggacaaaatcactcatgatcaacataattaaatttaaaaatttgcacgaaatgtcatatattgtaagctaaatgtcgccaaatctttaagaacgcaattgacaaagcctacaatgccgcaagacaaatttatcaacaacggaacattggtggcactttctttgcggctaaacacttagagatcgtgttcgagccagctgactggccaatcagcggggggtcgtgcagtgctgcagcggctattgcgctcctttcaaaggccgaaaaggaactggcccgagttgacactgtggtgtcgggaggagtgctgccaaatgggccaatttcacatgtcagtggcctggagcttaagatcacgggcgcaagaaattacaatatgcgccggatactactgccaaccgcaaattttggagatgttgccgaattgccgccgaacgtaacaaatggcattgaaattgtttttagagcaaatatttttcaaattatggaggatatgcatttgtctatgacacaccttctggctgtttagtttttattgttgagaaaaatttaccgctttttattctggtttttattactctaatgcttaaattaaaaaaggaccattaaagctttaggtagcagtaaattgtcattccatctgttttaagcgatgtttttaagaatttcagactatagccaattgtaaatttaaaagtaaaaaatgaaaattataatgagaaaggacatttaaaaaggatttatgggaagagagaggattcaatatgatgaatggcaagaggcagggctggttcccaggttttgaaaaaatattcttctattttcaaaattttagaagtcaagatttcgtgtttatttgctggggtttttccaaattttttgaactgtgggaggtccggcggagccgctaaaacactgctgaaattatgaatttagggtattttggaattttgaaaaataggcattttcaacttttaagcctaattatgaaaatgtaaaaagttccggaattttgtgctaaatggtcgaaatgcggaaccggaatatggaaccagcccttgtaagaagcaatcaaacaaattttttatgaattttgtttgatgtataacagagagaagaaccatatatatatgaagaaggtaaacgaaagataccaagaatgaaattttggtttgatttgataaaaaacagaaataagtttggtgttgtgttgtgtacgaatcacggactaacaggcattgcagcgtattcatcggagaccatttcgacggcgatggcaccggcggtgtttgtgtcggccaggacaacggccggtgattgggtgttggaagaaaagtccaaaggacgagagacagacgacgaagaaactgttagggatgaagcgattttttttttctgaacatggcacgggtatgggataggccgatgtatccccggccgaaacgtcgccggatgttttcggaccattacttttttttgttgttaatcaaattacgctttgttgatgctttcgatagctatgcgttttgttagtgagttcgacttggacctggatttttgtccaggaaatcaaggtccaacatgagattaagtccaggcttttttcaaaatgtcgaacttatttaatttggttgagaaaaaatgatggtccaaaaactcgtctggcgacaatttcgacaacaatgttttgtcctgctttggagattataaaagcattatttaaaattacatatatcccctgcacaaaattttttttcattaaacatcaaaaaattccaatacctactnttatttnnacaaatttaaattcttatantncaaacatnctcccccnannaaaattanaatttttaaaanattttnttaanaaaanttnnntcaatttcacaaaatactcctattaaaacaatctcncanataaattttaaaaaaaataaaatnactcatcacntntaacaaacacnctccnccccttttnnccatatnnacatttttcaaaatnaaannnccnncnttntnnanncttctcatgcttnncctcctcanantcntcntcntcctcaacttagtagtttcgttggcgattcattgacgaagaatcagcag

SEQ ID NO: 14499 - DNA, 988 bp, Heterodera glycines
tatttaagtaattagcgcggtgttaattattttgaatgggcgacggcgtgcgaaggaggcgtctcgacaatcgatgtgtcacaactaatgaaaatatcccggaagttttccgggatcgctgattacggaaatgacaattatttgaatacttagttatcatttattgatcataatgggttttatatttgtgatcagtgatcagcgactccaaaaactgccgggaaacattcatacaagttttgaaaattccaaatcgtagtgtgcaagtttaattgatggaaatacatttttggtaaaaaggtcattttttctattacaatgaagaaaagcaaatgaagacattttaagaaaaaaaaatgttcatacagtattacaatttgaccagggatgggattgatatgtcgttcatttgtgcaaaatgtttaaatgttgggcgaaattattaaaatttcaagattttcgattcattttcgaaaaaacatgaaaaaaccaaaaaaatgttttagcttgccaaactctttaaacctatcaatttgcagtaataaagataacattaagttggggctctcgcatgataccaaaaatgaattaaattggtctgttttttgtagaaaacagtacgaattcaatattagttttaaaattaaagcaaagcaaataggtaaatcaggtgaagataatgggattttatgagttgcacaaatcatctttaacaacaaaacaacgaaaaaccaaagaaaaatatggaagaaaaagcgacagaaacaacgaaaattgcgacaaaaaaaattaaaagaggggactgacaataatgagagagagaaagagattcaatcattcaacaaatgctccaggcccgtaaagtccaaaaatccaattttttaaatttttttgattatgggtctgtctataagagaaaacaatacaaaaaaaagtaaatggccaaaaaagcaaatacacaatatatagcacaacgcactccgtcgct

SEQ ID NO: 14500 - DNA, 2326 bp, Heterodera glycines
cattttacgcgtcccatgacgttttacgcgtcccgtgacattttacgcgtcccgtgacattttacgcgtcccgtgacattttacgcgtcccgtgacattttacgcgtcccatgacgttttacgcgtcccgtgacattttacgcgtcccatgacattttacgcgtcccgtgacattttacgcgtcccgtgacattttacgcgtcccatgacattttacgcgtcccgtgacattttacgcgtcccgtgacattttacgcgtcccgtgacattttacgcgtcccgtgacattttacgcgtcccgtgacattttacgcgtcccgtgacattttacgcgtcccgtgacattttacgcgtcccgtgacattttacgcgtcccgtgacattttacgcgtcccgtgacattttacgcgtcccatgacgttttacgcgtcccgtgacattttacgcgtcccatgacattttacgcgtcccatgacattttacgcgtcccatgacattttacgcgtcccatgacattttacgcgtcccatgacattttacgcgtcccatgacattttacgcgtcccgtgacattttacgcgtcccatgacgttttacgcgtcccgtgacattttacgcgtcccgtgacatttttgagcaaggtcaccctactcccgcttcaccaattcgcatctcgtcatgtgccattgtttaggtctgcttggaaattgctggcttttgtctgcgttggctgtcatttctcaacggcccgacattctcgagaagttgttcattacgaaagagtacaatcatagaggggtctacgaagtcaggtggtgacaactttattttgatcataccgataatcggttttaaggctttgtattcacggaatttggcggcggattatcgtcgacgattttttcccttgtcatcggtcaactaaacgccaaatttttgcggtggggaggagaggccaactttgggtgtcgctaattgagaatgcacttgcgaagtataatggcaattatgccatcctgaaatccggactaatttcagaaggtataaataaatttagtggtttgggcggttactacatgcctttttttaggattttcaaccctcaccgggcagccaaccctttttatcgaccttgaatttttgagtgactccgactttgacatcgtttgggctaagctgttaagtgcgagacagctgttctttttgatgtcatgttcttgtggtgcaggtcagtttttttgcaaatttatttcgacccttcgttgtcccattttccaaagtaaatacaattgtcgccgctggcgactgaacgcgtggaaattgggggacagcccggaggatcgctcggaggacagcccggaggaccgctcggaggaccgtttggaggaccgcccggaggaaagaaatgaggaagtcctgtggaggacggaagaagattctcgaatgttcccttgtgatctttgtgattaatattcccgaagtttccccatttttcatttcctttcaggtgtgttttagaattttccctccctgtccaaatctcatatataaacccgaatatttccctttagaatcgctctcgaaaaatcattattccatcctttgattgtgcgctattccgacaaataaactacttcttgtctaagaagttttttgttccgaaggtgttcctttttctctacggtttcgacattcccggaactcagagttccgtgtttgcatttgtctaagctcgattgtcccgaagtccaccaggacagttcaactaagtctaaaggggctgtccatcccacaagtccattccaagagtgaaaaccccgtcccattcgctaagttcaataacattgtcgcggagcgtgtgcaaaccgacagccgaagcgcaaccgaccagtccagcaaacccgcacctcactcgcttcctcgacaagtggcgctcctgggaacgcgataactggcgctcctgtaaaacgaccacacaacaagtggacctcccgaaaagaccatcatgagcaacctaatccggatggtactgggcccacaagtggcaattcttcgtcaacgagtaaacacggcacggacacatgtcgaccgtgaggaagatgaagaagtcaacaacgctgcgctgatggaagcaaaagtattgctgttaaaagtattgcagcgtgtggaagctgaactagcgaaatgggaaaacgtgatttctggacttcaaggacaagaaaaacagacagaacaagaacgactcgagacattcatcaacgaaagagaagtagcgaatttgctagccgacgcacatgctacgatggatgaaatactagtggcactt

SEQ ID NO: 14501 - DNA, 2270 bp, Heterodera glycines
  unsure (1)..(2270): unsure at all n locations
tagcaaaggcaacttcaccgttcaggttgccgactcatcatagtcaaacaaagacacttaactaattactcaactaattacccttttctcctcaataattttcaggtgctttccccgagtataatgagtgacgacgtttcacctgatcagttccttcgcggccaatggcaaaatgcgtcgaagccatcccaaatgggcggctgaccattaaattcactaattggattgattggtcttcccgtttctttaaattttattatttatattgttaaaactcctcaataaaccacaaatcaagttaaagaagtgatccatgctttttaggccgtcaaaagtttaaattttaaaattaaaaatagtttattttcccgaaattgccaccagaggtgcttttgccataataaattgttcgttttcataattacaatggcttttccatcattgcttttgcttcgttccgtaggtgtcgttgatattcatcgcctgtaccattccggcactaaaggaactccccgggggcagtgcccctgcggggtattggcgattgatgttcactgattggagcatttgtgcattccatccgccatccccgcactgttttacctccgcgtaggaccccctgaattcgaattttgtcgaattagggtcggaatttgaatatgtcaaatgatttacgcgcagttgtacggtttggaaggcgtacagcccgtgggttgggcattgcacgggcgaatccgacgctggatgttcaaatttggatcacaagaggacctcaaaggaccaaatgcgttatcggtgagtgctcaatcactgattaaaagatacaaaccgaccaaattgcccaatcgccccaaatgccggagggggcgcaagaaactaaagagaaagtgccaaagatgaggaaagggtcaaaaaggcaattatttactaccgacggaagcagcactattttgggtgccaacgaacgaagaaaggaatgccaaaaacgtaaagagaaagaggggaaaaaggggcacagagcagacaaaagagagcattaccaaataaataatttaaaaaaatgaattttatggagacggagggattcaattgatggcaaattggcagacgatggggagggatgaaaaaagataaataggtaatccattttaattggctattagggaagaaagggcgaacgaaacgaacgcgagacacagccaattaattggcaatcagtgaacaatttttgaactatgaaatacacaaattgtcaaaacattcaattatttatttattcatcaaattgttcaattatcagtgaatcatttaaaaggaaattttcacattttaatgatatttttacatttttacgggtcacaattaagctcgaaaaatagcgcgaggaaaagcaaataaattgttaaaaacattttcataccgtattatataccgtaattctctactggcaaaaaaaaaagaatttgggcggaaatggagaggcaatggaagaaagcgaatgactgactctgatcatcatttgtttgtttgttcttttttttgaccagaaggataaatcaccgcagcagcgaaggcaaaagaccgccggaggatttaaatgaaatcttaaaaagaaaaaataaaattaattgaaggccaataaattgtattaaatgccactctctgatttggttttttgatttgatttgacctgaattgttcgtcctcccaactgagtcccattcagtgcattcgctgctacaattgcctcttcataattggccatgctaatcgtcgcctgtccctttcctttggacaactgaaaaggattggcacttccaatcattggcattttatctttccgaccttcaccgataggacagcaccgaatggtccgaacattcgccacagcgttggttctccgacctcagaggccaaattgtgcactgacagagaccaaccgccggccgagggactgtctgacccattggactgagttggcacggcgcactgctggccaatggacgaattcgacgcaaccgccgcggcaatggccgcagcgtactgaaaaggtggagggaatgtgggaaagcggagaaagacaaaagaaactaattgcttataggtcattagaattaccaattctgtttctgggctgatcagtgattgtaagtgattcccttccctctccttcccccattttcacctgttgttgctgctgtgccgctgccacggacagtgccggatttgctgctgctaatgcagtcangtgttgttgcaaaagctgttgc

SEQ ID NO: 14502 - DNA, 1511 bp, Heterodera glycines
cggtgacattgtcggacaaaatacgcgaagtgataatagtgccgaagggacggaacaccgactcgagctcaaattgggtcagagacttaggcagtccgctgacgtacagattggcgcccttaatgtcatctttggagggccttgccagggacacctgtggcggagaggggcaaattgggaagaacgaaaagcgcaaaaattgggggcgggggaggggggcggggggatgaacgcccccgggggtgcgaatcgaatcagtgaggagacggaattccgccacccgaaattttttagagcatcggaattccatatcactggtgcgaatggaaatcggtgaatgaacgagaaaaactgagtggatttgttggcactcaaaaacaaaaacaaaaaaaaaaatagaaagaaaaccaaaagcaaaatgaaaatggaaaaaaaagaataattcattgtttgtcagcccatcatccgatttggacacaacgcaaagaacagaaacattaattaacatgattaattaactaattacttaattactcggaggaactgaaaaggaaagtccgtccttcgccctcacctttagcactttgttctgcagccgaagtccgttcattgaggtcagagcctttcgcgcgtcctccggccgctcataatttacaaaagcgtagccaagcgattggcctaaaccgaggagttcggaagaagaaaaagagggagcaattgggagaagggggggtggataatgccaaacggaaaatacgaaaagacttggcatggcattcccccgggggattattaagtcaatggaaaaagtgaccggaacgaaaggacaaaaaaaatccaaaggaaatgaaaagaaaagtgaaacaacgacaacaaaaacagcgcagcattcatcgcgtccatttaacacacaaccaaatttagaagatgaaactgaggtgagttaaaagcattggaaagaggcaaaagatacggtggaaagaggggaaggaaagtggaggagtacggtagcagagaatgctgaaaaggtacggtaggaaaaagcactcaccggaggatttgtcacgaatcaatcttaatcaaaatgagtttttaaaatcaaagcatggaaatgattgtctgttattacttgcacgactccacttcgcccatcgaaccgaaaagggcgcgcacctaaaaacggagagggacaaataaaacggaaggcaacactaaaaatgaaatctaaacatgcgaaactcatagtaaaaagtgaaaaaattgccaaacacatgatatgaatccgaaaatccaaaaattcaattttaaaagtaggcatttaagctaaaaatgccattgttttttaacgttttaaatgggctgcgtttgttcgtgggcatttattcattcatccgctttctatgccacctcttcctgcgtcatgttctgcggcaagtagttgatgatcaggttggtgttccgttccgagacctatctctcgcgcttttcccgctcgtcctcccctccgtctc

SEQ ID NO: 14503 - DNA, 2965 bp, Heterodera glycines
  unsure (1)..(2965): unsure at all n locations
tgttttagtctgtgcccaccgatcagtttgccgccgttaggggacggnncncatnggnganaanaaggagaagcctttcacgggnnancagancacggcaccnnnaggcnaggnncnnaaanccgccagaaagggcggancgacaaanaaaaaaanaaaaanaaaacnggcaannnnaaaggancaagaaannnnaacaaanacannnnnanannanaacaggcnnnnaaaaaannangannnnnaaaannnnagggcnaanagaanaanaggngaacggnagaangannnnaaaanngaaaanncgnggnnnnngacaannnnngannnannnaaggagnnnncgcaaganaaaatcatcaagaaaagtaaaagacgctccccccaaaaaattaaaattaactattttattaaattcaaattagaaatttttgaaaattttttagatcgatctgtcctcccattttcttatgtccgtttcgccagtgatcaatcgaatgctcagcgtggagatgaaggaaaagcagcagcggtcgctcactttggacgagttgggcatcgagatggagcagttcatggaatttgtggaagccatctcaatcactgcttttcacaagccaattctaccaaatcgtaattttaatttattattttttttatttgtaatggctaaaattttgccacaacatatttttggcaacaaaattcctcttaacatgaatatggatgtcattgatttcgatcaattttaaaattgaaatcgaacaaaatgtttattttttaatttttaatcattttttccaagatcgcaatgactgaatagatatcatattcttgatcagtaatgatttaattatttggcaaaatttaagacaataaataatcaaatccattcaaagaaaaaaaatgctaaaatcttagcacaaaatgtgctcattctgctcaaattggccgactatttccaagtggactggctgaagtcgcgctgtgaggcgtatctgatcaattgcccggaaattccaataatcgaccgttttttgttgatcgatcactattgtctcgacaattttaaggcataatttttcaaaaacatttcaattttaaagaaaaatttccccatttagaattattttttgaatttggaggttgacaaattgcgtgcattttacaaggctaaccgcgaccaattgtcgccagggaaaacggctgtcagtgatcaattgttaggggaattggtcaaccgactttgtggatgatttgatattttgcggaaaaaacagtaatgaattggggacaattaattaatggggtgcggatttaagggatgaaaatttttgaaaaaggcacctaaaataggcacgaaaaaatgaaaatggcaaaaagagaataagtattaacaaattacggaaaatttttttataaaaataagaaaaaataaatcaaaggctttctaagattttcttttcggaaatgagaataaatccattaagtaaaatttaaattttaaggtggatggcaagattggaaaattggataaatccaaaatggacaagaattgaagggatgttaatatgctttttaatcaaaatgtcaatttttgttattttttaacataattataagcatattgttgccttttgttatgaaattctgaaataaattttcatcgagttatttttattctttataatttaataaaatttaaaaaaattgttattttccattccattgctcatgtgggattgccagtcaacaatccaaatgcttttgccccgggttgctgaacgtaaagaaaacatttgatttgtgacaaaatttcatttatttatttttttttttttgtggtttcacggacgctgggaattcaaggtcctccagggtccctgtccaggtagctaatatcggcttttctggtcccagttttcccaaaatttgtggcctggtaacagtttttttgataaaattaaaattttttattaattttcacgcgttaaagaaatttgtaaattttttaaatttaatgtgcagaagaacaaaaaacagttaaaaagcaaattattttatcatttaaatagatagctctgaaatttaaaattttaactatcaaaagatttttcggtgaaggagctcagcagtgccgacaaccaaatttgcctaaaaatttccgaattttaaaaatgccgggcacgtaatttttgttccttttttaatttttcatgtcatttgtgggattttctggaaatttcttaataaaatagaaaacaagaaagaaatagcatcactaagaattgaccaaaaattttcaaaaaatattcttcataagaatcgattttttttaaataaacctttaaacattttcaaagtgccacccacataacattttttaatttttttttctgaatcttaaaaaatttttcgagcttttttaaagtttgcagggaattttaatggatattttctgatacaattgtttttttttttttacaaaagtgccgggtcgttactcaaaaaccatcaaaatgcgcgtctcaaaaaaccataaaacgaaaagttttgatagaaaattgttcataacttcgcctaaaatgaatcaaattttaaattgatatcattcgatagccctaagtgttttctattattctgcaaatttcaaaaaattggttatttatattccagaaagttatgacctgagaaactcaaaatctaagtttttttttgaacatttttcgtcataacttccttgaaacataacgaaactttttgagattttacaagataatagataacactaaaatttggttgactttgagcaaatatatatataaaaaaaaaaaaattattttgacatttttttgagtaacgtcatagcaccaaaaaaagtggcgaaaaattaacgtgtaaatgttgagggcgcaaaaatggagggtgtaaatgttgacttacccattttaagtggtaaaaaata

SEQ ID NO: 14504 - DNA, 4249 bp, Heterodera glycines
  unsure (1)..(4249): unsure at all n locations
aatttttcagttgggcattcaaattgcaaatgaatgactcgtgtacaattcacggcaaaaaattcgattgctcatttgcgtggcttttggaaagatacaaactctcagacaaatttgcaattacggaaaagattgtggtaattaacaaaaatttgcttattttccatctgcaataagaattaattatatttcgaattttaattaaggtcaaattccctgggcatcaaaaatttgcctttgtggcgggcgccgataaaaaattttttccgtcattgaggagagtgatcgcaaacataaaaaaaaactttggctgcaaccaaaaaatcattttctatgatttgggaggggtgacagaaaacgaaaaatgggtaaaaacgtaaaaacataattaaataattataaaatataataaaatgaacaaagttaatgagaatttcacaaaaatcaaacacattttaatacaattgatcattttttttactaatttaaattttttttaattcaatgttcccaaattttaaggttgatgaattaaattcgatatgcaactttgaaaggcacgtgttcgatttttctcaaatggtcgatggttcggtgcgccgcctggaaacttacgcgtggaaggtgtttttactcgcggtaacaagcaatttttttggtaggggtcagttgtatgtctgagccaagcttaaaacatcataactttttccgtgttgaccaaattttataaatttagtaatcagtggaaagctatatgtttagaaaccgttgataagttatttctaagcgattaaacaactcataaaaatttgcaacaataaacccacaaaaaagtaaaccataaaaaagtcagaatttttgaatatttttatttataacttttttacaagtcagtttatctttgtgatttttgagaagcaacaaagaaaaaagttatgacggacgttttaaacttgtctcagatgcaactggcccgctcagatttttttttgtttattttaaaattccataagctttttttaattttaagcatgttttgttggagtatgacactgtcgtttgggtggacacgacaattatctttgacaatttcaatttgacggcgattttgacatcaatgaacgagggtagaattggaccagtacaaatgccactaggtggggcatggaaatttcacaaactaatttataagagttaattgttgttttaaacttggttaatttaagtcgcttggcatggcacaaacattgcaacgcatccgggtaaacaaaattgatttaaaaagggtatttttaaaagttgatgatagaagttaattagtgaaacataatgagtagagaaaatgaaaaactcaaatttgacaaaaaagctgatctttgctaagtcatttgaaaaattatgaataatttaaaaccaaaatccataaaagcttaaaacatgtaaaaatttacaaaatgtaagccttaaatggggcatttaacagatatagaatatacacaaggcaattatttcgaaagtcagtgtttttggaataattccttattaaagttccaaaattatttgtgtgttttacattcgttttatcaaaccaaggtcatgaaaatttgtggcctcacacaattaatattttcatttttaatttaaaagtccattcattttccaggaatgtacgaatttttgccaatgttcagcaattttgaggccaaaaatggaataaactgacaaatgacccaccacaattcgagtccgcccttatcatcattcacaaaagcgaacaaacgcggcaactgatgaaatggtacaaaattaacgggaatttaagccaatgccttaaaatttaatcccgtttcaaaaagtgatggaaattcaaattttgtaaaattatcaagagttttgacggctaaatattaacggcgggcatcgactcaataatttctaaggaaattgtgaaatttgcagggaaccgcgcgtcttggaacatggaaattttattaattaatattagattctaaaatataagccaattagcaaatttaaaataaatattttaaatgttcttcacttaatgtgttaccttccctttttcatggctttgctttgtgccgccgaagccaactgtatggtgccaattggacagacgattcactgcctttatgtgccaaacatgccgatcagtccgccgaacgcgacttgtcaccgccaagaacagagtctaatgacaattctcgtatatgacttggaattccgtcgacaaattgagggtttgtttgccaatttacaatttcaaaactcatttctgattttttggcattttgtgacagattcttcatttttgacacaccaaaatccccagcatccacgttggaccaatcgctattccaaaaccaatcgtcttcaaactttcgctggaacctctgatgaatgggttaaaaaagtaaaatgttgctgaacggaaacgcatcccatttgtcatggtcataaattaacaaagtttaattgactaattaaaagatttcatcatctcgaatttctatttcgaattaaataaaaatactaatgttgacgcaaaacaaatttcatttaatttgtaataagcgaataaaaaacaagataatttttattattgactgtgaaatttattttacaaaatcaaaaattccaaaaatattaaaattataattaaaatgtttcttcaaatatagaagctgaaatgttgattttaaatgaaaaatctaatactttgtcatttttgcgtaatttttttattgagtctgcagcgggacttttctcaaaaaatttcgagtttcacctatcacaattttgacatttttataaaattctaaaattctttaatgacattttttgttattcatccctatgaatcaatccgcacaatgcattttttccattaataaatttaaattaacaaacattcttttcttatatttaaatgcacttaaaaattgtccccattcttcctttaataatttagcatttatttgaattaataattcaagaaaatcttttttcctaattatccgcaaatgtctttaagcctctttggatatgggacaacaccaatttctacaaattacttcaattagcattcattcataaattcgaattatttattcattttttctccattatgaaaatgatttcgttttttttatcttttgcttaatcatcatactctgtccgtccgtccattcccatcactattcattggtgatcggcagaattcattaaatattccataacaattttgtgatattattaactcaaatttatatatatattcattaaattttggagaatttttttcgaatgaaaaaatacaataaaaaatatgcttaaatatttaaatatatacaaaatcttttgcatttttagaataaaaatgggttttttaataaccaatgtaatttctcttttaattgtgctctccaaattcaccttttgtcagttgtcatctgatcaatcgtaatgattttttaatttttttataattcaattgttcatttggcaaatttcagcgatggattcaaagaagtgccatttcgtccattggcacattgccatgctaacaatgggtcgaatgaaaccacactgaattattacggaattgaatttcgtctgacgcgggaaggcggaaattgtgacgatgggtttgaaaaaaaacaataaaataaaaattgaaaataaatttacaattataaattattttcaatgacttaaataattaaatgttcaattgatagccttctcatctgttacccggcactgcttcaaaatggcaatcattggcacatgaacagcaatttcaagaacagaaaaaaattcatcattaatgcccaattggtaaatgattacaaaattattaatttttaattgactttattcagagcaactcaattgaaaaggaatgtgcgcaaaaaatgccaaaagatgtcggtaaaaacggcacaactctttggcgaggcctcaaagtgcgcacaatgccaacgcaaaagaacgatggaagaagcttcatttttgagtcatcatttgcctcagagaaatagttagtgtattttttaaattttttaagcaaaaatcggaagtgaaatttttaaattttaattttaatattaaatttttactaataaatatttaagcaactttttacacgcagaacaacgccaattttctgttcttttcaatttgaatcaaactgctgngccattcactcgcatttctttggtggaaa

SEQ ID NO: 14505 - DNA, 1525 bp, Heterodera glycines
gatcattttttgatcagaacatagtgtagattaaatattttggaccattttatgccaatttttttaattgtaaaaatcaattaattttaatttttgcaaattctctgatcactttttacttctgatcagttatggctattgaacattcatttgtcggtggcccactgtttgcaccgtttcattgctttgctcgcccattttcaacaacacgagccttcggcacaatcaccggcattggcacaatcgccaccatcggacgattcagtaccaaatgccgtgccaatgccaacaaaatttgcgcaaaattccacggcaccaaacagaagcagcgaagaagaccaatgccagcagagaaattgatgaaagcaataagagatagagagagagaaaaggaccatttttaaaattaaaatgccaatgctggcacccaatttttgttttaagtatgccaaaatgcctaattagccttttttgcatttcttttaaattcattctttccatctttcgttgtatctgatctctaaattttttgaatattgttttatttcaataaaatgaatgaaaaattatagaaaaacaagaaaaagcataaataattaaaatttaaaattcaaaatgtccaatgttggcacccaaattttatttgaatactgtgataatatagtgatttaaaatatgtttgcgttctgttgttttaattttatgccattttgtttgtgattttgggtgatacattgttagatagttgttagtttatgctttcgtcagttctattgattgtcgtcgactatttaatttggaattaaacgataattgtatcttcggcattgggctgtgttttgtgtttgcttggagctgttgtctttgctgtgtgcaacaacaacattattaaagcccctgacgacaacaacgctatccgttttttacgactatatccaaagtgtcagacttttttatttatattttttttacacctaaaaattaattttctttccatctttcgttgaatgtgacctctgaatttttttgaatgttgtttattcaataaaatgaatttctaaatcagtggccaattttaatggaacctttctcaattttattcaaaatgaaaatttcttcagagtgaaggggaggaagggagaacggcggtgatcaagccctgaaaaaaattttaaattttaaaatgaacgggacccctaatgggtttaaaatcttatgtttgagattatcacactcaatttatcccatgtaaattcccaccccctcaattaggcgcccacaatggtaaaattaggagacaaatttatttattctataaaaaaaatttaaatgaaaaaaatggaaaaacaaataaataattgaaaacaacaataaaaatggcttaaccaacaacaattaaatcaaatcaaattccatttgatcatttctttccgcactttgtttttttgttgttcaagtgcccacgcaaatggcttagccgagcaaaacatttgccactttcggtgcactgaatttgaaattaaat

SEQ ID NO: 14506 - DNA, 2151 bp, Heterodera glycines
attaggcaattaattaattaattaatcaataagtaattaatttttcattgtattgtacttgtgtcgttgaaggattgatggagctcaaaaattgaataggcagcagaagacatttttttgtggataaatggtagaaaattccgattaaaaaatgaaagaagcgaaattcttaaaggaaaattaaattgaaaataataaaattgaaaaaatggggcaaataatttcagagaataaatgagtcattattttaggtaattcgaaatttactttttttgtaaaattatttgaataatgaccaatgatcaaagggcatataaaaatgacggcattttcaagggaatggcacaggtcagaggatggataggagagaatgttcgtctttggtggaaaaattgccgctgatgtgaccgatggacgccgaaatcagccgatttggcatttattaattaattgggggcaaaatacggacaccggcgagtggcgtcgcacttaaatttgtaagatttgaaattgttttttaaattttattttttgtattttaatgaaattttttgcaattttgcagcgggttaatacataatatgtacatagagcatgtcatttgtaaaacatcaactatattaataccgaattaaacaagaggaggaaaaatgagggagcgattaaatatttttatacaattttttttattaacctcccttaaattcattttttatttgttttttaaaagatacaataatcaaggtagaattaaaaaattataatgattaaaatagtacagaaaaaacagctgaggaatgaagaaaatttgaaatattaaagaaaaatgagctttcttctgctgctgaagagaatgagtcatcatttttaagttgagatttaatttaaaataatttaaaaatcaaattattaattttaaatgatggaacttattaaatgttaaattaatggctgaattcatgcaaaaacttaggcccaaaaataatataaaattaataattttataatttaatttaaaaaatgataataaaaattcaattttattttaaaatgcgaattattttctctcaactgcaaaaaaaaataataaatgattgctttttcatccttagatacaattattggataaactgtataaaataatcattaccaggcctacaaatgttaactttaaagcaaattatgtggcaaatttcgccaacatttaaagccatttaaaagggacaatttaaaaagatcgcacttgaaaatggagaaaccaacaggaacatcatccgattcatttgctcaattgtgatcagaatgatcactttcaccagagcgaaactttgacactcttcttctctaattgctccacgagagtgctaattgcattgacgagagtgtccaatttgtcattgagagtcttggtttgttccacgagagtgtccacacttttctgttgcacatttttgtcttggtcaatcttctcgatgagagtgtccaatttctgcccaagtgcatcaatttggttgttgtttatattgtcctccttcttcttcaccagagtccacaaatatcgttgttcataatgtccattatcttcgactatagacacctgtgaaaagatggggaaaatttgggaaaatggcatttttttccaaaagaaaagtgccgagaagaaaatgaataaaaataataaattggggacgaaatggagcattttttgcgggcatttggccatagtttttgtggcaaaaattgcaaatttaaaatttaacaaaatttcaattagttttgagaggcttaatgggaaaatcaaatagtgagaattcttttcattttgcccttcctattctggcgtcacattctatggtttgtataatgtgtaattattataccttctattctacggtttgtataatgtgtataaaatggcgctggacgcccaaaaaccttttgctaaactgactggagattcaccaaaagcttttatttgtgctccgaatcaaatgtgaaaaggcaaggactgaatgaagcaacagaatgatcaattccccgatctttgcccaatatgttccgatcagatcagcagcaggtggacaggtcgggacgccaaatgcaagaaaagcaaagggtgattgggatgagaacaattaattgccaaagaga

SEQ ID NO: 14507 - DNA, 2514 bp, Heterodera glycines
aataaattagcagtttaagttattctgttcattttccctataaatgaatttttggctttttctgacaaccctactcatactattgcaccgcctcactctcaattagcaaattccgattcattgagtgccgttggggtccctttccggcaaacaaagcttccctcccacaatcagtgctttccgtccgttcggcccttccgtttgacacttccgtttgtctgcccttgtcgccaaaaaattggcgacaagctaatttgtgcatagactaataaaaaaaatttaattccaaaaacactaaaaacaggtaaaaatccggcacctgtacaaacccgaaacgaaacccaaacaacggaaaattccggcattttcaggtctaatcgcacaatggtctgacattaatttgcatatatttgaaaaaaatatgtaatttactcggatgtctgctgattatttgatgcgttgtaacaggaaattaattatttagtcaatacaaaaatataaattatgcgtttctcgtcaataatattaaaattatattcatattaaatattatttccattttagttttttatttttctatgaatttttcggcttttaattttgccgccctttgccttttattttgtctctgttttcatccgtcaaaaaatattctcaatgcaacaacaaattcttcgccatcttctccaaaaaacattggaatattcacaaaactcggaaaacaaaattcaaatgttgttgcgctaaaaataagttaaaaaattattaattcattttgaagcgaattttgattgaattaaattattatttattatttttaatatattttaatgaaattaagttcccaacttttcatcgatgagctcttcacaaaattattcaagtcaaaaactgtttaaccaaggcaatggaattttatggaacgaaagtggaggagcataatgacaaataattaaaaaaataaattggtttttattttgaattaatagcccaaaaattaatttaaaaaaaattatttttaaatcacaggtggacgctttaattcgaagctggccaaaaacaaagctgtaaaagtgttggcaagaattgactttccgaaagatgggaaaagccgtttcaattacgaaaatcaattgcaaattatgttgggcaatcaaaagcgacttttaaacgagcgaattgtgctcaagcagaccatttacaagtcgaatcaaaagcagaaggtgggacacggcttaatggccaattctaaggcccattaattactaaggatacgatttatagtgctaaaaactgccaaaataattagtttttaggttttaaaaacacccaaaataggtgctaaaaatgggaaaatattgtaggtgccaaaaagtttcaaatttaggggtataaaatgccaaaatttactcaaaaaaagtaacaaaatcagtattgagataaataatttttaaaatcaaatattcttgtcaagaaataatttttgtgaaaatttttcataataactcgaaaaactaaaaatatcacgcctgcccattatttttgttagttggccaaattcaaaagattttggtagagcattcgggggataacaggggatttatcggatttagtcgacttaaacaatgccgaaggaattcaatactttgattaaaaaaagtgtgtttagttaatcattccttacgagatttgcgcactcaaatcggcgaaattagaagtggaaaactcaagaaatctaaacaaaattgacaatgaaagtcttaaaagtaattatacacaaattctcagcggaagtcagctgataagaataattgcaaatgcaatgagcagagaaattgaccaatttaacaatgcaatgcttctcgataaaggcgatgtaagtgatgagcggatctgagaagcaatttgaaaagtgattaaaataaaaataagaaaaaacatttaatactaattggggatcggattagtaagcaaatgcaaaatttcatattttgcatttaatttattaaaaaattggttttacatggttttcactaataaattagaaataactttaaaatcccacaatctttggtcaaatccgacccttaatgataatcggcaatttaaaggaggaattgtggcggatgtcaattggacatcatttccactaattgttttttaggagtctgtgcggagagtcggctcttcggcttttgccggcgctgacgagaaggagcagttgcgcttcgttggattggtcctttggcatttggtgttccgcgactgtcccatcattgacccgacggcggacgaatttgtgttcatcgcaaaggtcgagccgagcattgacgccaccgacccaaatgtggcgatggcattctgtgccgaattggacagcgaattggcgcgaaaaagccaaccgaaggagcaaaaagaagagaaaaaagtggcggaaaaaatgcaagagaaaattgagaaggaattcgatctgtttgatagagtggaggacaaaatattaaaagacaccgcatt

SEQ ID NO: 14508 - DNA, 944 bp, Heterodera glycines
ggaggaaatatgggacggatatggcctctaataggcagaaaatgaactgatcagtgatcactttagaataattaaaatttatactttatagtggaaaaaaacaatgattaaatttttggttttaaattaattcggcctttttaatataaattttattgcaaaaatttattaaaatgaaaatcgcctccaaatttctatttcataattattgaaatttgaatgttcattaacaaattaatgtgatttggccaccgttttgcaaaacttttgctgacaattttcgtgatgcctttcaacaggtgccaaatcggacaatgaccaattgctcaacgaatttctctgctgaaatcatgcgtttttttttgtaattagttaattaactgacgaattaccgatttattttttgccaaatttggcattgttttgctattaaaattccagttttctgctttgccaatgttcaatgtgtagtttgtggcgttcgttttgactttgcattgtccaaattgctcctttcgttttaatctgttttcaaaatttaattttctaagtaattagcgaatataaataaagcaaagtttaaaatttaaatttaatttttcctcatattttggcaacctttccgccttatttgggcaatgattcgtcgccttttttcgacacggccgaaaatagaaacaaagcgcaacgaccacagtaaaaagaacagttaaaataattaacaacggaatttggtcagaacggtacaaattgttcaaaatgtcggcgactgtcaaaaatagaggaaattgtgcgagttatattatcattaattaattattataaattaattagtttgattttgcttacatttattggaatcgcagttgatttcatctcttcgataaagacaatttgaacgaccgttgcaaattaatgctaaattttattggaaatgtgtttaa

SEQ ID NO: 14509 - DNA, 1496 bp, Heterodera glycines
ttgctccttgcgattgcctcgtaacgctcgagcgatgacagctttcgccataatttctttcctctctttgcaagtttttgagtaaacaattaggcggacgcccttttttaaaaggaacaaagcaaaacaaaaaacgttgggctttatgtgattattttgctaattcgccaaaaggagttcaaaaaaaaattgcagaatttaacatgagtcaatgtttcactgaatttaagggcggttggttatcttttaattctgaataaataaccaacaacaaatagaatgaaatttatagcgaatcgagcaagcgaaaacagtaattaggagatatttttaaacatagataacagcattcgtatttttcccgaaattcaatatatataaattttattaattcagatttaatcaaattaaaagtttttttttttgctttctttttttcatttgcttatttaaaaattttggcgaatgaggagaccgcggtgcaggcagataaacaataaataccaccgacaaatatttttatttgaatagattcaactaaaattttttcaaaaattgccgataatctgaacaagacaaatacgaatactgttatttaaatttttttatcaatgagaatgatcaattagtcaatttatgaaggacttgcttcagtgggaagttgctgaacattctgttgctgatcgtccttagatggaaaaatttaaaatgtatttgattagttcaatatatgcctcattttgttgttgctttttctttgggagattcatttcctcaatgtctgcttgtttcaactttattacacttaagggtcgacgaatcattgaatttcggacaagtgataatttagcgtaatctaaaacataaaaaaatcaagtgtcgttttgggtgctccttctcaattggcgattcttttatccgacaaaatcaaaacttttcaaaatgaatttttggcgaaacgttctattctcgatatcgcaagaaactgctaaaaacagctgaaattctttaagatcagggaatacctaaacacagtcttttagattatgtgtgtgtgttttttccttctttaaataatttgtgcacaatgttttttgtgaaattctttttgtttttttttaaattttcctttatttaccacatgctaactttcctttttgtttagaaaggcataataaaaatgtctttaattaaattagttgtgaaaacgattgatgggaaagattccatcgttcgagtggatccgaaggttgttatttaactcaaattttttctacattagttggttttaattgttttattattagatgtcactcgaccaccttcgccatgcaatcgaagcagcaactgggatttccaaaaatgaccagcgactgatttttcgtggccgtattctcaaagatgaatcattatcactcgctgaccagggctttgttgatggactggcaattcacgtaaaggaaaaccaccacccgcttctacgaatggttcatcta

SEQ ID NO: 14510 - DNA, 2360 bp, Heterodera glycines
aatcattatcactcactgaccagggctttgttgatgcttcctaggttcacgttgtcacaaaaccaccacccgcttctactaatggttcatctacggaaagcagaagcagtgaaacgtcgcagagtcatcagcaacccgaagttacggtcgtaccgcaaataacgactcagaatctgattgtcggacaagtcgtcctcgaaaggacttccctcttcgacaacccaaatgttgcattggtaagaaatgtaatttactcgctttttgttgctaatctaatctttaaggatgccgtgaccaatgccttggaggagattcgtggggcttttcagctcgaaacagaatcttcgctaaacactaatatccaaaatggaagttttgctgtcaatgtgatcttacgcggaatgcgtgagcaaattgtcgatggaccggcgagagagcgcttcgaatcgcttagagttgaggtcaagaaactcgcgtggcttgtcgccttggttaaggtcaaatttcaattaaatgaaaatgacttagtttttgtacaccattaccaattgcaaattcgagttggaattcggtcgtttgatactcttttttttcaggctcaattcgttaacagaattgatgcgattttctctagccaggacgagctgtcacagcctgaggcgtaccaaacgatttgcgacattttacttgcgatgcattcatttgaccattttgatgaaaatgacctcaagagatttaccgaacgagacgaggaccaggagttgatcacgctcattagggaactcactgcttggcaattgccggacgacgaagcgcatcttcaaactctaaacagaaacactgttgtcaggtacggattgtgtcggtcaaattgctagaacagttctcttttccttattagtgtacgtttaatgactttaataacaatttttgtttttctacagacattgtctttcaatggatttgagtcggcttttggtctttttgagtttggtggatgcgaaaattaatgagcatttgatgagtcgtttcaatctcgtcctgtctcaccgacataatcttcaggttggcttaactgcccttgacattcttttgaccattgtttattgttagtcttcgtcttattctgctcgcttaatgaattgtttctcgtccgccgtctcgcggattcaacacgcacgagcgcacatttaccattcgatcagtgacattggagttcatgtggatgacaacggatttaatcgactctttccccaacttttacattacgaaagggcaacggaaccaccccaagcggacattacactgactttcattcgtcctggaggtaattgctgaacttaatgtttgtaattgcttttgctcatacaataaccactttgttattagcaactccttcacattcccaaatcccgagtgttgtctcccagccgccttcgcgtgattctccgcctcattccgattcgacgccgaatcccccttctcatagtcagcagaataatccgactgctcttaattcgttgctttccggctttatgtcttttgcacatcaatgtacacagttttctttctgattatctttccaggctttatgcttaattttcagtgcttggcggtgttcctgatcaaaatcatccacgacaccccaccatttcgccgcgtatgtcttctcgctccgtttccttcgccccgcggtcgtccgcttcgtccagatcaactaattccacgggtttgactggacaattccctcgaccctttcgtcacgtgcaagggtcccaaagacgttttccttttggtcttacaactttgaattggaatcagacaccacccagcgtaagtaatccatttattgtatcggcacttattagcttacttttgaggcacccaatgcgcttttcgttggtcctcggccaccctttgtttttcctattttcacaatcgatccgtttttgacttgttccagccgacgatatcgtgtatttgagagtgactcggtaggactaggactgtttttacgtcacaacgaaccccaaaatttatagcgccacaatgatttttggaatgaccccgaaactgcgcgtcttggcatttttcctccgtcgaattctgtcactgcttcctccaaccgaatgcaaaatgttcctccgtttgctttcaattcggcatctgatgacattttgttggatggaatgtctcacaaccaacgtggcaatgcgaatgctaacatgggacctcctcaaggggttggttctggctcttctgctgagaattccgactcataagcggataatcaaccttcaaatgagcaatgggaagcgaagggaagagcaaaagccaacttcttgcaatgtttttttttc

SEQ ID NO: 14511 - DNA, 2967 bp, Heterodera glycines
cccgaattgctttgatggaaatgccatgccaaaccgaacttttgtactttgtgatgctttctctttcctgcacaatgtcatcacacgttttcaggatgtaattcttaattgtgttaaatctctcccctaattatgctaattattttttgctttttcacacattgtaatcgacgtcaatgttgaacagtttggaattgattgacgcttcgtccatgaaatgctcattttccagcttctgtgtggccaataagctcgggtagcaaatggtcaatctgtttttcatgaattttattttaatttcacaaaatccttcctcaaattaaacccatttttgcattcgccgccactcggcgggaattggaattcgaatccgaatgacttctcctcctggtacggaaagcattggtccaaaacagccaccggcactttgaacacatcttttcggacaccggtaagacgaattctaataaatgaaaattaaaaaaaaataataccgtataataatactgtactacacttacgattccgtctttttttgcgaatggacgccaaaaaattgagcaaaaacgccaaagaattgagtgaaaatcagcaaagcaaatgaataaagtagcattttggcttcaaaatggcgagaaataattacaaaatgtttttctgttaaccatttatttttgttttaaaatatatttttacaaattccgctaataaatttatgtaaatgaatcgctaaacgatggaatgaaagcccaacgcccagtccaaatgaatgggataaaatgctccgatcaccaaccaccacactatcccattcataatgatgcgaatgggttgggattggggatggaaatgaaaatgaagtgatgagatgactcatcatttagttttttgttaaaaaataaatttatttatttttatcggttaatggagagaaattatagtacgaaaaaggacaaagtaaaatttcgaatatgaatattttgactacaggattttcatgaatcccgacttcctaatcatgcgaaaaatctcgagaatgaggcccggtaaaacgggcatttgaatcaagtaaattgcgaaaattcaaaaaatggatacattatggaaatattgttgctgaccagcgatgtaagttacaactgtaagggggggggggggaataccttatcaaacgaaggacggtaaattaaattttggcaccgaaacatcgctactcaaaaaaagagaattgtggctaaatttttaaacagcgttttaaccattttaacttagtttaggaatgccttttataatgaatttggaataattttctaaatttagggaattataaactcgaatttttaaactgagttttcaaacatcgctttttggctaatacacctatgcaaaagggacgggcaaaaccccgacctgtccattgaaaccgagtttggccgacaggaaccctgttttatacagtcattgcaaaagttttgggacgaaggcagtgcaacagcaaaattcaaattttctcgaaaaagacttttaacctctcttgttctgcgtgtttaagtcgtagacccatcattcaaaaggcaattcggtagagattagcagcgatctcaaaaaccccagagtattcatcattatggtgctgtgtcgaagtgcaaaaagtccgaatgagtggtgatcagatggggcgggtcatttcagtaccgaataatgattttaattaattaataatataactattttaatttattaattttatttgctggccctaattataatttagctttatatttaatatttcccaaacaaattacatttttgtgagagaaatacagtgccccaaaaaagtcttgactcaaacctgaaaaactatcttatagttcatttaaaaacttgaaataattcatgcttgcacaacttttggtgctgatcaaaaaagtctcttacaccaacttgatcagatcactcatcctagtgaccgggacacccaaaatacactgaaaatcggggaattttcgaaaaaatccctagggggctggaaaattttttctagagaaaatggacaagctgactggaaagagcacagaatttgctaccgaattgcttttggaatggtggttctacgatttgtatatggaaagttaggtgccaggccgttttcgtacggaccgttttcatacgaacacatgtttttggactataacttttttctttgccaaccaaatccaacattgtggtatcattcgaaagctcattagatgctcgattagcctgcaaaattccaaaaaatttcgtcgagttcaaaaaaagttcgagccaaaaaagtttgaaaatttggttttttgaattcttctggccataacttttttgaaccttaacgaaattttttaggctaatagaggatacatagggctatcgaatgacaccaacaatgttggatttggttggcatcattcaattataaatttaaatgataattagtcattagaataaatcttcggtactgaaatgacccgccccttctgatcaccactcattcggactttttgcacttcgccacattcggactttttgcacttcgactcaccacgatcattatgtgtaaaaaacaaaaaaaaaacaaagaaaaaaaagtgaaaaattttttcaaaatactacgctttgtaaatatcgccaacaatttttagtttgcttattaaaaaaataatatgatgaaatttatcggttttgacggcattcgagtagggctgccaaaaatatgtacaaaaatggtccaaatatgtacataacagggatgtgcctaggtttcgcttttcgcattattcgcattttttagcgtttcgcatttcgctttttggcgcgaaaagcgacttttacatccctaagaattggattaaattcccataaaatttttcaaaattttacctataaattggctaattttcagtgaaaacctgtttataaatgatcaaaatt

SEQ ID NO: 14512 - DNA, 1364 bp, Heterodera glycines
ttcataatgaatttttatgagtccaacaaaataaatacgcgttactttgagaggacaattcattaaaaaaactttaggttccgcattaataaagtttttaaattagacatagttatagcattttaacatatttttatttttttaaatccataacatagtactcaaacttcccgtgcccaaacttcatgtcgcctaagttttagaagtgaaaaggccaaatgaattaatgcaaaaacggtgaaaaaaacttttacactaaaaaataatttccgaattcaaattttgttttcatgcatttctcatcgagagaaaacagaataaaattgttaataaactaaaatccaatcctattataaagtaaggattaatgtaaaactaaagattgaaaaacgtcaaattttttgaaattaaaaacagagtcttctcctccgtccctcgggtgttctccgattttgcttaatttgaccgttattttttgccttttaattaactatttacgggagaaaggcgcagccttcgtctgatttattatttgcttaacatttaatgaatttcaaagaaaatgggccaccgcaacataacgcttacgcttcactcattcaaatgcgttttttcggtgccgctaatttttttgggttagtccaatgtttcgctcgatcaatggccaacgaagcgtaattggccaaaagagtcgcaaataaattgcaaatgctctcccaacacattgccagtgagaagcatcgccgccctaattaatcctcaatccatctgctgctgctgcttctgtcggcttttcttttccgctttttgtgttgaacttccgcccgtccgtcgtccgctgatggactaacgcaaaaaagggggtcaattttatagacattttttgtcttttgttttttattgccgtaaagtaaaaattgaaattctcaatttttgtaacttttttaagaccaaaaattgaatttttttaggattaatcaattagcatatttaagaagatgcattttctttctaaaaaattgtcgaaaagaatataaaatgcaaattatagtgctttaaattcaaaatttattattttttaaattaaaaaacttaaaatgtagaaattatttaaaaaatctgaatttcaaattcacgactaatagcgttaatttcagcttttttaaaaaactaatctttttttttaccggcggtccgtgggagaatttttataaagtcacatttgaacctttttaagttttaatcagattttgaaaaatattgcaagtttttctcttcatcaaaaatgtcgtttttgtggattttatagcaaaatgaaatttcttaaagtcaaaaagactcacaaagcagaactaaaaccaaaa

SEQ ID NO: 14513 - DNA, 1882 bp, Heterodera glycines
atctttgtagcttttgtgccaccatttatttcatagaaattaatgacttcgcgtgttgaacacctttttttgttgtaaaatgttgtcgcgtgccgcccatttaaatgggacgcggaatggcaattaaaaagcacaaattaaaaaaaaattggccattaatttttctttcttttaaaattcgcattcacggactttttttctcacagccattgaaaggtttatgatgagaaagaactttatgttcttaaaccaacaaattaagaaaaaaaattaatttattttcataaatgtactcttcattaaagtagaaacaatatttgtttctaatttacttattttttttattaatttaatgtcttttcattggcacttcgagtttaaaaaagaatgcgtcttgcaattttgtttcattattgttaaaatttaaatttttgcaattttttagcctttcaaattttcctacatttcctcctccttctcattcgctgttatgggtcaacaaatgccggcttcaacaaattccatggatgctgtgacagctgcttattacggtttggtgcaattttgtgacgaccccaaccaccgtagtctgacactgacactgacggccatcgctttgttcgtcatttacgcgattggcattctgtcccaattggttgtgctgccggcaaattggcgcctgtccgagcagcgctccgcttttctgcttctgcttcacattgtgagtgaacataatttttaacatttgagtgttgggaaatgaaatttgctgtttcagaatttttacagccaaaagccttaaccttagagttttggtattccaaaaaaaaagagattttttgaacgtgaacaaaagaatttaaaatttaaaaaataatttaattactgagttatagaaatcaatttgaaagagaaaatgaaagttaaatgacaatatttgcatgacgaatattggaatttgggacgtcacaactgaataacgaccgggatattcatctaaaaaagaccaattttatcaaaaaaaaaaaaaaaaattcaaaggacaattttcgtattttaaaatattatcgaaagttgttctaaatttccaaaaaaaaaacattttcccggcgatgcctatcgacaccgccggcctcaaaactctttatctctcttaagaaattgaatcaaaaccgcaaaaatttcctgcaaatctctagggaagagtcaaaaagatttgaaaataatattaataattaaataaataaatgccgcttctcttttttaaataaatcgaaattttaaatcattacaataattggtgttcatttttctttaagaatgtgttcgatctgatctggctgttcgagtacgtttggctttccctggaatatctgatcggcactcgtctcatcgtcaaattctctttggatgcctttctttttcgttttgtcaatttttgcattgacactttttacattgaattggcgttcaaccgatgcattgcttttctgttcccacgcctttacaacacaatttgctgcgaaaagtccgtccgttaattttgggaattcaaataaaaacttaagcattactaatttcaattaaaattccttttttaaaataaattttaaattaaatttttaaatagaataaataatgatttgttgaattattttaagaaaattattctcattaatttaaggaacatgaaaatctgtgtggcgctcacctacattttgtcaattgcatattcaatttacacaaattggttccaggagcgaaggccgttccattgtctggcacaattgggttatttggagccgatgggatccattccaaaagtgcgagaaattctcaaattttacttaaaaatttttgggatatttgttgaaacgcggcc

SEQ ID NO: 14514 - DNA, 981 bp, Heterodera glycines
aaaaaagtgccggattagcgggtttgaaattccagtctctagtttgacattatatgtatgtatcatattctattttttttcttttttagccataaattgactcttcttcaacaaaaatgtcctatcaaaatgtaagcttttcgtctttctccacgtcctacatatattcgaaaatcactttttagtatcctggactggccgaatcgccaccaccgtccgcaataaacaattcttgtactaaaaacgaaccattagattctgattttaatcggggcggtggcggatggaaaagacaatctcagaacgcgtcttccgactcgtgggcaccgaaggcgggcgcatacagtgaaaatggcagatttttgggtgagattgaaaaacaacgacaaaaactattggaaaaggcaaccttttttgaagaaatgagtcggcacaattcgaccgcctcttccgctgctttttaccgccaatcgaccgcaacttcgaccaacaattttcaggagcattactcacatggcagcagttcatcggcggtttattttcaagaggaatttcgtggtgcttcttccttttctttttcgtttttcaaaaaccctttaggcccttttcccaccgattcttccctctgcgcttttcctgccgatttccatccgcgcacaaaaagtcgttttgacgaaattgtggacgatggccaaggatccgtgccaatgtcttccgacaccgccgactttcgggcgagacgcatttgtggtgacgccgtcggcacagaaattcaaatgggtgaccaaatggcaatggttccgacacaatcgactccgatggaacagccaaattgtcatcagcagcatgacgacggttgtttgaattcaaatgacaattactgcaattgccttaaatgcgcatattttatgagtccatccccatttttgcgagggttttacacagatttattttttaagtgcctaaaaatggtgagcatct

SEQ ID NO: 14515 - DNA, 1380 bp, Heterodera glycines
acacaatgtgccatttgcagcagaatgagaggaaaatccgttggaaattgaagcgcaggcaatcggcacatttctttttcgacgcctttttcatgtgtcccttttcgtccagaattgtctgttggatttgcgtcaagagttggccttcgtcgactcgttagacccttccctgggccaatgtttgaccaactcgcggcgtttgctgatcagcgagtcgatgaaattggaggagtggcacaaccccgattgggtggaggttcgagcgggcggtgggtcaattccgtctcattgccagtcaagtttaagaagccataacttactaacaataagcaattaagcagcttaaaagctattgaaagacaccaattttgttggattcaatcagcaacttataaagttagaatctaattgtaagggctttctacagacggagttggcctttcccacggggggggggcaaccaaaaagcaaacgaatgaatttcaacaaatccgtcaggttgaccataatcgccccgtgaaactgtccaaacaggtcaattaaacagactcatttaccttttaattggtttttcaatgattaatgttttgtttttgcacaggttttgatccccaacttccgttacccttctgttaatttcatcgggcgcatcgtcggcttcaaaggcagcactctttcgcgcatttgccgaaaatacaaagtaaacaaccataaaacatttattgttttttatttgtcatatttttaaaaaatatttgtattaatgtaaattaggatgaaaaaatgttggtttccgcttcggttgtttcgcgtttcattcgcttttctctcttttagtgtttcatttccattttgggcgccaattcgaccaaagaccggcagcaagagattgaactgctccaatcgggcgactatcgttatgcgcattatgcaagcccgtaacgcgcacttcttttgtgaccaattccttcccatttccgttccgctcagattgcacattcgcatcgatgtaatcgcacccactcatttggcacacatgcgaatggccggcgtccttaacttcttccacaaattgctcgtcccggtaagaacgactttttcagattggcaaaagcaaaaagcacagatatctaagcttgaaattaatccagtttttttttgtaaatgtaattactcgccaaaaagtcggagcaggacaaaactcagccgccggaacttagccgagacataattcagccgtgaataaatttttaaaaaattttcaaaattagaaatttttcaagaaaaaaatcttagaaaattctatgaaaaaaaatttaaaaaaaattttcaggcgattttttcaaaatttaataactaattctaagaaatttcaaaaaa

SEQ ID NO: 14516 - DNA, 1397 bp, Heterodera glycines
  unsure (1)..(1397): unsure at all n locations
gagcgtatttacacaccaaattttataattttggcccttgaagttggaccagacgaggccatgttcgtagaggatgacaaactgcggaaatttttttttaattttggaaatttccaaaattctcaggatttactgtattttccgatggacttttatgaattgacgagcccttggagttgatgataccttagaagcagcaaaaaaaaaaaatactaaaaacaagatgaatggcaaattcagtggtggaaaattggaaatttcccaaataaaataaaatcagcaaaatttgccaaaaaaaatcctcaaaaaatttcggtcgaattttcaaaaaagtgaaaatcaattggacgcagtgcaccaagcttatggaaatccaatgagttttggttcccgggaaatagcgaattccatgaaaatccgtgacgaggaaaatcacgacgaaatcccgggctaaaatcttgtcaagaacccggaccaaatcatggtaaaagtatgacagcaatggtaggaaaataatgaaatgaacttaaactgaaaacgatggatgaaaattaaaaattcacatgtgtcaggcgtccaaacacgtgcgcgaaaatcactccttaaattaaaaaaaaatatttaggtaaaaaaaaaaaaaattaaatttatacatttttaaatttaaattatattatatatataattattttatagataatttaaatatttagtttagtaataaaaaaaataaaatttgtaaaatatttaaattatttttattaataataagtttaaaattggatattcacacagaaaaatgttttaaaataaaaaaataagaaaaataaaaatatttttaatttttccttttaaattaaaatatttttaatttttcctaattaaaaattaaaaaataaaaataatcaaaatggtacccactttaatgttatgttggtggtgcacacatttaaatgcttaaaacttagtcgagggtcaagcctaaattaaattaaaaattaaaaaaccaaaaactttcaattttttaccaaatttcgctgtacattacgtccaattctgtgaagttagaaaaattaattgttgtttaataattcatggtaaatttaccaaaatcagcagtgatttccgaaattttggagataccctaagaaaatttaaatttaaagaaattgaaaacgaatttagaggaaaacacctgaacatgcaattcaatcgtcacattaacaccatccgcttcgggaagtaaactaaaaaatgttatttttaattaaaattcaatgctttggtaaaaatcggattanattgatcagaattacactaatggaattgccaagaatggtgctgaaattggaatanatcattgcttgccagattagtgattatatagcgtgatgcca

SEQ ID NO: 14517 - DNA, 3058 bp, Heterodera glycines
taactgtgccgcctgccccatgtactgcttgctgatcccttaatgtatgtcgtagtcgcgcaacaatgtttcaatgatgcttcccaggttgattgagttgcgcgtacaccgtgtcgggtcacttccgacgcccggcacaacgcttggcaccgctgcggtgagcgcggcattgcccattagcaacgccagctgcagaagcagcagcggaagcactagcgatggcacgaaacgaaacaaatcggtcgatagcggcggcaaatgccgaaacgaattgctggacagttgcgtagggagaaagaaactttttttggcacgacgtcggctggcacaacccgtggcaacagcagcggcacaacggtggcttgcgcaatccatggcaaaacaacaacaacaactgctggcacaacacatggcataacagtggttagaacaacaatttgtggcaccgcaattcttggtacaataatccacggcacaaccgttggcactttcagtgggtaaactacggcagctgctagtacatctgcttggcaagtggcaagcacaaacatgcgttgttgtagaacaggcggccgttgccatgggcgttgttgtactgctccaacatgcgcacatggtcgttgtcggaattgttgttgaacccatgctgttgttggtcccgtttttccgggttgataacaacgtcgtcgttaccgtagttgtcgcatttgtttcgcatgtactgcttgaccgtgttgttgtttttgtttctgttgtactgcttgaacttgatgacgaaggcgacaaagtgccatcattggtgccagtaatgtgtttggaatggacggaataatatcgctttccatgatgtttctgttgaactgttgctgttgaacacgacgacggcatggacgacgaacatgtacagcttggtgtcgacgaagacgggccatgaaagccattggggccaaaattggccattttaatgagaatgagaaaaaaaaataaataaaataggcaaattaatttaggaaaatctgaaaaaagtataaaattaagagtaatttgaaagaagaaaatttattttgtcatagtttcgacaaattgttgaaattttttcccaatcaaaatgcccacagggaaattcgtgggcaaatcaatagtataatttaaaagttaaataattttaaattttaatcttgaaaaaatttgtcatccattttcttttaaattggtatttggtcatatttttggtcaaattattggcatttttcccactatagaccaaataaggtcgttaatttgcatttgtctatgcttcaggttaacaacaattaaaatttagcattttgtggagaattttttgtcattttatttccgtaaaagaccaaacaaattgagtacccccgtcaccctcaaaataaagctgcaaaaactgctaaaaaattttggaattatatttttggcattttgtgccgtcgtcccccccccccccttttgcatcagtgagtgggtgggtgggtgggcccccccccctcccccctgctttgtgcagcgatccaaatggaccgaccaaatcggttttgacgacatttttgccgaattgaatttccgcttttcgtggtcaaagtgcccgcccagccgcccccgcgtgacacattcattcattccccccgtttccccctgtgtccctaccgctaggttatggctctcgataaactgggctggatgcttgagtgtcgatttgaaaaaaaattcatgtctttttggggctcggtatccagtcccgggacaattctcgagtcttgaagcaaatctcggtcgtggattaatttttggggctctatttcgactaagggcgagccagtctcgagtcccgggccaagtttatgaaaatcggaaacccgggggattgattcggttctgcaggtcccccggtccggtcttcatcattatcattatcatcagagggagaatattgccgagaacaggaaaggagcattttttcgaaacaatcttttcaaaaaggggatgaacgcgtcttcttcgagaatctcgagacggaagggtcccccgaggggatgtggggggggggggtgcatcagcagagacaatgaaaatgaatccggggggatttacacaacgcccgggtgagggcgggggacggggtgtgaagaaacaacggcacatgccgtgccgccacgccaccacacaaaatgccgacaacctccgccgcgccggggcggcggggataaagcacttgtcggaaatgaaagaaacaaaagggagatgaagccgagaacaaacgtcttacttttttcaccgcccagggcataatgggattaggggaaaaacgatgatgatgatgatgaggatgaggatgatattgatgctctcggttgggcagcaacggaataaacaaaaaaaaaagcgaaaaattttgaaaatttcggtggcgatgggtgctaaaagctttaatatgtgttcgagaggagtttagagggcccaagccctgctgctcaaaaaggctagagaatttttgttgggctcaagcgttactcgagaccaagactctcgaggtcacccacctccccccaaaaatgagaaaaaattcgaaatagtttcatggtgacaatggattaagcatttgtatattcaaattttcgagattttggaccgaggtccccccctggcccaaaaataattgaccgagaccgagagtctcgaaaactaaaatggtgataaataaacggataaataaaaaattgattgcattttttattgggaaggctaaaaataattcaaagacaacaaaaaaaaatttaaaaaatcgacggagttatgtaataaaattttgcttcataaaaaatgaagaaaacatctgctgctgattacagcagcagcaggtgtcccttccgagtaaatcaatgcaaaaaataataatttttaaaaataatttacaagtaaaaataatttttttaaatattttaaagagaaatatacataaattttcgactgactccttttcgggacagcataaacaatttctaacggatggtgaagagaagatgagaagcta

SEQ ID NO: 14518 - DNA, 1756 bp, Heterodera glycines
tttcgatggcaaaagcgaattaacaatttgtattttatcataatagacaaggacaaaggacctgaaccgaaactttatgtacagatggatgaaaaattttacaaatttgtgccatttccgttgcccgagcgtccgttgcccagcaaaatccgctttaaattccttaagattgagtaatttaaaattagcgcccacaataaaagcattcattccattttcagttacatcgatcacttcgtcatcgcttttcttcgttcaaatcaccaaatttttgacaaaagaggcaccaatttagagttgtggatttattccgcacacagctcggatgaccagccgatttgggatgtttttgttcgtgaaatgtggccaatttttgcatcaaacattcgccacttgcgctttatcgatggtgatggtttggacaatttgcgtcgtcgcacttcgccgacaattctcactgatctcaaactgttgaattcaattcattcatttggtctgttgcctgatgtcattggtgattattttgacgggccaaatgcaactgctggccaagcgttgtacaaatggttgcactctccgagaaaagatggccaacccaagcgtttgcgttgcgaagattttaacaaacatgtggattgattgggtcaacaaattcaaggaggtgtggccataatttcggcaaatcactgattttgattgcctctatttttgttttccagcgtttagcaatttctccgtgccaccatttcttctgtcagttacgaaattgattttgctgttcatgtgccgtcaatgcaaatggtgccatttgaattggtgaacgaatggacaaaggaaaagctgacattggccaaagaaaacgaaaatgaattggaggacaactgttggattatgaaacgatgcaaaattggggaggccgcggcggttcagcttcagaaagatgaaaattgtaacaatgtgttcttttaccttaatgccaataattgcattgggtgagcaattaaaaaagcatttttattttttaaataattaaaattgcgcttaattaaggccattgtctccgccaccaccagcaaaagaagaaggacgacgcgggataaagcatcacaaaggagccgtcttctgacaatgagtgacggacaaagcaacaaataaaaacaatgataagcagaagaaatgaattaattaagaatgaccgatcgatcatatttatcagtggtaataatgttttttatgtaaaaaacctcttgaatatataaataaaataagaaactgaaaatgttgaaaataaggctcaagtacagtttatgcgtccaatcaaattttcattaaatcgacgacgactgaatggcttcaactaaaaacacagaggcatgaagatttaaagcaaaatgttacaaaatatcgttttgctgtctgaaaatggaaaaaacaattattattgatcaaaaacaatcaaatttttctttacccatcggtgccctccgccgcgtgtcgcccattgtccgtcgccgtcgtacgaaaaatggccaccatttcggcatttccgctctcttccgcgaaatcctgtgcccgtttgcctgaaatgggcgaataaaacgctcgctagcacaacaatttggccacttccgctgctgctcaccttccatgttccgttggttaatgcccgcgccgatggccaccaaatgccgtgccatttcaatcttcccacacttcactgcccaccagggaggggtcctagggggggggggggggg

SEQ ID NO: 14519 - DNA, 1491 bp, Heterodera glycines
ctgcccacatcaaagcattgtgtccctccacgtcaacatgttgaaggtcggctccatgttcgatgaggaaacacgcaatcaaacgtaaaaacgggcaacattaaatcgtaggcactttgtaattgaacattttatcaacatcttctctttattggcacttcatttttctgctcaaacgttggacaccagttctgcgagcagtcctggccttagaatcgttgcaatttaatttaaataaacatttcttctgcttttacccaatatcgctctccttgatatcaatgtacagcaaagattcgatcattttgtttgcatcattctccaatgcatgaaatgtgtgatcgccattaatactaactggtcgccgtacaaccactgccttggtagagccaatgtgtaagccaagtacatttcctccaaataaactgcaagtcagccgctctttcgtgtgttcattatgcaagtcaaaaggctgcactccacgcggcactcctgtacatgaaatcaaatagttgaccggaatggcattcgaagaagtgaagaactggaaattagaaggttaaaaattgaaataaagcccaaatttttcggacccttttcaggctttgcatgagtgtcgtccaatgtttcgcgtgggcccagcgcaatgtcaaaactttgggatatccatccgagctcggtgtatacaaccatcggaacaaattttgatccattgtctcagtcaagtgatccggaggatttagtaaagcttcaacaggaggcggttgttccggcaaaatttgtaattcaatgatggcacgagattggtacactcgaatagcacattgtgcgaaacgtgatgacgtaattgcgtaaagtttttggcatttaatcggttgattttggtgacagaacacgaaattagtggccagatacgttgcgacataagaacccagcagcggaagtcatttgcacgaattttcagcgtcaaagttacgccttttttcattgtatgttgcataaactgcagaaagttgagtagttccacgtcaacgtgcctggtaaaaggaggtcttaagaaaatttataattgtgttcgtgagaccaaatgtaaagggcgtggaagccaatcacgccgcttggtggtgaacacgttgcaattggcacagtttggtcggtgcatcccatttttacaagttgcattttgagtttggttccatccataaccgtgactgttccattttgaatggccaattcgcccaatttccatttacgctgtttgaaatgactgtccaccattttgtcgaatcgtgaattgatcattgcaaattttgtcccaagttcagcacggctaatccaaaaaaatgcgtcaaaccaaacgtcgtttggacggagcttctgaaaattgaaaaagatgacaatttttactccatttgatgccacatacaaatcaggagttgtggtctatctatgaggggcataaaactgtaacagccacaacgacactgaaaa

SEQ ID NO: 14520 - DNA, 1012 bp, Heterodera glycines
aagtgagtttaatgccagtgtagctccatgccaactttgttgatatctccagggagctgaatgtgccgacggcgaatgctgcgatttggagcagtgcaagccgaaaggtcggtccaccgtttgtcgggaagaggccaatgagtgcgatttgcccgaatattgcgacggaacaaacccaatttgtcctcgtaagaacaaattgctgtaaaattgccaatttcttttccatttaagccgacttttttgtccaggatggccatacgtgtcccaaaaattcggaggtaaatttccgtgtaatcataaattatgccaaactcagttttgatgaataactaaaaatcttggttttgccttctccaaaagtgcatatttggcatggcgttgtgtattgattaattattttgtgttttgccaacatcaaaaaattgcaggatttttgctaccaaggcgtgtgtggcagtcgtgagcagcagtgccgcttcatttggggcccgaccgcgaagaattccatcgcggaatgctacgcgtacaacgaatacggctcattcagcggcaactgcggctacgaccaggccaaagaccaataccatcgctgcaagaaaaggtgcggggagggggcgtcacagaatttcgctaattgatgttgttggatgactattaattaattgtggtcgagagtctcgactttggcaatttgttgtcttttgtcagtgacgtcacttgtggtcggctgcagtgtcagcacgaaagtgagcggcccgtgtttggcgatccgtccacggtgtacgcggcgtacaattttgtgcgcgacgcggccggccacgacgtgcagtgccgcgtggtgcgcaccacaatgaccggcgtgggcaaaaagcgggcggtcgacccggggatggtgccaaatggggcgcgttgcggcaaggacaaagtcggtgggattggcaatcacggaattaacaaacaaaaaactaaaatataaatgccatcaatcaggcccgagccaggggggggg

SEQ ID NO: 14521 - DNA, 1727 bp, Heterodera glycines
  unsure (1)..(1727): unsure at all n locations
cacatgcacgngcacagtttgaacgccgtttggggcgacgacgccgcgggggccggcggcgccctcgcgcgtgaagtaaaatatttaaaaaaacaactataattaattattatttttataattatcattaataatatttttaaggttctccgtgtggatgccaccaaaccgtacataataggcggagcacgcgcagcggtgctcaaagttgctgagagccaacaaaagcaggtgcaaacaacgctttggctagttaatcgaattacgatttttattgccattaattcctctcatattttaatggaaagtttcgattggaccaatgttttctcacaattattcgaattttgcaacggaggactcattcctcttatataaatacaagatgtgaaaatgccgttgtgaagccgcgatttaaattacagtttaatatagtgattaaaattacttagccctccaactttgggccatctccaacatcgaacgtccaatatttcaacaatgtcacggcattccaacaaatggcaacaaaaccagccaaaaagggaaataatggcacaaggggagggattgtgccatcgttggcggaacagcgctcgttggtcgcgcacccgggctatgacacgggcgggtctacttcctccgacgaacagcagccgacaagaacaacagtagcagaccaaagggcacaacaacaacaggaacagcaaacggtaattgttgcacaacaaccgtaccgtaatcccctaacaatggtaatagacaaaattacagtatgaccatcggcaccgatacggcgttgagactcctccgccaccgccgccgccccataaaaatgtacacaaaagcggagaaaaagtaaatggttaaggaaatgagcagcaacagaactaaccaaagagttcaggcagtacagcagaaacagccaaaaatgccaacgaaaccgccgacaatcaaagtgaaggaggaaaaaggaggggcagaagcgaagataaatgtgaaagcgatggcagcgaaattcgagaaaaaatgaaatgggttattcgatcgactctgatgtgatcctctccttaattctttaataccaaaattgcctttttgcatttgcaaattcttattttttgatatttctccgccccattttctttttaattaagcgattaccaaaatttctattcattttttgcaaattttcctataataaatgtgacgaatttattatggaaccttgagagatgtgcgggtaatagtttagtctgggaaccccattcttcaaaaaataaaaattttcaaaaatcgtgtaaaacaactttttatggggttttcgaggtcgctgatcacgaagctgatacccatttcgaccaattccgaaccccgggcctgaattttcacttcaaccacacaaaatttccaatttttcctcggcggcacttatcggcactccctactggcccaactcatccaatcaaatgacagttttcgggcaaggaagaagcattttgcgaaccacttttcagagaccgtttttgtacgagaacaacaggcaagaaactgattttaaaggggaggcgcgaacgccgtcccccacactcaaaaatttagctgtgggcctatcccagttcgggatcgccctgcgggtcagccccaaccgaaagtgcaatggtggagcctcgccacaggagacctgccttgatgatcgcaggaactccccagccaggtaagtttaa

SEQ ID NO: 14522 - DNA, 914 bp, Heterodera glycines
  unsure (1)..(914): unsure at all n locations
gggggatggaggggagatgaattgtttgtccatctttgcccatcttccgaccatcaaacatccatcaacggtccctctcgactatgggtcgtcgaaatttttatccatgaatttgagccaagaaaacattttttaattaatgattattttttaagttataattttttatcgattcaaattaaatttcctaaaaaatttccaacattatattttcaaattattttttgaaataaaattaaatttggctttaaaaatcgttgtcgaatttacacatttataataatataattctctttttttgatttgctataaattcccttcgttttttttaaattttccttcaaatttaacttccgattttatgcaaattttcccacttttcccatagttcttcttcttcttccttattttcatcatttgtcatttcctttgccatttttacaatttttgttttttaaaaattttattagcataaatttgtttcttttgtttcattaaatttaattcgttcatcgaaattttaattaagaaaatatacaaaaaatattatttttcatttattaaagtgcaagtttcataaaataacaaactgttcaattggcaattctcaataatttacctctcaaaatgaattcatcagcaaattggacaggtcattaggctatgcgaatgttaaaatacgagtaacaaatgtgatttagagaaataaaaccattaattaatcttttaggtccttataattaaataaaattttgtgataaatcatctctgaccatcaattgatctatattctgtaaaaatcaaaaaattaaatggtacggtcgtttcttttcaaaaggattcgncgtgttttnnnnnatactgaatcctcctccaagcattcaggtgtctttccccccctcccacttcggcgt

SEQ ID NO: 14523 - DNA, 3006 bp, Heterodera glycines
  unsure (1)..(3006): unsure at all n locations
cttaattggtccctccgcccgatcaatcatttttttctgtaaatgcaataaactcagttcaaattccgcatcctattccaattttttatatctctttcgtacatatttttattaataaaaaaaataaattttttatcattttaaaatatttagtatttcatttttcatttaatatggttttcattgtattttccaattaaatttcgtcattttgataattaattacaaattattttataagaaaatttctctcttctcaaaaagtgcaaaacaattaaatgcatattttttgttccacataatttagatgaccttctgctaaaaaaataaaatgctctgccgacgaccacacaaaatttgcataataatcgcaattatttttctcgtttttgtgccgtattgtgccgccttttgtccgccgggctgtgagtgccgtgacgatcaatttttggtggcatgcaattcttcggcactgacctccattccgatactgtaagtgttgcttttggtactgttataattatacaaaaatattaaatttcttaaattattaattattataattcaatattttctttatattctttttaaaaaaatttatatgatttacaataaaagaaattccatatattattatctttatattgtaaaataatggatttttaaattcataaattaattaatattttattatgcaattgctcatttttttagcctcaatccgatgctgaaaacattggtcatcacaaactcaaatgggcttaaattggactctttttcaattgctctttatcaacgttggttttttacccatttttttattttattttatttattttttttataaaaattttgtatttttaattgcagaacttgaatctctggaacttagcaacaaccaaataacgcgaattccaagcaactttttgagccggttaacaaaattgcgaagtaaaattcaattaactgcgaattcatttttattaattgccgataattaagcacttaatttacgtggaaataaaatgaaaattattgatggagcgaccaaagaagcaaaaaatttggaagtaagtcaaatttgaaaaataattaatacaccataaaaatttattaaattaaatattattccaataaatataaataaaacattcaaaaatttaaatttcatctcaccttatagcatttggatttatcatcaaatcaaattgagcacattttgccaaattccttcgccaactttggcgctttgctgcatttgaacttgtcccacaaccacctccacgcaattgaccttaccacttttaacggccttaccaatttgacggacatggatttgagacagaatcgaatctcaaaattggaaaatgaccaatttggcactttgtctgaacttgccaatttggacctatctgggaatttaatttccgaagtccgtaattgtttttatttttaatattttatttatttgttcatttagctaatggccaagccgttttcttcacttgaaaagctgcgcgatttggatttaagctcaaatttgatttcatgtatggagaaggacgccttttcgggactgcagcgattggagtcattaaatttggcacgaaatttggtaattgctgagccaatttaatcgtttcaacataaaaaaattctataaaattagttcattttatttaaaaaattaaatttattagctaatcattattatattaccaaatttttagtaaattaaccccgtcgccggatcggttcagttcattagccaaatttgagcccgtaatgcactcactcccttcccccggggcttcatttgtttgttttgagtgccaccgataagccaaatcccatgtgtcaatcttaggctttctcttctcaatgacttttatttgcacaaattttaaccaaatttattactgtttatgcggctatttcagctgatgaaacaaaagaaaaatgtatttaaaatttgttgaaaaattatattttacataggcactttcttcttaaaataattcgttataactccgtccaaaagcaccaaatttgaaatctcctaatccttcattagctctaattttctctattatctcacaaaatataaaagttgattggctttgatcaaaactttaaggattttcttttgtagaaaaacaccgtggcgaatttaagaaaaatcatttgatagatatgtaacatagtaacattagttatttttaaagttatcaacaccgacctccgaggttatcgatggttgtcgccgaaatgcaaattgggaaaacctaattggcttaaggaaattggatttgtcaggaaatgcttgggccgaggtgacttattaaaataaaattaaaagttttcattctttggaatgtgtgccagatcccagcaagaaccttcgatggtggcttatgggaattgagggagttgcacctggaacagatgaaccaattacgggagattagggtaacttacgatttaatagttttcaaaatgagttaataattttaggcaaatgctttcgtcggattgccaaaattgggcagtctttttttgaccaattcaacttttttgtcatacattgatccaaaatcatttattggcgctaattcattggagcaattggatttggccaactgtcaactttcgacaattgaccaaaacttgctgaattggtcaatgctgaagaaagttggactaagtggtaaaagatttattgtataaaaattgaaagaaaatttacaataattttcaaaagattgctttattatttatttataatatttaaaattaaattaattttcatgatgaacattgattaatttagttactatgaattttttttttaaactttccccaccgttcaggaaatcgttggaattgcgactgcgaattggtcgcatttttgccaaagattttggaacttcatcatcattctgcagtantttctgatgtcctttgtgccagccctgaagaatttcgggatctgaacattctcttcgt

SEQ ID NO: 14524 - DNA, 2871 bp, Heterodera glycines
taacgcccattttgatgttttttgactaacgctccatcactaacctgctgcacaatttaaccattcatctttaagggcaccaccgatttagtttagataaattttcagcttttgtccatggcctataaactaataataactatgtataaacgataaaattggaatatatgaatattccaaaagtcaccaatcgtacaaaattgagctcgatagcataactttttactgaacaaaaaattaaaaaaaaaattccagtggactgaaatttttttctaaaacctatgtatgacaaatactcactaaaattagcaagtaaattaggttagattctgttcagggaaggtttgaaaaaattcaaattgaaaaatgttcattttggcaacttgttttctgctgtgcatttggaattttgttttctaaaagcgattgtttgtctatttcagtggggtaatgatcgaaattttggccacacggaccaatcaacaaattgctgatctgagaaatgtttatgatacggaactggctattagtgacccacaatatcggcttcttgaggcttacatcaaagaaaaaaccagtgggccattccaacacttacttgtctcgttgcttaatgagtcaagagatgagacacacgcgagtgatgaggaaatggcaaaaaaagtatgctaattatactttaattacaaataatgccttaattaattggaaattgaagcaaaaataataatttatttcaaataaatataaataaattttatatttaacattttaccaatttattaacaggaagcacaacaactcttcgaattaagacggaaaggtgaaattttgtccgaaaccgcataaaaacattaaaaattttcccgactgcgtttgtcggcatcgctccaaaagttctgtttaaaaaaaggaattttaattcaaaaatgtttatcaaatcgaaaatttaatttttccaacgggcacctgttggcacggcgaatggcaacaaatttgaacaaatttgttatcaaacattatcaaaatatcatctgaatgataataatttaattaaaatatttaaattttacatattattattgaataaatatagtttttaaacggttaaacataatcgttttttgactccctcgcccactggttttttagattgaatgttcaggttttgaaaatttaagacttcaagattttcgattggtaattacgaaggatttttttccatcctttactagaatttaagattttttttaggattagcagcgaagagtccttgggtcagcaaaaatgctgctgaattcaacagagtgtttgctaaaggaagcttcagccaagtaaaaaaatatttcgcaaatttcaaatttaccatgattaatgaatgtaatttaattagaaatatatattaaagataaattttatttagctgcgaaaattattcgattattacaaacaaatagttgttcagcatcaaaaacaaaaaagacattataaagaggaatatgataaatctggtaaatacgacattgaggctgccatcacaaatgagttttccggaattgacaaggatgggtaagggataattgagaatgagtccgtttttctaagcttttgccgcctattggcacatttttatatatttttattgaatgtattaccgtaattatttaccttttgcatttattatataacgacagacataagctgaagctttcttattatttaagttatttggcattgatcaaatatgtccgtgacggcccaaaatattttgcagatttattgcacgaatccatcactggtaattttttgccaaaaatgcccagcgacttgactcgtgttctggtttcacgatctgaaattgatctggctgagataaaggtgactgatttaattgaactatttgtaattaaaaggcataaatggtataacaaataagtttttatattaaattgttaaataatatatataaaaaaaaattattatttatcataaaaagtaatgaatagggtcgcgatccacacacccctaagattcgacctaaaaattttcaaaaccactcctaagaaatgaaaaaaattttatttttaggtacctatttttggttttttgcacttaaaaatcccagtcctactcatttgcaactgcaactagtgaataaaaattatttttgcttaattttggctgaaaattaagtcactatttgtcactatttcgcactttttgtcactgttttgtcactattttgacatttttataactattttagttaactatttttgggatttttcgtcactaaaatttacagccctattaatgagcactaaagaattacgaaaaatttaaaaagctataacaaaaaacatgaatcgaaaactgaattttgaccctatttcaaccttaactaaaattttttgaaattgaataggataatcgagaaaccttgtgctactgaataatatcaacaatgtttagagtgcaaagattaaaaaaattaaattttattttagtaaaaatttttttaaaactttaaaaataaatgtgaataataacaaattactgttaaaaagaacgaaatttcattgaaatttttgccaaatgtctatgatttgtcctctgttttatcaagttctcttcgggtatctggaacaccgcacttttgtgagacaattcgaaaaattgtcgaacatttaaaactccaatttttgtcttaatggcaattagttacaatcattattaatttttatacttgcccatattttccacgaaaatcctttgatgagtacagtttcgcttttacgttcacccaaaagggagccggaaaatccgacaccggaaaatctgacattggaatatccgacacaagcggaaatc

SEQ ID NO: 14525 - DNA, 1186 bp, Heterodera glycines
  unsure (1)..(1186): unsure at all n locations
tgtcataaatgccacccaaaatgccaaaaatgagggnaagcagcaagaaaagtgcaaaggggcagaaggctcttctgctgggccaattggcagtccgcccggcagctgaaaaccaagttggtcagcagaagcagggttgatcatcagtttcagtgaattcgtcagtagttgatttcgtcagtgaacttaattgtctgaatgatgggtcggtcatgtttataatatggatgaaatatcgcaaattaaggacaaaatatggacaaaaacgctaaaatatatacaaaaaatatgaaaacttggacataaaatttctgggaattagtttgattttttgaaaaaatttcgtaaacccataaaatctttttagaaaaaaaaatcattttaataaaggaattatagaatttcataatttgccctcctatttatatttacaaaaattattgaactttgaaaaaaaatgcaaaaaatagtaataaatttttaaacaaaattcattttacacgaatgttatccatgaaaaattttgcgcactttttagtattttttcaaaatttttcggttttatttttttccaaaaacttcccatctttaggggctatttttgaattttttgcatgaaaaaatatggaaaaaatggaaataaaaacccatcctaaaagcatcaaaccaaggtaaaaatactatttacaattatttttacgccgtgtgtaaaaaaacatatggaaatccatacaaatccggaccctattattacaaatgtttactttgcaaaccaacaaattatttaagttcactgacataacctaacattgcgaaataacatgttaccatgatgggtgatgagaccaagctgtagaattatgccaatgtgaaggatgggttatttcgtaaaaagtgccacataaaaaattgttgtgttataactgatttttagggcgtgattttcatatattttgaacatcaatttctgcctaaaaaccaactaaatattattttgtttaatttttgaagctttagaaagaatgcgtatttatttcgagtttggaaaaaattcaaattttcaaaaatttacccctaacaaataaggtgcgaaaaaaaatttggtttacaaaaattgtaaaaaaatatatgtacaaaattcctatttaaaaatgaaatgcagttacctatgaatagtttttttttc

SEQ ID NO: 14526 - DNA, 3777 bp, Heterodera glycines
  unsure (1)..(3777): unsure at all n locations
attttgatccatactggnaattntggatattttttgagacgaattcttacaagaattttataaaaaaacattttctatttttatttacacgtattcctatttctttagcaattaataatcagatttattcttgctaatttgtggtattatcgcgtcaaaaaaagcatttttattgcatttttgtaaaaagtttctgaattttacataaaaatgcaaaaattttctgagcccgggaaatttatgcaaatttttgaaaattcaagacgcacttcagagttggacaatgttagtggaataaagggtaaaactagataatacccctccctttttggaaaaagtttttttttcttttcaaaaatcatgaaaacatgtttccaaggggttttctggtccgcttatcacgaatctggcatccatttcaactaattccaaccttggacccgaattcaaacaaaagtcgaaatttcagagttttcgaatttctcatttttagtctaaaattgtttaaacattttttaattgaagctttgatggcttttagattgtttccttattttaaaccgatttagaaaactcgaaaaatctaccatctaaagtattaccgaataaagcctaaataaataaatttgtgagaattttatttccagaaattctgaaaatttgcgatttttcagaaaaaattcagaacgccgttttgaaagggaattttcacaatgtaaatactagaaaatccgaaattttgattacaagaggtattttattttatttttttatcacttttttgaagaaagtttaaaaatgaaattcattgcgattcgggaacaaagggaggtgcacatattttcgaatggaaaatttttttcaccaaaatcttctaaaataggtctttaggggtattttaaggctatagaattgaagaatcattctgaggggggagcgttaggtctggatccgggtgaagtaaatgatttttctatattatttttccatgtttattaaaacatttaaacgaatttcatttagaattaattaatttttataaaatagaaaaagaaattattttttcgaaaaaataaaaattctatttaccccccgggcagataaatagagacggggagattatttttcaacctacttcgaaaggggtagataattggagacgggcatataattagagaaaatacggtatattttgatttcgggctattgttcttatttgttttgatttcgaaaattcatttggttttaaaaaatcaccaaatcatcagaattttttcttcaatggcaaatttttcaatttttatcctttcgttccgttcatttttgacaactttgaaacaggattttaaaactttaaatcaatttttcgcactgtccttccgtctgtccgttacaattaattaactagttgttcgaattaattatttactaaatgaggaagtaatttttgtgcttttaatcatttttacgatcattttggagtttgtaatcacaacacagaaattattattcattattaaacatttaataatggcaagggcaaaggcttctcccccattttcttccgccaaagtcaaagtgattccccccgccgcccatcgtttggcaataaaagggcaaatggaagagaatgggaggggggggggagggggaggagaagcactaaaacattattagaggtgtttttaaagagacaaaacaatgtttacggacagaataccaacagaaagaaacagcgaaagcgcacacaaaatgcattttatccgatcaaaatcagcttactgattgataatgaagttgcatttgaatacacattttaaccaatgaataacccaatcgatggcacgtcgtttaatggcgaaaaaatacagtatttaatttatggcttatagacttgggcccggcttcctaaagggtcgatctctttgaaagcttcaaaaaagttaaatcattaaaaaagttgtttatacatttttttaattttcaaaaatttaaaaatttttcgcaacaatttcaacctcaccattttcgccatttgtacgagttcttatgacacaatttcttttggggtttttcgccactaaaaatccgggcataattatgaaaaataaaaatgtaattaaaaaattgccgttcagattattgttaattgattattgcttttgccttccaaatgcttagaaagcttttttatctcataatggtggcactcaccggaacagttcagtcaaaacttcaaaataaattaaattttgattattagggggacgggggctttttcaatcatttttaaaattcgataaatggccaggtgcagcagacaatgcccggcaacgccgtgctcgcgttcaccactccgtcgacgcccgtggccaatcagacgctgatcaaagtggccatgttggtggcccaaaatgacacggactacggcctgccgcggaaaaacgcggcactgcgagattctggcggcgcaattccaatggcattggaacagttgtgggcggacgaaatccttccaaaaagcatcaatttttcgtcagttaaatattttaaaataaaaaaattgaacaaattcacagatttcaatggcattatgggaattgcaacgaggcgtcggcattgggccgaatttacaaatatgtgaaggaattcgatgccgacgcaatcatcgcaacgccgtgcatggacggtgaaagaaacaataaatttaataaaaaataattaaacatatttaaatttataaataataaataaaataattaaaaaacattattttgttgtcacagtgcccccaatgcttggccatttggcttccaatttcaacttgccaatgatggtttggggacagagcatggcgtcgatgtgagttcataaaaaaacccttctccaaattggcttaacactcaattgcatttcgctctgttttagcctcgcctcctccaacaatttgacttacccaactctgctgaacattgtgccaaattacaaatagtgagttgactcatccctttgttttacggcatttccttctttagcatggcttccggccttgtcagtcttatgcaatatttcaattggactcgctttggctttgtgcttcaaagtgacatcaacggagtcagcggaggttaacgcactgaaaaggcaaaacaaaaatttccatgtgaataattataatttaggctgtaatttattcgcccgcgacatcgatgtactgtaaaaccgtattcaattgaccgtttctctttttttggatttaaaaaatacatttcatatatttagaaagcggtgggtgaacagtcgacggtcagtatcaatttcaaggcacgcattttcaacacccaaacgtccgatttgagcacaattgtcaatggactgcgcaaaagggcacggagtgagtgggggggggggataaaaagggatttgttgggataggacaagtgaaataaaaagggattttaaaaacggatcgggatttgaattaaatgaaatgaaataaacccaaaatgtaaaaacacattccgatatgtcagtcattttgctttgcttcgacgacgtcactcagttgcgaaccttcgcactttctttgtttgatggaggactgaaaacaaaggtgcgtgggatgccaaattacgcgaattaatgatttaatcgatcattaaggattatttgtacatcatcccggataatgacctgatcctttcatgtttgatcaattaataaaataattgattcatttatttgttctttgtatgcatatttagtcaatttgtcgcg

SEQ ID NO: 14527 - DNA, 1873 bp, Heterodera glycines
  unsure (1)..(1873): unsure at all n locations
ttttattcgaacgaaagaatcaacaaaagcatttcggagaaaatgatggcatcaaatcaaattccaaatgtgtgagatcggccatttctcaaattaaattatttttcaatgctttcatccgcttcttcttccgctggcagcgacaatggcctaaaattatttatattttttcgacaatcaaaaattgcttttgctgctcacccaatgcaatgaattccatcccacaaatcaaatcggatcttgttcaaattggcacccgaataattggcatatcgcagctcaaatctgatatagttcaaattagcacccgaattttcacgttttcccacttaactggcgccgtcgccgtctccccaattgggcaccgttgcaacagccaattatacaggcaattatagcctaattcatcgctatgtttcaatgtcagcttttctttcgtccgtccattcactaattcaaatggttcaatttgcattgtgtccacaagaaaaaacagttgaattgtgtaactgacagaagtggtggcatggcgaaatttctaaacacaaaaattggtaaaataaaaacaaattgacggaaattctggcgagacacacctctttgaagttgttgacccattccagctttggtggaccaaaataattattgcgatacaattgcttcggttgaccatctttgctcggagtgtgcaaccatttggtcaaagcttggccagcagttgcatttggcccatcatcagcaattccatcggggaatagagcaccagaatcaattgaattcaattgatcaacatcagtgagaattgtcggtgaaatgcggcgacgcaatttgtccaaatcatcgccatcgtgaaagccaaaatgacgaatgcttttcgcaaaaattggccaaatttgacggtccaaaacatcccaaattcgctggtcacaatattcaatatacaattccaaattggtgccacttctgtcccaaattggcttgttggaacggagaaatgtgagcacagaatggtcaatgtaactgaaaaggggaaaaatgaagattggttttctgtatattttttgatttactgaatctgaaggtccttaaaacggattttgatgggcagcggacggtccggcaatggaaatgccacgcatttgtcatcggtccatacagacagtttcgcttttggttcttcgtccttgcgaatttcgattgctttccaaattgtgaattcgctttttccatcgaaatgtttgtccaccaaaacatcgaaacggtcggaaagcaatgccattttgaggccgagttcaggacggtcaaaagatgggagaatgtccatccaaacgtcgccacaaatccaactgaaacataagaaaattgggtaaaacgaaattgtaatttttcaaaagaaattgcttaccgtctgttcattttttcgctattctgcatcaaaaatgtcttttcgacctttttatatacctactaaaataaaagtgagagatttgaaaacggatgaacggatggggggagaaaaatgcccgaacaataatccgatttgatgtattttcattaaactgagtaccgaggtcccggttttgaccgggaccgggaccagtcccgggtcttggattagtacttattggcacctacctatgtactcgaaatcgaccctcatgcaagaaaatttaaaatttgccgattttcaagattaactacatattttcgaaatttttcgtctctaatatcgcaattataacttttttttttgttgaccaaatccaataaagttggtatcattcgnaagctcttaacaagctctatcggctttccaaaaacatnaagatttaccgacatngtaaaaagtataaattaaaatatgcaaattctg

SEQ ID NO: 14528 - DNA, 1451 bp, Heterodera glycines
tgtttcatttcggggggggggggggggatctggaatcttggaattttctgggtcccaaaattctggattttttaataaattaaaatttcttaaattttttgcttttaatcgctgtttttgtggcgctgttttcctaaaaaaaatgaccgatcatttttcagttacgacgaattggattgatttgatgatactttgttttttgctctttgggcgtacgatataaaagtgagttttgaaaattttgattttttgttaaattccgaggttcgcaaacttaatttttaatttaatttaattactaaggttttcaataagatattaagtgtacatatgttttattcgaacgaaacaattaacaaaagcatttcgtagagaaaaagagagcatcaaatccgtttcctattggcgagatcgatcatttctcaaattataattatttttcattgctttcgtccgcttctttttatgggaccaatgatgtgaacgattaccgacggcgccagttaaatttgaagaccgcgtaggcattgctttcctatcgttttgatgttttggtggacgcgcattttgatggaaaaaacgaattggtaatttggagaattatcagaattgacaaggacgaaggaccaaagccgaaattatctgtgcggattgacggcggcacttttgtggaatttccgttccccgaccaaccgctgcccaacaaaattcgctttaagaagcttcggataaagcaattttatacttttgtatattaaagcattttttatatttcttcaattacattgaccattccgtcattgaatttctccatgccaacaagcaaatttgggacagaagtggcaccaatttggagttggatgagtggtatgccaccgacgaacagcatttttgggatatttttgtccgtgatatttggccaatttttcctacaaacattcgtcatttgggctttcctaatgccaatcatttggacaattggggagacggcggcggttcagaaacagcagcagaagaaggacgaaaattcggatgccaatttgaacaaagtgttcttccgtctttacgatgacattgggtgagcagaaaggaggccttttttgtatgaaacacggatagggaaacggtatcccatgtacagtactttcccagaatattggcagggccatgggttctgctaagacagaacttcagtccttgttttgtcttttttgctctggtccatcccgaaaacccttctggtccgggttttttcaataattacgggctgtacttgcgaaaaagttatccgattcaaattgcgcttaatttaggccgctgtctccgccaggtcaaagccatgaaaaagtgttctctttttccgggtccagtgatcagcggaagaagaaaaagtgatcattttgggaaatggccgatcattatcgagttatgatgaattggattgattgatg

SEQ ID NO: 14529 - DNA, 1014 bp, Heterodera glycines
ctgcattttccgccatttttaatttccccggacatttcccatttaggattttgccatttttattttttctcggcattccctttggcattttccacgagtttttacttttcccggcattccctttggcattttccaccgtttttggcattcccaatttggcgttttccaccttttttaacctttctggcattcccaatttggcattttccacaatttgcacctgtccccaaatgtgttcagccaaaactcctccgcctgccgttttgtgattcgaaatttgttgcccacaaatttgccctccggaaactgggacttcagctcggagagcatatgcgcgaagatcagcgagtttttggtgaggtggcgccgtccgctggtgccctcgtcgaagatttggtcgcggtacgttttgaacagtttgaccgtctgtttgcatttcagcgtcaaattggagaggaacagacgcaagtacaaattgtcctcaaataattttggtaaatcaaactcaaattttgttgttttcaacaaatggggccaaaaacattaacaatttatatggaatttttttttaaaatatggataaaacccatataaaacttccaattcaatttttttttatatactaaatttgccaaattaaatttttatttaaaatttggttaattttttaaattttctaaagctgacccttagggtgatttatttatgaattttatgggcaaaaacatttaaaaaaaagattttaaaaatcgattttctctttttcaacctgcaaaatgttgggctcatttgcaaaaatgctgttcaacagattgtaaatgtcgggcagaatgtccaggatgaacggcggcgagttcttcaagttcagccggggctgctggcacagccgaatcaccgtctccatggcacgatagcatttgtccacggtgcgtcggtccttcacagcagcggggcataattatttttttgaattattttgggaaggaattttgaattttgccattggcccctaaa

SEQ ID NO: 14530 - DNA, 2153 bp, Heterodera glycines
agataatctttaaaaaatttttggagcaagattaagtgcgcacattaatagctgcaggggaaataagaagcagcggtttttgttggggatggaaaatgaaagctaaaatcccaagggattttcggatggataacggcggaagggagggatttgggacaaaactgctgttgctgctggtggtggtggagcaacatttgcaagtctcctcgatcatttaaaagatgattaaatcccaccaattgaatgaatgctcttcgctaatccctcgtccgttggtgtcccaaaaatggacaccaatcaaacagaaattggaaaagccatccccaattgtacagcaaatgtcaagaaatgatttaatttctttctcttttaaatctgtctttttccaaaatttgtacaacattttttccttattcaacgccgcacattaaattttgcagcacaaaaatttcatttcccaaattttctctatctttctctgtgtatgtgcagctgcatcagcaacagcaacaggcaacaggtgtacgcgcaccgaaacatgcctatatttagcaaaaaaatggaggggagggaatgggaaattggatgattattccattcattgagcacaaaagaccaaagaatgggtggagcatgaggaggaggaggaggagagggatgaggatgaggaggatgatgagggagaagaagaggacgaagagggaagcggaggatgaggaagtggaagatgagaaggggggaggaagaaaagcggatgagaaggcgggagaagaaaatggaggtgaagaggacgagggggagaaagaaagaggatgaggaggaaagaggagtgaggaagtggaagatgagaagggggaagaagaaaagaggatgaaggggggagaagaaaatgagggggagaaagaaagaggatgaggaggaaagaggagtgaggaagtggaagatgagaagggggaagaagaaaagaggatgaaggggggagaagaaaatgagggggagaaagaaagaggatgaggaggggagggtgtctggaggacggacggacgacggcataaaaaaaagattttgagcagtagcagcagcagggagtgatgggagatgatggaggacacatttgttgtatgtgtgtttgtgcaccagaccagggttgtggcgaatcgaaaaatgcaaatgcgaaatacaaaatacgaaaaaaagaatataaaatttttttttaatttgcaatttgtaacagattttgtcagtaaaatgagcaaattttgcaattttgagacaattattattttcattttaggatttttggatcctcgggatatgccaaaatacgaaaacgaaacgctctaaaacacgaaaagcgaaacgatgaaacaacccgggtgtgtacataaatctgcacatttctgttctgtcatacagtcatggtcatatttggatgctgatcaaaaaaggtagcaacaccaagttgatcagatcactccttcatggtgatctgatcagcccattttggctgggaacgagggtaaatttcaaaaaaaatttctagggggttgggaagtctttatatgtaaaccatgagtctgttccattaatagattcccatgattggtacacagttgtctttggacaactgggactcttttgtggccaaatagaccaacaagttagtcaaatgtgatgggatgcacacagaatcggacaacgcaatgcctaagcgagaaaagagcgaagcaaattttcgatgggatagacaaaattgtaaaacattccaaacccaccgaattttactctattttattatttttatggacctgctccgctttcggtatacattgccaagttcagtccacatcgcttgtaccgggaactcttcccgcaggattataccgaaatgatcgcctctgcccctcccaagaaaatgattatgggttttgccgaattgcactttttgctcttcagtaatcaatcaaaatgcatttatcagcagctgttataaataaattgtttttaggcttaatttctagaaaaaaacaaccagcctttccctgttggtacttacgtacgaaacaattgccaattacgaccaaaaagcatttgaagcatctgtcaatgaatacgtaaataaggaaaaatattttggcaatcataaaaatgaa

SEQ ID NO: 14531 - DNA, 912 bp, Heterodera glycines
ttttcggtttttaagggtatagtttttttaattttcaaaaagttgaatcctttaggggggggtattttttcgttatttcgccatttttcttgtgaaaatttcccaaaaaatgaccaaagtatgctttaaaaatccaaaaagggcaaaatatgcatttattttcgaaaacccccaaaaatatgcttttatatgaactttattttttttcttcttcctgccaaattgattatataaataatgtattttaaattttattaaaggcgtcgtcaaacagtttaagtcaaattaatttttatccaattatatgataagtccgttttgtattcataaaaactttattaaatacacgtaataaaccatccctttgcttgtcactgcgacacattcagaaccagttggttggcgcccagtcgaccccacccattcttttgtgcttttcgtttttattacatttttgttaaataaattttgggcaaaacgccaaaatagttttttttttcgaaaatttttaggctctatcatctcagtcattagtagggctgctaattttatgtaaatacattttttttttcctggcttctccatgctctatttagtaggaaaaacactttctttttgtgtttgcgaacaaaagttgagacttttatttacatatttcggggttttatacatatttggtacatattttggactttttcttacatattttcattttttttcacatattttgaggattttttacggaaatttttgaaaatccttaaaaaaatccaaaatttcggcaaattttcatttttttatatatattttgaagaatttttgaaaatttttttagtaatttcttgtgaaaaaataaaaactttttttaaaaaatataccctaaaaataccaaaaataattattaaaatgtta

SEQ ID NO: 14532 - DNA, 3683 bp, Heterodera glycines
  unsure (1)..(3683): unsure at all n locations
tacaaaaaaaggattaaccgtgtgtaaattttgaattaacgctataaaaaaacgcaattaggctatttggcgttatgtataactttgtctaataagaatactgtagaaggagatagcgagttttatattcatttttactagagttgagcgggtatcgataattgtaaaagaaacggaaccgggactgaccggaatggaaaaacggaaccggggaccgggacaaaaatttttcccccgaccggggaccggtcccgctcccggcgaaaaccggaaatttcccttgttaaaaaattttggcccacttttttaattttaaaaaattattttttttttttccccccgggccgggtttttttctttaaaaaaggtttttgataaaaaaaaaattggagggggggggaaaaatttttttttttccccccccgtttttttatccccaaaatccaaatgaaaacccccaaatttaaaaaattgcccacaaaaggggggggggggcccatttttcctttttttaagaggcccccccccccgggaaaaattctgaaaataaaaaaaaattttttttttttattacccctctttttttcccccccctttttttctccaaaatttttttaaaaaaaaaaaagggaagaaaagaagagaggggggggcccgcgccgaaaaaaaacacgnaatatatttttttttttttttttaaaattttttttttaaaaaaaagacaaaaaaaaaaaaaaatttttgttttttgtgttgttctttttgggggggaaaaaaaaaaggaaaaaaaattttttttatttttatttttttttattttttttttaaaaaaaaaaaaaaaaaaaaaaataatcccccgctgccggggggggcccccccccaaaaaaaaaaaaaaaaaaaaaaaaaaacccccccccccccccccccccccccggcgcgccgccccgccaagcattaatttttatttatattttttttttttttaaaaaaaaaaaaaaaaggggggggggggggggggtctcccccccccccccccccccccccccccccccgccgcgggggggcagtttttgtanttataatgataaaccgaaaaatggggtttgcgcttcgcggccctgcacggttttcctggcatttcttatgacacacattttttatattctaatgtcttttgttttctgtcattcttaaacaccactcagcatctcatcactggagtcaagttacggcatacaatcactggactcattctcggcattccgacactgtgactcatnntacggcatccaatgaccaggactcaattctccggcattacaatcactgggactcaattctccggcattccgacactgtgactcaatttaacggcattcaaatgaccaggactcaattctacggcattacaatcactgggactcaattctccggcattccgacactgtgactcaattttacggcattcaaatgaccgggactcaattctccggcattccaatcactggaactcaatccaccagaattccaatcacttttttaagtaaattgtttaatggcaggctgcaaattttttccgtaatgatctgtttttctttgattaaaattccactttctttttacctttaggttttaatcattagtgtatttctcttatttattgtatttagaggttatagttaaaataattgttttcattttaaatattttcaattctctaattaagaatattaaactattaataacgaatgataatgcctacagctttttttgtttgtatttcattataataaattcacgtttagtacataatacttgaaaaagaatatagtattgtatattattttcctcaataattcgaagaagttttcattttagtcttaaataatttctaaattgatatgatccatttttctcgtactgtgcgttttattggtgtcgagattgatttataaattatttattaatgaccgtgcattttatatatttaagagcaaaagattaatgtaaaaatttacaactataaaatcatcaaatgaattctaaataattaaataagtttttagtaaaaatattgagtatttttacaaaatttattatttataaaataattcatataataacagcaatcgaattgatctccgaaatgactattcaatatactaacacgcgtacaaatcttgaaaattttaatgtgggtaattttgaaaataaaataaaaaatcaaatgtaaacaaaaaatcaaaattaaaattcaattgagcaagatatataaacaaaaaaggacaaaaaaatttgaaataaatttattcctgaaatttatgtattaaaaataatttcataaattatgaatttcaaccatcttcattaaaagtcatccaaaataacgatcttaactcggatataggtgaattaattaatttatttatctaatctaatttttaaagaattattaataaagcataaactttcataaaattttgtgaatttaatcagggcgaccactgtacttattctaagatttgcgcttatttagcgtgatgagacatttgcgccgcgccatttgcgccgcacagcaaaagtggacacttgcgccgctcagcaaagtcgatacttgcgccgcgccatttgcgccgcagacagttgcgccgcggatatttgcgccgctccatttgcgccgcgacatttgcgccgcccagcaaaaattgacttttgcgccgcgctgtcaaaaatattatattcataaaaattccactattatcaataagttttactaaaactataagccatcgacaaaaataactaattgaaaattcgaaaaaattactagtcaaaaagattgacattcaattttttaaccattaaaatcaaatggcgcggcgcaaaagtcggctaactgattaattaatgcataaaccaaatatgatacaaattcactagctcaaaacttatttcacatcttcaacattcttaaaaactagggtttctccccgacccctgggggggggcaaaaaaattttggagttttgggaggccggcggttccgataggcgccgccgaaagtttttcggaattttaggaatttttaattaactttattaagaaaattgtacaaatttaaaaattttcaagagttcccaattccctgagttagtgtcggggggtcgggggataaaaagtcggaggtagggggctcggggtcggggagcaaccctattataaacccccaaaataggtgccaaaaatggaaatgagataaatattttaaaaatcaaaaatgtagtcaagtaaataaataaataaataaattttgaatatgaatttttgataaaattttccatttctcaggggtgtatttttcgtttttattgcatttttgttaataacttttttcaaaatagcagaaaatattttacaaaaaattcttcaaaatgaaaaagagcacaaaaaagcaataaatttattattattattaacaggttatatcgctccgatttaattcggtttttttcggtttttcataaaagtcggtcggttgtttcgggttttgattatttcggtcggtcggtttcggttaaaaacccgaaaaaaaccgaaccgaaaaaaaccgaaaaagtcaaaaatttctcggtcggttttttcggtcaaaaaccgaaaccgaaaaaaaccgaccggtccgatct

SEQ ID NO: 14533 - DNA, 2628 bp, Heterodera glycines
  unsure (1)..(2628): unsure at all n locations
tctagagtcagacgccatttgagggacaatttacatttgcgcattcattgtggaccaaattacccgcgggaagcgccgatcgntcgctttaccactaaaatcaacatgaacggagtgaatcagcagaacggagtggtgggttttggaaaagtcgttggtcattggcattttgaaggtcgacaaacgcgtggttccgtcacttcgtcagtggaacccttcttatcatataaagactgtgctcgaggacatacggaggttggcctgtgacattaatattcttaattgttctatgtaccattatttcaattcgtcgaaaaggtaatactggaaaacctggactacgtaaaaaatctcattaaaacaccaatccgcggggttttttggggggcttctgatcacaaatatgacatcagatttgcaaaattaatttccgaataattattgacaaggtgataaatgctcatctaattcaacaaattatcgagtgctgctagacgtaaatatttatataattcaaacttcgaaaatcggattttaaaacaatgataaaatcaacgattttgaaaattttatatcatatttgtaaacagaagcaacgaagcccccgaattggtcgtttcataacagaaaaaaaacattatttttttgtggagtcaagattctccaatattaccggtaaaaatcattcgacttacaattaatttattgttagtctataatttaatttccaaataattttttttttgttctttataggcacttgatgactgccaaagagaattcgaagctttcccagcccgccgaaggttcgtcgtactgatgggttgcactccgttccttcaaacgaatattccttccatcggtttttgccccaatttgtcgtggtatttcgttataatttgagtccttcgaatttagctcctcctttttgttcgttcgtttgttttgtctcttcactataactgattttaaaataaaaactcccagacattttatgacaaatgaatatttagctccgaagtttctttttgaagctttgcttattttaccacgtttctatattacctaatttatttttactttgtttttttctgccgtttttctaatggtaagaaattcggccctttcttttcttcacttcctttgttttgtcaggagctttattttgaaattctgcgcaagaagcaacatttgctggtgcaggcgcgggagaattggacagcgaaagatctgaaaagagtggtggagggcattctgaaggtggtaccaatttccactcataaaatatggtctcgttaatcaaaggaatagtcaggaactgtattgggttttgagggaagttggtgattaatcattaatgacacgcttttcaggtgccacccgagaaacagtctctgtacaagccgaccaatgagcagcggacggaatgggaggcaatggacgagaagcaaacgttgcacgaattgggattcacaatgaaaaatgcgcgagcggatggtaaaactgccgatttatgcggtaaagtcgttcctttgtaggcccggctgtgttggcgttggttttgccaggtttactcacaacctgacttagaactgtttttaagttcatggcttattgacagaggatggcaaaagtcccgacatagtgccaatgacagtcgcaccgccggtgcccgaagcaatggcacagaacaaacagtccgaagttgaaatggtcgaggagtgacgacaccactaacattttagagggcagtgattttctcagttgacttcgccaaattttattggaaaataaataataccgaaagccattaaacaccttttactgattaaattaattattgtcacacgacaaatttgagtgtgataaaagcaggaaaattgacgagatcattcacaaaaattgctggttggaattgggcttcatttcgtctaagtattcgagtgtcaatttgcacaatcctctaaaaataaaaggtgatgaaagttaattatgcattggattgcctcagtgcatcaatttcagtgggtccggcaaatcgaaaaaattctctgtcgaaacttttattctcccggtgattgttttttgctcttttcttccttttgtcttctgttttatttttcgaagagtggatggtaacagcaattcggtgcctatcgtagtcgagctcgggagacaaaaggaacccgcgttgtcgcccttaaatgtgggccaaatttcttccaaatatttttctcactttggatatgattagttgcttttctgttaatcagaatcggaaaagcatttggggatgcccagtttaagtttggcccccagtgacgagtggtcacattttgggaaatgttcggctgtttcacagtttgcatctgaagggctctttcattaggttattttagccatttcgctaaagttcttgatttcttaattcacctctctcagcgtcccacaaacaaaacggccaaatttgagaattgctgctccaaacttttcgatttcgcttttatttgggctttgtcggaaatgccatttgatacattcataaaatttggtgaacaaacggaacaaagaatcggctaagaaggaaacacgctccaagctgtnaatgctgaaagagaaagggaaagt

SEQ ID NO: 14534 - DNA, 2108 bp, Heterodera glycines
tgcatttttagtttttacatatttttttcctgagctcccagtgatctgaaaagcacgaaaaccatggttaagctaatttctaatttttagaaccttttttaagtttatattttttagaacctaaaaattttcgaaaaaaccttttatctatttggcgttttgcccaaaatataggtaaaaatgcaaaaaaaaaaaaaaaatcccccccccctacgaatcgaaccctaaaatttccgaggctgggccctagactggttccttcttaaaataccatcacggcccggctgattttaaaatttcagtttcctcattatcttaagcatttatttttgctatttcttttttttcatattgaaatttcacaagaactgtgcttctattgatttacgtacctttttatgatggacgaggacatggaagaagtcgaaattgtttttgctcaacgattggccagcggtgaaccaacggcacgacaaagggccatgaaacacttgcgaacgcacataagagaaaggacgaaaactgatgcaaagggtgcactttcttccacttccaacactttttgttgacattcccttttcttttcttaggcttttcctctgtttcgttagcgcgactttgcaaagggttgcattatgcgctttggatgcaggacaaaatgactttgcaggaggaacttgcggatgaaatctgcgctctttgcaactattttcgcaccgacgagcaactgcttgaatttgtcgttgttctgttcactacgctttctaaggaatggccgcacatcgaccggtggcgaatggacaaatttctcatggttatcgcaatttcttatggctgatctgtcacttattccgctggtttatattcagttggtccgtcgtttggttcgcactttgttccgtcaattgtcctcccaccgctgggacccgccattgtgtgaccaatttttgcaaatgtttcgctcttcgctgctcagtgccaattcgcctttatgcgagtctttgaaattccattgcgcgtccgtttggttggacgaattggacacagcggcaacagcgaaagtgacgccgagcgaagggaacgccggcaaaaattgcgaagcctttccattggatgaacagcgctcgttggactttgtttggccttatgttcaactgttgcaggagcaaatttcgtgggaaataaacaaattggtgttaaatggaaatattgccaattaattcagtgactcttttttccgcacaatttgttccgacattttcgatgcgatactttgcgattttgagcaacgaaaagcggagaaaatggacgaacattgcgacgagaaacagcaaaatgtaacagtggaagaagaagaaaaggtggacaaagcatttggggctgaagtttccgaaattaatgccaaacattggaaaatttacagaagaaaactgaagaaaaatcgtcgtcttttgaatttgactacaagcgaattggggaattactttttgaggttggaaaacaacagaaagtgccaagtcggaggaggaagcgaatttacgcattgtgtaagaagtaagtgaacgaagcaaaagaggggaagggacaaaaccgggaaaatttgaaattgattgcaatatcttttttttctggaattcaacaaatttttgttttcaataacacataggttttcaaaaaaacaagctaacaataaaacaattttttaattcatgaaatttttgaaaaacaaaaattttttttttgctaagacgttttttccggccacgttttgggttgtgcccgggggggggggggtatgtaccccgggtagccttccccctgggaccgtccttgctgtggtgtaagtggtcgcctcttcgttaaatctttatttcttctgaatgaaataaattagattatgttcctataataaatttttgggttgcaaattaagtgcgaattcatgttttttgtcactttatcccatgaaactcaaaatgtatttacagattcgaatgtgcggcccaaggcgatgaccctttcccggtgccaaatttggagggcgtgaaaatacgtaagaaaaagcgacgccgaaaaaacagcagctcttgacaagtcgccattgttat

SEQ ID NO: 14535 - DNA, 3142 bp, Heterodera glycines
  unsure (1)..(3142): unsure at all n locations
aaatcccaataattgccttactttaatccctttccatcgcattcggcatttccccagaatcagatattaacctcgatgtaaaggctttggaggaatgcatttaatgctttgaggtcgtctatgtaaataaaagtcacgttttataattacgttgatcaagcgaaaaccgtatgattctaattcagcaatgagcatgtggccaatctcgtgggcagctatcttagaaattaaaaacgtaattaaaaaaggtggcacgaaaactaacctccgaaagcgcgtgtcgtttatgacgataaggaggaaacacgttctatgttctccaaactcatcctccgtagctgtacacatgccgattgaaagtaaaagcccaaccaaaaggagagttgaaataggcgcagaccgaggccaaagtcttcccggaggagattctcatttttcttttgaaataaaatgccaatataaaccataggatttctatggcgcttgcgttgattcgactcagtaaaattacgccaattaattcccagaaaattccagagtcgagagtgtcgatcagggatgttgcaaagagaaaaataaaaagcgaaatcaaaataaaaagcgaaaaggcgaaagcgaaatgcccaaaaaaagcgaaaaggcgaaagtttttcccaaaaaaatgccattgtttatttcaaaaacccaatctttaggggtgtacatcaggaatgggccgaggtttcgcttttcgcatcctcttcagaaaggggggataattagagattgggggataaatagagaaggggggattatttttcgacagaattattttgtgtaaaatttttgaaattttttgaccatgtcgccaaaaaatgtcatcgagtcaaagaaaaatcattttttattgcattttttaaaagaaattctgttttttctagtcttttaactatctataattatggttgtaaattatatggattaacatattttttctacgcatatgctatgaagaaaggggcttaaaaataacatttctgcgttaaaatttttcgatttggtgaaggtttttagtccatataaatccatattttgggcttgccactataaaaaacattttggaagttggccactaaaatagtttttttttgccacaaatttagcattttgccacctatttttcactattccgacattttttggaaaattccttaacaaaaatgcaataacaccaaaaaatacactgtgttaatttaaaataaagacaccctgttttttgggagtttgaccacttcccatgaaccgatcgagctgaatttttaactgtacgtagcaattctgaaaatattaagattctgaaagtgagaaaccgaaatgatgacggaaaaaagttttacgattttttttcaaaaatggggtgttaatttaaaatagaaaaatttttttaggtaactattttgggttttttggtcttaaaaatcccagtcctactcatttgcaactgcaaaatttcgggtgaggtagttcttggagggggtattatgtcattatggacttttcgccactatctttgccactattttggcatttgtagtacttttactgtcgattttgtttgtttttgaaaaaaattgacggcatataattttctgaaaattctatttatccccctggaggataaatggagactgggggattatttttcaaacccctcctagactgggggataattggagattgggggataattagagcaaatacggtatattacccatttatcattttacaaaaaaaaaacggaagcaaaaaatataaaaaaaaaaaaaatcaaatttcttttatttttcatttaaaatttgaaaaaatacagaattcaaagcttttaaaattatttcatttcggctcccggacaatccgacagtggacaatccgacagtgaggacaatccgacagaagtggacaatccgacagtggacaatccgacagtaaatttctattttaaaaaatattttcaagtcattagaacggattatttcctaaaaatatctcaatcaaaaaaattattaaaaggaaatgactagttactatttaaaataggttatttcgcgtcctttaaatgtccctgcaaagtttggtgcgcttctgatcagtttctgaaaaaaagttaagcctaaacattttggcctgtttaaaaaggaattaaaaatttttattcttcaccatttttcataatatacgcctaagagggcctttaacacgtaaataaaataaatgaatgaatgatttgaagaggtaaacggaatggtcaagactttggcaaacatttttatcagcaaaaatgctctcatttctcatcactttggttttatgggtcactccacatttacttttgcatatttatttatttatggttgtatggatcacttatctttaattattttttattttattgtacttttgttaccagcataccaaactaactttttttaatttggtaacaaattaaagctaaattgatttgattgagatatttttaggaaataatccgttctaatgacttgaaaatattttttaaaatagaaatttactgtcggattgtccactgtcggattgtccacttctgtcggattgtcctcactgtcggattgtccaactgtcggattgtccactgtcggattgtccagtcacgtttcatttctcttccgaaaatttgaatcgatcgatcaattttgcctcaggcaattccattcaccggaaatgatcagctgcgtcatcagcctcagaatggcaccgttggcacatcagctggtcttggaaatccatcagcaatgtttttctacgcattggacgacgatcagcggccaaatgacagcaatcaacaacagcagatgatcagccgatggtttgaaattgatgaacaaacgggacagatcagtgccatcagtgcgccaccgattggcattgatcagcagcgcaaaaccgtcaaatttggggtaattaatcaatggatgagtctttctctctctatctctctctgatcggtaagccaggcttctctgattagtgattttcactgacaaggncagaccttttgatttgcaagcccagtttttttgatccgcccaaaattgaatcataattcgtcatttttcaatgccctaat

SEQ ID NO: 14536 - DNA, 3955 bp, Heterodera glycines
ccaaactttgctctttttaacaccatatcaccttttaacgattgatatatttttgaaaatccgaaaaataaaaagcaaattaatttttaatttgcattttaatttcaaaatttttgattcagtagacatttttgtcgtatttgtattattaatgtacaattagcaaaacatttacgccaacaatataaaattcatggtttttaattaaaaaaattaattaattaattataattttgctaattaattgccccccccccccaatttccttcagacacttatgtcacaagcgttggaaatggtaaagttgattatgtgtggttactgtttaggtaggcattaggcgagaacaaagaagccgctgctgtcattgtcaaatcgaatttgtccaatcgttccgaagtcgaaaaggcggaaacgaaaataacaaagaatttgaaaaacggattcaaaattcacagtaaattaaaggggtcgtaaaatatgtgttttttgtacaaaaattcgcgatgaattttcttataaatttagttaattaagaaaacatgaaatcattctttggccttgaatgccgtttattagtctagaaaattatgaataaatttcttttttacataaaaaatcgaaattttgtttgggtttacattttttaaaccttagttttttatttttcataattttggtacatttatcgacattgaattaatctactaattatgttgtttctgtggaaaatgttgataaattatggttttcgaagaaggtgtcgaaatttacaaatgtacccgcactaatataaattaattttaaattatatttttaattttgctaaatattgacccattttttagacagttattttacaaaggtcggagatggtcacattgaatttgtgtggttactgttgaaggattcgtcgggcaaaaatgaaagtgccggtgccgtaattttgaagtcttctctttccgagagtgtcgaatatcaaaaaattattttcaaaaaagagactgagcttcaaaagactcaaaatgctttaacggacaatttgataaaaggatacaaaattcacagtaatctttttttaaaaatatattttttatataattattgtattaatttaattaattgttcgcccaactctttcagaaacttttaccaatcgcgtggggaatggcaaaattgactatgtgtgggtaatggtgaaggactaagaatttctttttagaaattttgataaatttatatatttcgcgctttttcttacataaaatccccattcctaaaaatatcattttgatccaattccatataaacttgttaccattagaattacttgaatttgttaaatttagtttaatttaatttgtcgagcgaaccaaaggcacatagtgcttttacatggtgccaaaaagaaaataaacaaataaaactgataaaatttaaaaaacatgaaatgaataccgaaataaaaggaaacccaaaagtttaagacgattttttaaatcattttacttttttttgtcattttttcaaaacaagttccagagttcttgtgaatcgaaaaataaaataagaaatgcgaaacacggaaatgaaagctctaaaaacacgaaagtgcgaaaatacgaaacgcgaaattttttgcaataaatttttcaaccacaaaaaattttcggaatcaatttattttcatctttgccgtattatttttcctaattttttggtggagggtggtcggcggtccgacaggcggcgcaggggaaattttttttgaaaattagagtgcaatttattaacaaattttgtctataaagtgagcaaagtttgcaattttatgtcaattttttaaattttgggttttaggcccgtgggataaattaattttttcaaaaaacttttactctgttaaaatacgaaacgcgaaacatgaaatgatcaacatccctgatatgtttgttatctatttcggtttttggtccccaaaaatcatatccctactctaaaaattggtttcctaatttgatgctgaatctcccatttttttgctgttggaatttttgatttttttgagcattttgccaatgttttccatgtgcttttttgcgctattggcattctgttggattgcatctgtcaaagctttctttttggccctgccatgttttagatggaccaaattttgggagatttctcgcccaatttcttcatattttcgcaatttcgtttcaattttcagctgaaaatcggccaattcaaataacaatttggtcgatttgactccggcattttctaatttcttctcattgatcagcacttccaattctggcaccaaatcatttttcactgcttcaatttgcttagccaatcctttcaaaaataattttgtgggcttaaatacaatttcaacaaattttaaagcaaaaattaagacacaaaaacacttgaaaatttcatttttttcatataaactattcatttcgttacatgaaatttaaatttgttttatttaaaaagtaataaaatttatttacttttttttggctttttttgcagacttttgatcatttctgcaaaatctgggcaatgtttggtccaaattaacatcgcaaatttgttcaaattcggcaaattttgcacaaaattcgcccatttgtccctcaataacattcattttgtccattaattcaatgttctgctccattttgtcttcttttcgtttttctttaatttttgttgtaactttttttggtgattccttaatttttgccattatttttttagataaaatgtctttgttttcgttcgttttgcttgtcgtcgttttgtcctcctttttttgcattgccaatttattaatgccattgcccaattcttttttgagagtgccgatttcttcttcaaacactttcatttggcacaatttttgccatttttcacttgtttttgcaatgaatagtgatgacaaacttttaaataatttttttgaaatttaatttcttaatttttaacttataaaatgtgtggaaactattaaattttgaaatcattaaattaattttattttttatttttacgctcgggttggtccccgagccgatgcggggaaattacaaatgtcgtgattgcaccccaattcgatgagagtgtctttaaatgggctcccgaaaaattgaaaatgttttctattaacctgcaaaattttcaaacgctttgttatgattcaagaaagttatgactaaaaatgtccaaaaaaaaacatggttttttgaatttttgcagaaaaatagaaaacattaaaactatcgaatgacatcaaagttttaaaatttgattcattttgtacgaagttattaataattttctgtcaacaaatttcaatttgatggttttttgtttcaacaataagattttttgttcgcgtttttctcggctttatgaaaagaaattggaatttaacgatttttttttggaattttgcaggataataaaaaactttaaggctatcaagttaaatcaagaatataaaatttgttgcattttaggctaatccattttgatggtttttgagtaacgacccggcaccacaaaatttgaccgggaatttcatctccaatttttctccccaagagtcggggacagcagccctaatttacggctgtacattaattacccttccgttttgtctaaattcaaaaatgtgctggcagcgattcgcctttcatccggcactttgccaatcatttcgttcaaattttttatctcattgtccaaaacgtgtttttcctatccaactttcttgattttggcgtcaatttctgctttttctcccattgatcgctttctcctttgtacttttgacgatttctaatatttaaagtaaattgttcttttgcctttttcagttcgattgtttgcgaaccaattttatgacaaatttgctctaagtgattcaaatcat

SEQ ID NO: 14537 - DNA, 2064 bp, Heterodera glycines
cccccccccccaagttcctccaattttttgggaaaaaaggttgtgtgaaaagtgaaaagaaaaaaaaagtcgtagaaaaattcttgagctttttttcaatttcgtaaattttggcctctggggggggagggggggtatttcgtaaaggcaatttctgacccccccccctctctccatgtatgttccttcgtgtagtttcatactgtttcaaagatgaaattaaattatccgaggcgtgagtgcgttatgtcagtttaattcagcaaatgcaagcccaccacaatttcggtagcgcaaaagttcagtgcatccgcgactccttccgccacgggcggtgcttcaacccattgcagaaatttggccgcattttttgctgtccttcggcccgtccaattgcaaaaagacatccgccgcgcctcggcaaaacgttcgtacacttcggcctccatttgcctcgtccgcaattccattcgtcgcattcgctccattttcgtcgcgttcagcgactgttcgtcgatgtcagccaaaagatagtccatcacatcaatgagacgcactgcaacgatcactttggaagtgctgaatggaaaagcgacaaagtaaaaagataaacggataaatgccactcaaagtccgtccgacccattcgaattcgaagaaaaagccggaacatttattgtaaggtattttgtactttttctaatacctactatatgtcccaatttatttttgtcagcatattaatctatgccattttcccaaatatttttaattttgctactttttcaatttcattaagtcgtccaatgaattttggatgttgagagacgatgaacttgacaacggcagaatgtcttctgaatcatcaattttttgttcttcttcacgaaacatcgctggcataaggtcaaccagctaaacgaaaaaactaagaaacaaaagcaaaaataattaatacccgcatgtatccaatcagttttcggatcagcaacggatggcgcctttcttataaaaaatgaatttaccgaaataccaaaaatggcaaaacctgaatgcgaacataaactcaggaaagccgacagaagggctgctaaaagagttgaatttttggtaaaacataatgagaaaatcaaataaattgtaactgtcgttcaatcgaaagtttatgggccttgtcgaggagcattttcagttgtttgcaaagcaaatcgagcataaattcctggcaaatgttcaaaggctcgtcggaatcgccgtatacaaacatcatccgactaaaaaggcattgcttaggaaaaacaacaaaaagagacgcttttacctgacaatcaaatgcaagggatagtcctcctgctgttctttccattgttgattatgcaaatcgcttgttgaagggattcccatgtccattaaagaaggaaaagaaagcacacaaaaatgcttaaatttattttagtaattttttttaaatttattcacaattaattttgtgccaaaagaaaaaacgacgcaaagaaccaattcgaaaattcattttctgacgaagaatggttccacactatgggtcaagcacactgtgcagagaaaagcctagtactatctcgtcgttttctttttctttgtaatttctctcactttggcgtactatctcttcggttttaatcatgtaaaaaacaacattcacttcgctctatagaacttttttttcgccttacagattttctttaaattttgcatatcgatagagaaaaaaattctgaatcgattaataaggaaatttaatacaaaaataaggctcactcaaaagttatttggtgaaaaattttgcgaatttctttttctctctttttggtgtactattttcatgtctctaacacatgaaaaatagaaattcacaaattataataatcttgattgtaaaggtacaaaaacactatgcatttagaatcaataagaaatgattaattttagcatttttgttagaaacggcggcctaggacttgagttataacgtgataaaaatttgaaactccaacaacttttttctgagatgtcaaattgctt

SEQ ID NO: 14538 - DNA, 1607 bp, Heterodera glycines
  unsure (1)..(1607): unsure at all n locations
agtcccaaaagcattccaaatttntgatttataaaaatacacaactttttttataaacaattggcccatttgtaaaacctccgcttcgttattttagtcataaataaatattgcacatttttatcacatttaaatgtctctgtcagtgttggaccaaattaagcagcattcgaccattgtggccgacactggcgacttccacggtcatacaattgccatttattggaattggacatccagccaaaacaaaacattccctccctttttagcaatcgaagtgttcaaaccgacggatgccaccacaaatccttcattaattctcgccgctgcaaaaattgaaaaatacaaggaattgatcttaaaggcagtaaaatatgcgaaagaaagggcggcggggcaatcgaaggaggcggtgatagaattggcgagcaacaaactttttgtgcttttcggcaaggaaattctgaacattgtgccgggtcgagtgagcacagaagtcgacgcgcggttcgcctccattaaaacgacaaaattacctaattaatcttcccattttaatgggcagactttcctttgacaaagaaggctcaatagccaaagcattgagtctgatcaaactttacgaagaggagggcattgagaaggagcgcattctgatcaaactcagctcaacttgggagggcattgaggcagcgaagttggtgccattggaaattgaaatttttagtttaataattaaaatttaacatttccaagggttctcgaatcccaacacggcattcattgcaacatgactttgctgttcaacttttaccaagccgtcgcttgtgctcaagctaaagtcacgcttatttcgccttttgttggtctgtttgtacataattatgttgttttgataaatggcaaatttaggtcgtattttggattggttcgttaagaattccgacaaaaaagagttcgaccgaattactgaccccggtgtgcaaagtgtgaagcgcattttcaattattacaagaaattcggacacaaaacgcaagtgatggccgcctcatttcggaacacggaggaaataaaaggactggtcggatgcgatcttatgacgataaggtaaaagtggtgaagacgaccctaaaagttttaaaatttttatatttctattttgcctttcacggaattaggcattttcggttttagtgcattttaggagtctaaccatttaaagctttttaatacagtcaattttttttcttctaaatgaaatgctgggtttttatctatctctaattatttattacattcattctttttgcaaaaaacgaatttgattgaaaacaggtctaattaatttatcgtttgtcattgttttcttaagccccgctttgttgggtgaattagccaaagattctgaggcggttggaccgatgatgaccgtggaaaatgcaaagaaatgcgaattggagcagattgaggtggacgagaaaatattccgctggcagatgaacgaagacgcaatggcggacgaaaagctcgcggatggaattcgccgctttgccgtcgatgctattaaactcgaagagttgattcgatcgaacctttgaattaaaaa

SEQ ID NO: 14539 - DNA, 648 bp, Heterodera glycines
ctgccaattataaatgaattaaaattttcatggggaaaattttttgataaaaaggaaactctgagaaataaacgaaaattggctgagatttgagacggtgggaaaagccaaaaaagaaaaggaaaagggtggagaaagacagaaaaaagttatcgaaagaaattaatttaaagtctaaaattcccatgaatgcatccgcccaatttgagtaaattgaattatttccaattatttcgccaataaatcgcattggcactcaaagaatgccgtggacgattcgctccatcgaagcgggctttcagccgacagaaagccgagctttgccagccgcagttcggtttgcctttgcctgctgtgtttgctgtgttcgctcattcagcgctttaccaaaatttttcatttttcaaagtgcgccttaacaaaatttactgcggaggcaataaaaataaaaataaataaatgaaaggcgaagggacaattaaattgaatttgggaagcgaagcgaacgaatgaatgacacggcggacaaaagggggctaatattcgggggggggggggggggagacaacacactgtgccgaacaacaacggcacacagaagtggcacaacggaacctccgccctcgcctaccccggccattatgccac

SEQ ID NO: 14540 - DNA, 1272 bp, Heterodera glycines
taatattgatcatcatttttacctacgcttagcttattatctaattttaaaaaatactacagcagtacgctctaaatggatatagtatgtatgtcaaggatgttaattgtggaggtttcccagaaagtttctgatttatttcaattttatttaaaaacatcctgtcccacatcttgtcggcgaatcgtcgtcggcgaatagtcatgtacccaaatgaacggagcgaaagacggaagggaaattgccaaaactgaaggcaaactcagccatttatttggccatggaattgtcgaaaagtgtaaataaaaatcttaggagagacaaaagaattggaaaattgaaaatggaagcaatagaaaagaaagacattattatttctaattttacttcaaaaaaatatatttgtaaagcaaattaaatgaaaaagcccattggattaatttaagaaataaaaaaataataaaatttgccacgtgaaaagaaacggcgaatcccacagggcaataaattacatcttcaaaagtaattccgaatctgaagaaaagaaaaaggcaaaggcatggaaatggcaaatgcaagaagaaaagaaaactttccaaaagaattcatttaaaaattaaattacgtttgcaaaattataaactatttattgaagaaagaattccgccgtatcgttggcaccgccggaaaaatttcgtaaatatttgaagaaagtgatacaattttcagaaaaagtgtgtgaaaagctgcgatcagtgttttatttaataaaattatttgtttaatttttcatttgtcgcttttcctctcattttgttaggctttctccgccaataaacttgcgatgtgcgccgattcgattgaagcttttctctgctctgaccatgacttttggatgcgattcacctgacaatgttttgtttcgccccattcactcattcgttaattaacttacattttgttaattcatcaattttcaattaatttattattaatatattttgtttacacctgtctaagccgtgcctttttctcgcacatgtaaaaacagaaaagcatcggaataactgtcaaaatgcccagcggaccgaccaaagctgcctaagtgttttaaactgctgaacattaatcatttaattgttttgtttttgtgcctttgtgttgtaaaatctgtacacatcctccacttttaatgtctcacaaaagtcgccgctgtacggctgagggcactgacaccgctgcttaattcgaactcctttttaattggaaatt

SEQ ID NO: 14541 - DNA, 1747 bp, Heterodera glycines
aagaatgaattgaaaaagggcaattcattaattaattattggctaattaattgttttttacatttgtgatttgatttaaatcaattaattcttatttgtaacttaataattaattttaaatattatttgcaaattaagttataatttaatctgaatttgttctttcaatttgaattcaatttaaaaaatgtattattattcttcttattaataattaattatttaaaaaaagttaattactaatttatattaattatcaatttataatttaaataaataataaatattattatatctcatttaaaaaaaaatttataattagagatgggatttttaggtgctaaaaatcccaaaataggtgctaaaaaagtgcaaaataggtgctaaaaacccccaaaaatgtcaaaataggtgcgcaaataggtgttaaaaattgaaaaaatccagtgtttttatattgactaattttttatcaatttcgcccgcacaattgcaattggttaagaaaataaataaataaattttggagacgaatttttgagaaaatttttcatttcttagtggaatattttctgaaatttggtcaatttttaggagtatatttttaaaattttttgtgatcgattcttaggggtgtattttcgtttttattgcatttttgctatgggaaaatgccaaaataggtgctattgaccgaaaatccagttttaggtaattttaggtgctaaaaagtcgctctaaatcgaaaattgttcggagaaaatgctatttttaggcttctctcatcatagctaagccacaaaaaataggtaaaaacctaaaaatcccatctctatttataaggcggtagactaatttgtaagacgaaaattgttaatttgtatccaattaacaagcaaagcatgcccaggaagctacttactgcccaatttccatatataatttggtttcgaaacggaaaatttaattcaaatttatgtcaaacaagaaaacaaaaaaacaatgaatcaaaatattgaatagccgagatccaagaatggatagacgatgtcaccattcagtcaacttcctccattctcgaggcctcctcttcggcaccagcaattttctccgcaattgtcggctcgcccgaagtgctcggctgttgctcggccggctcctcctcgtcggggatgtcaagtccaagtttcaccattcggtaaattcgcgacgcatgctgttgcgggtcctccaatgaaaagccggaggtgagcagagaagtttcgtacagcagcacaacgaggtcctttgcagttttgtcgtcctgctccttctcaacacggtcgcgcaaagacctaaaaacgaaaaactgtcaaaaaattacatcatgatctcaatttcatcttgaatgcgctcacttgatgattgaatggtcagggttaatctccaggttctttttggacgccatgtatcccattgtggaggagtcacgcaatgcctgggccttcatgatccgttccatgttggcagaccatccgtactctccggtcaccatgggaacacggagaagagaccaaacggtttgagacagaaaacttttggactttcttgtaccagatgtcctaaagaataaattaagctcccgaactaaaattaaagacaaagtacttgccttaatgactttgcacagcttctcgaacttgaactttgtccctctcaaatttcttcttctcctccctcctctctgggagatcaagggcctccttgg

SEQ ID NO: 14542 - DNA, 1692 bp, Heterodera glycines
acaatgccggcagcgagcgcagacgcggcgtccaactcggacgcctgctgcaacgccttctcctcctttttgcgcgcattttctaacagttggcgacgctcgcgccattcgctggtgatccgaatctatggacaaattgacaaaattgcatttgaaaaattaaaggggcagaggtttaaagcaaagggaaatgaaaagagacacgcgagggacaaaaaaaatatttaataaaaaaaaattgaaaatgacataaaaatttttaatgacgccgtcagcgaaattttgtacatttcgcaattttttggtaccgcaacttaaagttttcaaatcttagaattagaaattttgtatgtaatttgattataaaaatgtttctatttttactctaagttccaatttttttgtttaaaaataatgtatttacaaagcgtgttgcggacaacgattgccaccaaattggcaggaaaacgggccgacggatggctgcctcgtagagcatcaacagatccctacaaaatgctcatttaaatatagaaaatattatatatttttgtgattttttttgttttttttttactttttttaaaaaatgtaagtgccaattgaaaacatagaaaaacaaaaaattcaaaaaatcggcacacctcaacgagtcaatggtccgaacagcagccaaccgtcgcaggaagttgcccttttcaccgtccaacacccatccgcggtgcatcaatgcgtccgggatgcggtcgacaagccgtcgcaggttcagctgcacacagcgcagcatgtcctccgcggtgccgtggtggtcaaagcggcctttgggcaaatgccactgaaaaaacaaaaaattggcacagaatggcataatgttgtctattaattaaattttgtcgcactaccctcactcatcgtcctatcattttgctcgaaaaatttgaaaaatggaaatttttgaaaattcaaaatcgaaggtttcctgccatgtagtcgacgagttttttcgctttttttttgcttttcaacccattttttgtggagcacttttctttaaaaaaaagaaagaaaatggcccagcggtgcttataggcaccgctgagaaaatttgttgatttaaacgaattaaattttttttcaaaaactcccccctcctccgattaagaagcctctcccccccccccattccgctgaccgttcacctaaaaaaggtatgaacaattttctctataaaaagaatgttaattcaattttaaatttttctgcgtgaccccaaaagggctcaccgaaaattcgccctgctcggtgatggagaagcggctgctcatgtacttgcgcttgtcccgctccattttgcgcgccgcagcgcttcggcacaggtccgggttggcactgtagtggttcacatattgcaaatagacaccgtcggagaagcccagacgaaagccgcggttcagccggcggttgagctcctcgagcaggtcaatctgtgaaaacagctatttcaattcaatttttaaagaaatggatgatttcaattaaaattcttgtaacaaattttatgaaaatttcaatttacttatttatttttttaaatttcctgaaaattaaaaacatagtcatggatttatttacttttttatatcatcatataagaaaacaaaatattatatgcaaatttttagtatttttaat

SEQ ID NO: 14543 - DNA, 1134 bp, Heterodera glycines
atacataaattcggcacaacggacagcgccagttcgggtcgtcctctgccgccacgggagttgctggtgctgttgttacggcaacaccgcctccagcaccacctccgccgttcgatgttgccgtcgtcggatcagaggcggaggacggcaccgtttgtggatttggtggtggtgcttgtggttggggtggcggtgtcggtccgggcaccaagtccgcgtcacagtgcacgtggtagaccgcctcgcactcggcgcatgccaacagtttgccgaagccaccgcccgctttgccacagctgcggcactgctcgtcatgcttaaaaatggacaattaaatttgtattttgaggaattgccaaaggattaaatattaaataaacaaaccacggttttgtgcgttccgcccacaatgcgtttgatcaaatcgaattggaagaagcgttcgcacatccatttcagcacacgtaaccgcttgtccagctccacaaatgggtagttgctgtgctgcaaaatgtgcaacacatcgacggggaaatgggcgtcactttccacgtaatggcgcaacaccttaagggaaaaggagttcgtttgttcatgtttcgttacttttctgcattttggagtacaattaaagtttgcggaagcaaaaagttttttaagtccttaaatcacatttttgagtgcctagacgcctaaaatatgtccaatttagactccatcattatggtttttatcacaaaaaaatagatttaaaaatcacatttagcaaaaaaaagcaattcaaatgtaaaaataacctcggcaaaactcatcgagtccatcagttggatgagaatgttgacggaaacggtggtctctgtggccgcgaaaattgtgtgttcgctgtcctcctcgcgaaaaaacaggcgcagaaaggcgagatggatttcgcagagcaaaagggactgaaatgggcggagaaacggaatttaatttaaattttttaaataaaatgttggcacctgttttggggaacgtattgcggcacaaaagtcttcaaaaaggaagggcgacagttggagaacggacccgtaatttaacagcacttcgtaaacctgcaaagaatcaaagtttttgaaatgttaaaaagtatta

SEQ ID NO: 14544 - DNA, 2358 bp, Heterodera glycines
  unsure (1)..(2358): unsure at all n locations
taaaaagtagacatataaataaaaatgtaccctaatacattataggaatttaagccccctagcccgcattgtttcaaaattataaaattttcaaaaaacttttaagaaaattgcaaacttttaaaatttaaaatttagccgattttttcaaatatatgaattactaataatttcttaaaaagtgccccattcaaaagcgcacacctgtccatgttttggcacaccattccacaaacgaagtgcggaccagcccttcaacagcaacggtggcactctgttcggccagcaacagttcgttggagtcggccacctgggagtaggcgcccgcttgggtaccgaaaatctgaaaccgaaaatttttcctctaaattaggcaccactgacgagcagcgctaggaaaaactgacattttcacagatttcggccaaaagctattttttcaaaaatttttcgctttttcatctaaagcaggcctggatcaacctcgctctatctcttcgaccccttcttgcattctattctctctctctctcttcctttctctctctctctgtctttgtctccctatctctctctttactttattggcctttccaggacgctctctttcttttctctatatctctcgctcgtcactctatccacctcacccattctttttccttgtgtttcatttatctctctattccctcccccttcttccctttggccacacttacgcttcgtttcggcgtgtacaaactctggtggatgaacgggtccagcaacagtcgccgttttgcgttgtccatctccggatgctttttgttcaacgatgtctgttgctgttgttgttgttgtgctgctgatggtgttgaggatgcactgcttgttgtcgttgcctgctgctgttgttgatcatcattttctgcaaacaaatcaataggatttttttaatccccaaaaatctttattttgaaaatatccgaaaaaactaaattttccgagggtagctcgtccccacccccgtcccatgaaacccagtttcttgctaattgtaagcgattggcatagatgtgccggtagagttgcgtttttggcattgaaaaccgggcatttatatttttgaaattatccagattaatattttcactcaaatttgggccaatttcttaacaattaacgtgtcccgacatttgcggtccaacatttgcgtttttgtccaaaatcgggttcaagattaagtttttcaatccctgatcgcctaaacagctttaaaataagcgattgaaagtaattgtatacgattatttgatcttcaaagaattcttgaaaaaataataaaattttcaaacaacagaattaatgatcataatgaaccaaaagactgtgctttcttaattttaatgctaattaggctatcagggcttaaaaaaaattcaactttgagtccgactttggacataggcgcaaatgtcggggctccacaattaaaataggcggatatttgtaacgaatggttttttacgctttttactttgaaatactggcgaaaaattgccattttctaaaaaattttagcctatttttgagtttttacagtcataatgtccccatttgtctgtcaatggcattgtgccgtgtcacaaaccttcttcagctgttgttattgttgtaccagggcactgtggtgtccctattgttatggcggtggctgcggcaccggaagaagtggaggttggcggtgtacgcattggactcggcgcgcaccgccgtgccaacatcatcgccaccgggtcggtggtggcagttgaactgttgccggtgggcggttcctcagctgaaaaacaaaacaaaataggggtgtaaaattgcgcgcgatgttcaagctttaattggatgagaaaagctcccccctcgcccttgaattttttttaatttataaacggaaattttccaaaaaaaaatcctagaaatttgtttttataagaaattttctttatttaatgtcaaataaaaactaccacagaagggcataagccacttacacctcgattaaagacactaattcatcataaattttgaaaaaatttttttttagtttattcttgaaatttcccaaaaaattttataactaagatttttagaaaaatctctaattgtaagtttaggaatgaaaaaaaacttttccagggaaacgaattttcaaataaaaaaacactaatttttcgaaacatttaaggctgggtgggaaggngaaggaacacgcggatagaaatttcctggtcctncgtcttttttttactcaatattcaatactcttaccaatgggcgttggcgggttggatgtgttgctgctactgctccaactcgtctggg

SEQ ID NO: 14545 - DNA, 1823 bp, Heterodera glycines
  unsure (1)..(1823): unsure at all n locations
ccattattaattcggaattccctgaaaaagtgggagagccaaatttgggaaatttttaatttatttttttaaaaatataataatgaaattgggaattttaaaaatatttccaaaaattgggtatcaccattattttaaaaaattggttgggtacctatcatcaattaggaattccgaaaaaagtgggagaaactaaatttggggattttttaatttttaaatatttatattagttttaacattactttcaatggcaaaattttttcttaaattcccattaaactgttaaaaactgattaattattaatgagttacacccccccccccacgtgcgtcgtaaggggggcggctgtaaaggaaggggggtcgtcgtggggtgggtcgtaccgaaggtggaaaaagttaaaacgcatacaaaattcaaaaaaaaaaaaaaaaaaaatttccggcggcgcctatcggcaccgcccccaccccttccacaaaagttttttggaaaaaacgcgccgaaaaaaaagtgatctgaatagcaaaaaaaaggtcgccggggaaaaataggggccgacgtaagaaaaattggtcctggcgcaccccccctgcgccaaacgtccgacgtatgggggtctgattggcgcaccccttgttcatgtatggattagggggaaagttagacctgacttccaaggattttcatttgttagcaggtctaaaaactagatttcttgaaaaaccaatccaaaaaaaccattatgacaatttaggggggattggaaacggcagagattgtcgtttctcggagcgggacaaccaaccccatctagctgtaagcagactttaatttttgaaaaatttttacgcgcttttttcatgtgcccgacttttccaaccaaaataaataaattgtgtttttaaattttaaaaatcaaaattccaaaaaaacgaccttctcgggatgcgagtgggactggtgctgtttttgtacgtcggccggcgatatttgttggctgcccgacgcaccactgttcatcatgatgggtccgttcacagaaattggacgaccacccgtgctatgtttcaattcgagcgcctcaaaatgagaaaaaatatttatatttggatctgctccggtataaaatcggataaattaattgaaaaataaaaaatttgtaaaaaaaataatttaaaatatctctctgtaaaaattaatttttcacgaaatttccttttttaatgaaatttcttttaacaaatttaatttcctaaaaaacatttaaattattgccttatccctggactccttgatttttgaggacagctcgaaaatgtagcggatgatctgctcgcccatcgtcgcaactccgtcaaacgggtccagcccaaggcgcagaacacacagccaaatgcgttcaaacggtccgatgaacgtcttggactcgagcgaccggatgtgggaaagcacgcggaatctgagaaaaatttttttatctaaagaaattccaaattaaatggtaagattaacggcataacgccaatttggcagagaatagcctcaagaaagttgcaatttacataattatgtgccatttttttaattattgtgcgtaaatcactttaagattagctgaagaataatcttattttgtgaaaaattaatatttacataaattctctacataatttgctttaaaataaaaaacagttttccgggttttaaaacggttttcccggttgaaaatctcgtcgaaaagctcagacgtttttcatgtgaaaacctcgtccaaatgatcaacttgatttttctttanaaatctcatgaaaaactc

SEQ ID NO: 14546 - DNA, 1354 bp, Heterodera glycines
  unsure (1)..(1354): unsure at all n locations
gaaaatctcttaaaatgaatgtaaaatctacaaaagttcgccaccggcccctaaaagccttattctctttaaaaaattggctcagaatcccaaaattttggtctttttgggctaaatctgttaacaaattgcattaaaaattataaaatttttcacggcggcacctatcggcactgccgggctcccccccccccccccatttgctgcccaaaatttttttgaaaaaagcgcgccccaaaaaagtgctttgaaaacaaacaaaaaggtcgttgggcaatggtggttttgcggtttctgcgtaaaataaatttaaaaatttaagaagcattttttctaagatagaaaaatgcgctgattaagaatctgagctcggattttgcaaaatcattgatttttgtctatgatttctcatcaatagggacgtgaattttagtgaagaaaaaaaaacttgcacaaatcgccaagcataattttctaactcagctcattgttttcagaagagtttgaaattttgcattaaaatactttggtataaggtctagcaccttgccaaattttagaattttttatgcactcagagatttttaagaaaatccgctttctttccgatgaatttagggttaagaatacgttatcacgattccgagctctgattctgcaaaatcaatgttttttgtctatgatttttcatcaaatataattaaaaataagccgcggccaagcgggctcgaacaccagacccccatctcatatgaccctaatttgtaaggccagttttaaatttcaaaaaatcataaaaaattaaaaacttgagtctccagatattcaatagctcattcgaaggctcttatctgttcatggctcataaaataatttatggccgaacagatctgaacccctttgaaatacttaaaccttctaaacgctttaacattcccttttatagacttaactcgaaatataaattaggcaaaaaatttataccttttgcggggcgggtaactaaaatttggaaccaactcgataaaaaccttattgaaataaactcattaaatcaatttaaaaataaaattaaaactatttcatttctgtaagattgaccggaaaaataaaagtcgaattattaattcattaaacaaaaagtgatttggtcattatttttatttttttttattgacctcacattatattttattttttggcggcgatctcgttttaaattgtttatgcgctttcttgaggatattttaattaatgttttgtcctcaatgtaagcggatttttcccttttgtggactttttctttattgacaaataaataaataaaaataaaaaaaaactaatttccttanaa

SEQ ID NO: 14547 - DNA, 2027 bp, Heterodera glycines
tttataatcaaagttgcacaaattttgaaaaagtcccggtcttggcgggaccccggcccaaaaactgggaccgggagtcacggttcattttccaagtcccggtcccgaccatttcaaaattcggggttctattgattaacagaaaagttgaccatttaaaccaacagtccatgcgaatgtgtctttttttatgcacctcaaaaccaagcctataaaaaccaagcaaaacattaaaaacatataaattatcgtctaattagtgtctaatcggtgccgttgtgtgtctctctctgttatccttcgctgcttttcccttattcgcttttctgtgcgtcgtccgatggcggcacgcgacgacgaagcatacgcaccgtctcaccgaaacagaaccaaagggcgtgcagcatgccgggcacccagaggaagaagctgcagcaaaaatggggaaaaatatcgaaaaagcaatcctattaaatacatgtaatatgtgctaccgatggaccgacacattttctatacaatggcattaaaagttactgaaagatttactattgcaaattttcattttttgtgcctccgtcgacgcttaactttaagaagtcatcatctttttatttttagtcaaatccaataaatttaaaattttcccttttgtgggttgcgattgcttattgttagaaagaaaattgttttttttcaaaaagaccatagcttttgatagataccaaattcatataacttatggctttgctcagatgcagttgacctcctcacccgccccctcaccacagaatgacgttgtacgccgcctgcacagtgaacgcgttgccgtcgcggcgatagcttcggaaaagcacagcgacaggctgaaacaaaacgcatttcgactcaattcaaatgatgccctctccccatttgaccattaccggcatgaggaaacagcaccaaacctaaaaatagaaaaacagagtttttggggaaaatggggaaattcattccgaagatttatttgattttttaaattggtgcgttactttcggtttgaacagaggccaaaacaaaaaaggtggtccatttttcggcttactcaaccgacaaaaaaaaagttcggccgcaaccgccgaatttgccaacattttttgcaaggataaatttgaccgcagtttgtggggttaatttctgatgcgcacgtgtcaaaggttacaatttatagaaatcctagcgcctaaatccacagcgaaatgatggcattttatttgccaacccaaaaaagggggagggagcggaagtgtttgtaaattacgaaaacaccattttattactgaccatcctcccttaaaagtatgaaattgactgaaaaaggtcgtaccatgacagccaggaaggcgggggtggccaagcagaagttgggcgtgccggcagcgaatgccaaacattttgaggcgtgggcgacggcggcaaacaaagagtcgagcgctttgatgccgttgtcctcagcgatgttttcactggttttgctggtttcctccgccattttggatgaacaaaattgaagacgaaaaggcacagtcaatggaaagtcaaaaagaaaggctaaaaaggaagaattagggattttcggattcttggaacaacagatacatccaatgaatgctcaaatcctcaaataccatacataaatcacacacaaaagggaatcttggccgggattacgcaaaatcccgagcgggatcctgttccgaccagggctttattacatagagagtttggcgctatttaaaaagaggtacttttttaaatgtttttgcacttttttttggtcgaattttttaaaatttttttataaataataattagggagtagaatcatatgcacatgcatatttttttcctggactgtgggaggcctgaaacgcatgaaaaacatgtttttagcctggtttgaagcttctaggatgactttccatatgcatatttcgcgatttatgtgcatatttgtgcatattttggcatttcgtgcatatttt

SEQ ID NO: 14548 - DNA, 1086 bp, Heterodera glycines
agaacaattacgtatctagaccagaaaaagagatctttttccaaaattttcacgatcaaatgcgctgagaaaaaaattccagattagtatcggcgtcattatgctgagagtgcggttggaattcccttgactgtagaccagaaaaagagatagccatttttccaaaattttcacgatcaaatgcgctgagaaaaaaattccagaacaattagtatcggcgtcattatgctgagagtgcggttggaattcccttgactgtagaccagaaaaagagatagccatttttccaaaattttcacgatcaaatgcgctgagaaaaaaattccagaacaattagtatcggcgtcattatgctgagagtgcggttggaattcccttgactgtagaccagaaaaagagatagccatttttccaaaattttcacgatcaaatgcgctgagaaaaaaattccagaacaattagtatcggcgtcattatgctgagagtgcggttggaattcccttgactgtagaccagaaaaagagatagccatttttccaaaattttcacgatcaaatgcgctgagaaaaaaattccagaacaattagtatcggcgtcattatgctgagagtgcggttggaattcccttgactgtagaccagaaaaagagatagccatttttccaaaattttcacgatcaaatgcgctgagaaaaaaattccagaacaattagtatcggcgtcattatgctgagagtgcggttggaattcccttgactgtagaccagaaaaagagatagccatttttccaaaattttcacgatcaaatgcgctgagaaaaaaattccagaacaattagtatcggcgtcattatgctgagagtgcggttggaattcccttgactgtagaccagaaaaagagatagccatttttccaaaattttcacgatcaaatgcgctgagaaaaaaattccagaacaattagtatcggcgtcattatgctgagagtgcggttggaattcccttgactgtagaccagaaaaagagatagccatttttccaaaattttcacgatcaaatgcgctgagaaaaaaattccagaacaatta

SEQ ID NO: 14549 - DNA, 331 bp, Heterodera glycines
  unsure (1)..(331): unsure at all n locations
agataatcgaagtgaacagcgacaattcntgaagatagccttctacaaaaaccgacaaaaacgtttgcgagccatgttgatgtagattgaaaatggcgctttggcactgctcgactgtcgcaccattcggcgaaagttgcgctttttcgaggagacatgcatcacgcaatttctggaacagaatgaaatgttgaaaaatatttcccatttttctgctatgccatctctttttctttagcactgatcgtaccgctcgtttcgcggacaatttggctcaagtggatttgtcacttttcagactgagtctttgccacagtgatgctcatccaaa

SEQ ID NO: 14550 - DNA, 1836 bp, Heterodera glycines
tttgagcccgggcaatttaggctaatttttgaaaattcataactcgcttcagggttggacaatgttagtggataaaggttaaaaaataaagaaaaatcaggagaatttatttgttttatttgggttttcgaattaaataggaaaaaaattttccagaaattctggaaattttcaatttttcagaaaaaattcaacactcgattctgaaaaggagttttcataaattaaaaaactaaaaaaccgcaatttttagcattaaaagagatattttattttatatttttatctcctagaaattttttcgaaaaataaaaaattccatttatccccccggggggataaatggagacgggggattattgttcaacctcctcagaaaggggggaataaatggagatcagattctttcgtccatggaaaattaggctgaatctttgttatttagccagcaaattattgtgtatcttgtgatttttttttcatttccggttagcttcttcctaaatgcctatgtttgttcaagcgtttcatggatttcttcgatgatttaatccctctaccttcagtggaacaaatttctaaattaattgacgacgcatctcattacaccaacgaaatgctttattcaatttttgccggttggattggcgcaaatgctgctgttaaggtgtttgaatgatgaagatgaaaacgattaccaacttattttttaaatattcgacaatgcctcattcattttttcatatatttagtcaaaaagtcgcgtggccatcgatcgttcgacaattggcccctttcaatgtgggcctggtctttgcactcgaatggccggcatttcgggcggaattgctgtcgcaatgaatgcgtacggcgcacactttggtgaattcaaaattaaaaaaaaacgctaaaaagaactttttgcgttttcagagagatggattaattctaatttgtgtttttttagttctcgccaatgccgacattaatgatgaacgaaaaagagccatgacttatgcgatcaaccatcacttcatcaactgcattggaatggcgttggccggcgtcggtgcccattatccgacgctgacctcgaggtctttacaaaaatctcattaacgatttttaagccgatcatttctattactaggtcgtatcataaaaaagggcccttatccaaaatgacttccattaagaccatattatctcttaaaaaaaaataatccgcagccaagcggattcgaaccccagaccctcgtctcatgacccctaagggccagtaattaaatttcaaaaaatcatataaaactttaaatttgtcttcttcataaatttaatagttcattcgaaagctctttttgagctctacaatatctgtgtatgagttttaacgcccgatttattttattaaaatttttgaaaaaaaatcaagtacttgatgaaaaacatagataaagtcaatgattttgcaaatctgagctcacattcgtaatcagcacattttttcaccctagaaaaaaccaataaaatttttgaattcatttttcgtcgggaccgccatttctaagggattaccggtctcctttggtttgtatcccccttttgggtcaaattttttcaaaaattttaaattattattttattgtcgcaattgctttttagattaatggaaaagcttaaagattttactcttgatgatttattcaaagttttggctctacaagacaaagaattcgaagaatggctcagagaacttaagcttctctacacaccactcgtttttgtgactgtggcaacgaaatgagctacaaatgaattaaagaccggaatcaaccg

SEQ ID NO: 14551 - DNA, 2936 bp, Heterodera glycines
  unsure (1)..(2936): unsure at all n locations
cccccnccccccactccttcacatcctttctgatccgtttctcaccattgatccgatcaatccttcgccttttaaatattttctcttccaaaccacacagacaattcttccttcgcctacgaataattaactttattttaattgcttttaagttaatttaacgcatctttccttccgaacgcattttggaattctctcgtggatttgactcacttcgctttcgtcctttcccttccaattttgtccgctgccatttgtttaatcagcctaatgtggcctttcacttccattttttaaccgtttcagcaaaagcatttgaaaacaaatttgacatttccatccttcgaattccaatcgatggttttcaattgcgttcgtccaaataatttcatttcttttcattatgaaaggtgtccgttctttcgttcgtctttaattgaaatcaaaacgggttgaacacattaccattaattgcttctcttcttttgtttcgtgtttaggcggattttgggctctcttctgcgtgtccaattcttttatttttggctccaatttgtccgccgtttcttctctttgcccgggcgtccgccccccgcccccccccccgcccaagaaaaagtcggtgaaaaaattggatattgtcaagcggaaagaaactgaaaggagtttcctccgagagaaatgagcaattttccccacgggatttcttctttccatgtgccacccaatgtttgtctcggccccttacattctcttccgtccgttcttacttttagccctgttttcgggaatctgtccctaatattttgtctgttctttatcgttttatttcgtacgtttgttttaagtttaattatcattttatcataattgtaatttccgttttctctgatgaattatttcgctttcagctgatttttgccggtgaatataccaaagcgatgaacaaagactggcacggtgaccacttctgttgttggcaatgcgacagccaactgacaggccaacggtacattctgcgagacgaccacccgtactgtatcaaatgctacgaagagatattcgccaatgtgtgcgacgagtgccaaaaacacattggcatcgattccaaagtgaatctgctcacactttgtttagggggtccagcggttggtctttcctttcgtgtgacacccccacccccgagagtttttattatttattacagtcatcaaaaaatgagaaaagtcacgatgacattattttgctcttttgcagaaaaatccttttatgggttttaggcaaaaagggaattttaaaaaggagaggcccgacaaacgcctgcgtgtaaatattaacaattttacaaaccccacactatactttaaaaaaattgtttttttttttaatttttcgaaagatacggagaccggtaaccccaaaacacagccgccgaaaaaaaagttttctttaaaaattctatgagaaaaaaatttttcaagaaattttcggcgatttttttttgaaaattttttcttatagaattttcaaagaaaaatttttctaagatttttttcttgaaaaattctgtttgaaatttttttttaatttattcccggctgtgtttcggcggctgtgttttgtcctgttccatacggagacggacgttccctaaccacattttaaatagattattttctcaaatatttagaggagcggaggggggggggagggatatgtacctcatttgccaactcaaaaatgcagttatttgtaaaaaccaaagttttaacattctaaggatctgtcctacaaagacaaacattggcacgaagactgtttcctctgctcaatgtgcaaagtttcacttgtggacaaaccatttggcagcaaaaatgagcggatcttttgctcaaattgttatgaccaagcatttgccacgcgatgcgacggatgcggggaaatattcaaagcaggtgacaactgatgaaatggccggaagatattcccaatgttttgataaaactgacaatgagaaagaagccccttttccacagggatgaagaaaatggagtacaaagggaagcaatggcacgacaaatgcttctgttgtgcccactgcaaaacgcccattggcacacggagtttcatccccaaaaacgaggaggtgtactgtgccccctgttatgaggagaaatttgccactcgctgttgcaaatgtaaaaaggtgcctttttgtgtggcctttgggcggggggaaggggaaaggcacttgtgaaacatcaattaattatataaaatccaccaaattaatgtctcgttacaaatcgttactttatcttgccaacaattccttgtctctctctccaagaattaacccgtaaaatgaatgaatgaccaatgattgcgtggcgttccaatggctgtgcctttaaggtgataagcaccggcggagtcacttacaaaaatgagccgtggcatcgtgagtgcttttgctgtaccaattgcaacacctccttggccggccagcggtttacttccaaagaggagaagccgtactgtgcggattgctacggcgaattgttcgccaagcgatgttccgcctgtgtaaagcccatcaccggtaaatgaatgggatgattcgccttagttgacaattttctgttctctccaggaattggtggagcaaaattcatctcatttgaagaccgacattggcataatgactggtgaatttagaatttttttggttttaaaatcggtcagcttatggtgtttgaagaaatcattgcttttagcttcgtatgcagccaatgcaccgccagtttggtgggcaaaggattcatcacagatggggcggacattctttgtgcggaatgtgcaaaagcaaggcttatggcggcgagcagctgaatatccatctccggagacacttttattttgccccacccccatca

SEQ ID NO: 14552 - DNA, 4298 bp, Heterodera glycines
  unsure (1)..(4298): unsure at all n locations
tgagcagagaacagcagctaaatgcaacggccgcgcttaacccaaaggaagccgcacttaagctggtagcgaaacgaaagccgtttttcgttggggggacccattggcatctgtccagttccccgacactttgttgtatccgaatataggggggatgtgtttgtgtagtgtaggggtggcgcaattctttggggcctgtgggcacgtgggactatgccgacaatgcttgcttattcatttaaaaatttcacccagccctgataaatgtccctactgtagagtgagcaccacattttacatgcagcactaaaacaactttcattggctgtgtacgtgtggtgctgctcaccctacagtatcccccctccccctctacaaaaaaatttttcactccattgtattaatatttgcgcgttatattcacaattgtttattgatgagagaaaaaaataagcaaaattaaatttgatcgagtaaatgtgcaacaacaaaacaaaaacaaatgagaatcaattttttggtggtggtggagggtacgggcaaaaaggcatgaaagggaccatcggcatcatcatcatcatacacgggaatggtgccatttgagggaaattgttgttgttgtagttgaacgggggcgctgtcattggacccgggaatgtgaatggctgctgcgcgctgtttcctcctcctcctccattggctctccactgagcgtactgacgatatccggcacgacgtttcgccgctccacaacgattatgaaaaaaaaatggaaattagccaagtttaagccaaatttagcccctaaaacctgaacttgtgagcccccaaaaccagggcccaccctgtgggtgagcccctaaaaccagggtccaccctgtgggtgagcccccaaaacaagggcccaccctgtgggtgagaccctaaatccaggtctctgaaccactaaaaccagggcccacccaatgggtgagcccagcacaccgggcccacagcaaatgcgtgagccctgtaatcggtgcccacgcaatgggtgagcccaaaacaaaaacaaacaaaataagcgaaacaaacactcacccgctttcgtctcggctctccattttcctcaccgccgtcggacaaatccaccaccacctcagttgtcggtgcttcctgaaacaaaaaaaaaatgaattttgaaaaaaaaaattttaaatattcaacagtacctcattacgactttgttcggcatcggtgggtgctcgtcgtttgtcaccggtgttcgtcgccgccgccgcctttagggattggggtaaaatttagaaattaattcataaaaatctacccccccacatttttttttgcactggtccggtggcgcgctgctttgccaccggctttgaaaattttcaaatttccctcccctcctaataacagaccgttttgcctccaccggtcgatttcgtcgtcgtcactgccggtgcactgaccaccacaattccagcgctccctccgtcgggctctgccaccaacacatgaaaaatttaaatttaataaaaaatgtttttttttcattaaattttcttacttgcccattttccgcattgggcgctgtttcgccgcctccaatttcattgctccctccatcggtcactgcctccaaaacatcaacgtccggcacatgaaaatggaaaaaaagtgattatttaatggggaaaaatttagaaaatttttcttacttgtccattggccgctgtctcgccgccgccaatttcatcaacatccggcacatgaaaatagaaaaaagaattattaaatggggaaaaaaatttgaaaaaatttttacttgctggccatttgtcgttgtgcccccaatttcattgtcccagcaacgcgcgctcaacacatgaaaatttatttgaatttaattattaaatttaaaaagaaattcataccccccgttcaataccagatggagtaacatactaaacaaaatttatttttatttattttttttgaaaaacaggtaaaaaattttacatttttcataaggtcagtggccacatttgccgctgccgtctgaggtgggatggtgccccacccgaccttttagcaaattgacgtttcatttttaataaaaaattggaaaacaaatctaaaattacaataaatatttgcttaaattgttttggggagttgggtgtttggcgtcgctaaagtgaatgaatgaatgccattcattcgtcccccccctgccctcttcggtccaatgacctttcccagttagagagcgtatgggcaaaagaagcagagaaaacgacgccttattggcgtggtcatctccaccgaaaaatgaccccccccccattcgcttatccgcaccccaattttctctgtctgtctaacacttcacaatttgctctctctctatccgctctttctcccttgccccacaatctgtctctttctctcttcctcccttgccccacaatctctctctcctctatctctctctctctcttgcgcccttcccaccctcttccccctctcctccatctctcactcttttcttttctctgccccacagcactgtctgcgccccgcgccgccaccaaatgatcattaatcaccgccatcgctgaccaaaagtttttttgccaaaaagttttacatcacctcttcacatccccccgtaggcactgtctcgtgcggtaaacccccgcgcggcgcggcggcacatcaaaggctaaacggtcattaatcattttcacgcctgacgacgataggcgtggggtaactactcccgtatattttttaattaattttatgaattgaacttttattttcctaacgagttgaaatgggtggaaatgaatgtttcttttcagaaccaacagcagcactagaacagaaaagactggctgatggactgctgcacaacaaaatttagctctaatctatccaaattatctcactttatcgcattccatggaaaaggattataataaatcactttatctgccgatgttttcccaaatcataaaaggacaaaaattttaaaaagaacaaagccaatttgagacagacagatatgaccagtgtacaggaatgaacaagcattcaaattatttattttatttttatttttgataaaattgcattttatacatttttcattaaaatattatagaaaaataaagcttacagttttttaatttttggcatgcataaatatttagttttatctatagtttttgtaaattttttcctgagatcccaggcctaaaacgcacgaaaaacaagtttttggggagggttgttaagctacttttcgagttcttagcaccattttctaggttttttatttagcctaaaaacttttgaaaaagcctatttttcctattttggcgttttgcccaaaatttattaacaaaaaactccgaagatttattttcaaaaacaccccaagaaattaaaaattttttcaaaaattcatctccaatttttttttgacaagcttttttgtttttaaaaattatgtatctcgatactgttttggctttattttgttgcttttttgaataaaaatttgtcatttttcacccataaatttaaggcttctattgaatgataccatgaaatattaattgattgaatttgagttaagctatgcatttatgtgtgttacacattttttttgttaactttgttacattttggggtttttagaacctaaaaactaacaatttaacgaacgaatccgaaagaattattttgcggaacgcactttgaaccgagttatgggcccgggactgaagtggccaaatggcttcaggactgaaccgtccagtgaattaaaacgcatgaatcaccaaaaatatagaaattaattaggtggccgaacgtttcttcactaaacttttcgtcactgaacctttcgtcactgaaacaaaataaagaatttaaaaggaaaaaaattaaattttttaaaatatacctatataagaggggtgtgacttgtctcagaaaagacgagagcgagtttggcgagaggagagagtccccaaaaacacgagagttggcgaaaggcgagaggacgagaggcgagagttttcaatttttttctgtagccttattttttaatttaaaaaacttcaaaatcgtatattaaattagggttacgggcccgggtatttgngcaataccgggtcagggtatttgccggtccagaaaagccgggtcagggccctagcttttaaacccgagtcaggtcctgaaaaatcccaaaaaatctaaaattttttcatgagaataaa

SEQ ID NO: 14553 - DNA, 3381 bp, Heterodera glycines
ccgtaaatttaaatcgaattttttaaatttttctatgtcgtcctagttgccaaatgtcctgaacaccccccccccgtttcggaacagttaaaaaactaaaataaatttcctgtcaaataaaataataataattaaacaatttttccattgatttttttgtaaataattttaaaaaatagcatagcaaataacactaaagaaaaaatgtttttgcatttttcagtgaatgctgctgaagcaaatgaactgcttgaagatgacgatgatagggctgcaacttcatcttctgcgccatcactaccaaaggcaacagcaacaacaacatcattagtgaagccatatacaacatcggacccatttggcagccgcagaccaccaatttcatcaaccataaagtcattgttggcaaaatttgagccgtcagcagcaaagccaaccgacccatcattcgccagtgccaaaccaaatggacttggaacgaaggtaaatttttttgagagatatttttaatatgaaattcaaaaaatgaaaatgtttttcaaaattttatgataaatttctaagtttgtttttttattttttttcgggttatacgccctgttccctgcttcttttttcggcatccaaaatgaaggaaatcagggaaacttttttcaaattttctccccaaagttcactgttttttctcaatgccatcattgttgaaggcttccataaaaccggacccatcattcgtcggtgatgcttccgccgtgccattctcatcctcggccgtatcaccgacaattagcggtgccaccaccaccggcacggattcctccgccacggccgttggtgttgaacaacaaccagtgcatgctgacgatggtgatggacggcttggtgatgaagaggttgatgaagttgcagaggaggtccggcttgagttggagcaggacgcgctggtggtgttcacggacatttgttgctgggacttgcacatgcgcttcttcctggacaaggagggcaaattcaccagccgcaagtgctgcaaccgatcggagtgagtttgagttgttgtttattgtacatttggttttttattggtaacgaaaaaataataaatgcataggtaataatcaacagaatttgaaaaactatgactaattaaaaattgccgtcgatttttttaaatttcaaacttagaaattttttaaagaaaataaattgaggaatttttctacctttttcgaaattttttttcatgttttctttaaaaaaattttctaagatttgaaaattaacaaaaaaaaaaaaaattcagcggctagattttaccccgtccccataaatttgatcatcggcagcggcacgggggtgaaatggacagagaaattttttggaaatttgatagtaattttggcaaaaaattttcatcataaaattttgaaaaaacgctgtaaaagtgaaaattggctacataattataagatttttttcgaaaaattagcaaatttcatgctttaatccgaagcaaatatttggctaaaattcacccccccccccctttttttcttagtttgccgtccaattatgccaatgcgccgccggagccgggcagttgggcacacattttgtacacggaggacagtccgcggagcgttcggcacattgtaattcgtcaaattcgcccgctgtgccccgacagcactccgccgagcgcgctgggcgccacgctgcggtttgccatgcaaacggtgtgcccggataatacgcgtgtgtgggacgcctttttgacgctgcccgtccgggcgtgcagcgtgcaacaactgttggacaaggtggagggcagcagagagacggcgccgcaagcgatggcgattggacgtgggggcgacgctggcagccattcgggaattggtgcggaacaacaacaacagcagcaggtgttacattgttgcttggcagtttaatgagggctgttgagcccgaaaatttggaaaaaaataatgaaaatttcaacaacaaaaaaactgatggaaaacgccgcgggcgacgaaacgacttgggtgggaggggtgaaatgggggtgcactacgtttcccactcccccttccggttcagttccctgtatcaattccctccctctctcatagcgtccctccccccccccctcgaaaaatttttaaaaaatttcaaatttgtattttctttttaaaccctaaatttttataaaaatttttcaagcacttttgaataaaaaatttttagagacttagtaattcattataaaagttagataatcaaagaaaaaaaaattattgcggcaaacaatattgggagggggaatgaactgcttcagtgaaatggacccatttcaatattaaaaaaattagtcctttcgatggcggccaatttttccgcttttatctcccaacaatttcagcgagttcaacgcggcgatgaacaggttgaacaagttgtgcagcaacaaaaaacgcctgttgttgttgtcgattcgcgcgtgtcgccggtgcagcggaaaccaagccgtacggtgtttaatgagtccaacgaaattgtggacaatgagcagcagcagccatacccgtggcaacaacgacggcaaaacgccaacagcagcagcagttgcagcgacgtgcgcgactcggtctcattgtcagccggtgacaacgaggccgacgacgattttggcgaggatgacgttgatcacacggtcgaggtgtgcggggcgatgttatggatgggaccgagcggatattattggcattttatgttgtgtgccaatcattgggttcggaatggcacctcgaccgttggacaactttaatttttatatgaaaattaataaaacatacaacagggacagtcccagggtttcgactttgagaagatcccgatttactcttatgacgcaaaattaaatttactaacttaaaaatttttcaagaaaaaaaatataagaaaattcaaacgaaaattttcgaaaaattgcaatttttttatttctcgggggggggggggggtaaacggcagaggtaaattatatttttttacatatattatattttgtgctgctcttttttcacggggccgtaatttactaataaatgtttaatcaataacaatttttcatttgtattagaatgccggggctgcggctaccgatgaacaacaacaaccacctgctgctgccgacgacgacgccaaggaggacgacggctggggcaaaatgagtccaacccaatgggagaacgtggactacgaccgcccgtacattccgcccgttttgtcgtcgcccaacgcgtcggtcacggaatggcaaggaggacgggacgggaaaactgtacatttatgtattggaaaatatgtgtccccccc

SEQ ID NO: 14554 - DNA, 2810 bp, Heterodera glycines
catttaataataaataaaccatcataaattcaatttatttctgcccacagattactgccgaaattgaccaaaatgatggaccacttgttgaagagaagaaaaataaaaaaaacgatgaaaaggaagaaaaaagaagagaaacaaaggatgaggaagtaagtgagaagagcagcgacagagaggaggaagaacaggaagaggggggcggagaggacgaactcttttcagaggatgaacgaattgacgaagttggggaagatcaagacgtcgcagagggagggacaaaggcgacactcaaagggacgggaaatgacaacggcactctaatgcgagaccaaagtgatgatgatgaggaggaggaagagggcgaaattgtggaggaaggggcggaggatgccaatgagtggtgagtgataaatagaatagtacaaaatggacgattatattgaaacaccagtcataggtccattagaataacaaaaaatgaaattaagcaacggtaaaatcgcaaaacgccgagtggatgaagagcacgatgacgaagaaattgatggcgcgagtgacgaacaggaagaggatgaaatggaagacaatgttgatgaaaaggaggagggagaagagagcgggtttctatttcttttatacatgcaaatttaaataataaaaggcattttccatttgcagttacgaggaagacattgaggacccaaaagtggtgcagcaaaaacgcgggaaattgccaaagtcagccgtggacgacaaattcttcaatttggctgaaatgaatgcatttttggactccgaagacaaaaaagaggaggataaaatgcgacagcgaagtgtcagaaatttgggacaaatcgaaaacgctgaagaggttggtgatagtggtttaatgaatttgttgatttgccctgcatggattaattcatatctctgcagttgttcaaatttccagcgtctttaatccaagtatttagttggagcaactaatcagtgcacatgagcagtccaacttgcagccgcgtgagtgggcgctgtcaggtgaagcaaaggcggaagaacggccgaaggacgcgctgttggagcagtatgtggacgcggactaccgaatggccgcaccaccgacaattgacgcagaaaagatggcacagcttgagggaatcatcaccaaacggatcaaagacggggtaaaaagggacattttagcagagtaatttcttgcccaaaatcaaaaaattgtttcagtttttttttctttcaaaaatacgtctctttcaaaagtgaatgcgtcttttttaccttttcagttgtttgacgacgtcgttcgcaaagtgcgcgtcaacgaatcgcttcagcccgcagcgccctatcgaaacgctactgttaatggcacaacggagcaaaaagtgcgcaagtcattggcggaggtgtacggcgacaaattatctgctgggctaaacgacgaacacgaacttggaggagaggggaaaaaggcaaacgtttaaattttcaaaaacgctttgatgaatgaaaaatttgaaaaaattgcacacgttaattaatcatattaaaagttatcatttctttaggaagaggaacagtccaaattggacccggcggttgaagagatcaaaagcgacttggacactctttttctgaagttggacgcgctcagtcattttcaatttcgaccccagccaatccaagaggaagtgaaaattgtcaataacatgccgagcttgcacttggaggtccctttttcattttttaaagagcaactttatgggcctgagaagggtagcgaaatcgggagtaccttttcaacaagcagcatttgatccttccgattagtgtttatctgaagaaattgggtatacttttcccggcatgaaccaataactcttcagcttacaattagtgcaagtcatttaaaatcctattaaaggaagttggaccccaagcagcggttggaccagaggtgaatttgttggcaccggaggaagtgaagcgacgcgtgaaaagtgcgccgaaagggacagatgaacgaacggagacggaccgaaagcggcagagacggcagaagaagaagaagcaacggtgagtgaatttggaggaacgtttgtgcaaggaaagtcattcggaacgtgtccagacatttgcacttgtctaaaatcgggttcaaatctgagtttttcaattcctaatgtgcaaatgtctggggtgaaaaagcccgaggcgcaaatgtggggtaaccattcggaaaagccttcaaacgcaatagaataagaaatgtttaaaaacttaaaagtgaaagtttccaaatcatttttgccttttcttacaaggcaaccgcaatacaatacagccgttccttaatgctttttttagcattttggcctccatcggcgcaatgaatggtgaagggaccgacggcggagaaacggcggaacgggtgaaaacgaagaaaaaagttcgacgggtgaaaatggattttgctgagcaaattaacaaattggtacaaaatgaaggcgaacaacagttgaagaaaaagaagaagcgaaaaatagtggaggaaaacggcgaggaaaagaagtcgaaaaagatgaagaagaagaagagcaaagttggaggagaaaaggaatgaaagagagagaaggacggacaaaggaaagaccagcggatttgcccattgtctcgttgtttcttgttgatcttattttttgagtttattcttaatttttgtttgacctgttcattgatctgatgtttatttttacaattttataaaaataaaaaattacattggt

SEQ ID NO: 14555 - DNA, 1060 bp, Heterodera glycines
ccaaagtgaattaaaaaagtcaaaacaaacctcaaaagaataattcaaggaaaaaatggaaacaataaataaaagcaaagcaaagtcaacgaaaaaacaaacttctagaaaaatacagaaaaattttcgcaattatttttaaaaattttttattcatttaaagaaaagcaaagaaaagaaaaatctgccaagtgaattaagaaaagtcaaacaaacctcaaaaaaatgcaataaaaagaaaagccaagcaaatgtcaacgaaaaaacacaaaattatggaaaaaatacagaaaaatttacgtaaattcataaaatttttttaatcatttaaagctaagtaaagaaaagaaaaacagtaatggaaaaataaaatgaaaagaaaaaatgtgtgtgaaagtcaaagaaaagaataattaagaaaagttaaataaacctcaaggaaaaacacaaaaatgcaaataataaagaaaaggcaagcgaatgccaaggaaaaaacaaaaatagagaaatggaaaaccaagagtacaaaatcatcccgatttgaaaattaaggaaaattaaaaacaacaagtaaaaaaagtctgtatggcgtatgctttttttctttttgatcatttaatcgtgctttttttttgcgcaggccaagcagttctgtgttgagtgcgagcatccggttgaccggcgcacgcatccgctgggctgccgcgctgtgtgtggcctgtgcatgcgctacgatgagctgcgcttcccatgccggcgccaggacggcgacggcagcagtggcacgttctgccaacagtgccgcttcgtgttcccgaacgcggactgctttgaggcgcaccgccggcgcgtggatgttccgccggcaccgcctccggacgtcgccgccgccgctgctgtgcctcactgtggtgaggaagcaacgggtggagacggtgacgacgcggtttctttagctgttgctgttggagctgccgttgcaccagcgtttgcggaccgccgtcgcgggcggtcccaccgttcaatgtgtgaggagcggcgcctgtgtgagtggtgcaat

SEQ ID NO: 14556 - DNA, 2293 bp, Heterodera glycines
  unsure (1)..(2293): unsure at all n locations
tgcggcttgcttacgcagacgaggcagaggcggtacacggcgctggcgacgaggcgggcgcaatggatgcagtcanncagcagcagcagcagctgcccgaactgttgaagcacgtgccggtgttggtgtgcgccgaggtgatctgcgagcgctgcatcgcctacggggtggacattgagcgtgagccgttgcgccgcgcgccccagtgccagtgcggtgtcccgtggcgtggtgcgaaccggcgccggtggtgctctcgcatcggcgaggaacagtttgacgacgacacctgtggaccagcgacagcacaacaacaacaacaacaaatgccgccggatggattgaacccgcggcggctgcgcttcttctgcgacggcgagccgggcaccggacgtggcgcaatggcccaatttgtggactttttgctccacaccggccccaaagggacgcgcaccgtgatgttggcgcacaacggggtaagagcagcgagggggtgggggtggcaaccgattagtagtgaaaaaataacattttttcagggtcgttatgacgttcacctgttgctggaggagttgcagcggcggggcgagcggccgaagaaggcggtccagcacgggctgcgcgtctacatgctggagctgcgcgggactcaccagcgccagctgatctgcaaagactcgctgaacttcttccacgcagcgctcgccaccctgccacgcacctttgggctgcacggggtgctggacaagccgttttcccataccatcacattcgggagcagaatctggatgttgaactgccggccggcactctaccaccaccagcggcctacgacccggaccggatgcgtgccgcgcagcgtgacgacttcatggcctggtacgagcgcgagctgcaccggcccggacggcaaccgtttgtgctccgccgtgagctgttgcgctactgctggaacggttagttgttgttgttgtcgctgtcggggagtgctgaagtggtggaaaaaaatgccgagcatacagatgtccgtatcctgcgtgccgcctgccttcgcttccgggagttggtgggcgagtgtgcggacggcatggagcccttcctggccgccacgaccattgccagcctgtccatggcggtgttccgccaacaccatctgcgcccgcacacaatggtccacacgccggagggcggcttcctgcgcgggcgtcgcgcgtcggccgagtcgcgccgcttcttcgccctgctcgccgccatgcgtcctgacttgggcccgttgcgcaccgcccgctggtcagtcggagagatggtgatggacaacagcagctagggcggcgacgacgatggtttccgcctcgactgtgtggcctacagacggccaccgttgcgtcccctctgcatcgagttcaacggctgctacatgcacggtgagtgttgatgatggtgttgttgttgttgtcaattgcggcaattttttcccaattacgccattgtcttcaggctgtcgtgaatgctatccggagcgtcagatggtgttggccggtgggcggagcgcggagttgttgtgggctcgcacccaacagcgggcatgggagctcgccgagctgcacgggatgcaggtgcaatcggtgtgggagtgccagtttcggcgcatgctgtgcaaaagcccgcggatgcgcaagctgtacaaggagcgctgtgtggacgtgccggtgccgctggatttgcgcaagcacgccctgtttggtggccgcgtggagcccttctggctgctgtacagttgcgcgccagacgaggaaattgtgtacattgacattgtgagttttttatttattttttcttcaaaaatgttcatttttgttttgtcaaggtgtctttgtacccattctgcatgaagacgcggccgtttcccatcggcacggcacgtgtgtggaccggtgagcagctgtggcagcagcagccgcaaacggctggaggccagcccgacactgattgtggtttgtataatttataattttataaccatgactaatttctgccccaattttctacagctggcccaccaccaccggctctccaaccacccgcactgccatggtgccggccggaggacaacctcttccgcggcttcctcttctgccgtgtgctgccacccagtgcggacgagctgggcgaccgcgagccgcttctgccctatcgcacccaggcagacggacgactcaccttcggcctgtgcgcacgttgcgctgagctccgacagcagcgcacctgtcgtcacacggagcgtgagcgcgcg

SEQ ID NO: 14557 - DNA, 4894 bp, Heterodera glycines
aggcaattttgtttcgttatttttaagaggggaattttcgcgtttttagttttaaaaaagagccaatatatcgaaatcgttgtttagggtctaaaccacttaaaaatttattttcacgattgtaagggtatttctttatttcatattcaagttttttagaggtttctataaatttttctctagttttttcttttttaatgtctttccaaagttgccgtcgataaatcataatttttttaatatggtctgggaaattatgtttagaatttgatcctgttaatggaacatatttcgatattaaaaaatgcaaaaatgctgcgaatttgttataaatttggtcaatttctatacagtccgaaaaaaaggtaacccaatcagtagaagagagcatggcatttatttccaagtaactagcttttttaaagttagtgtttaaattttttacaaggaaaaacatttagtcttaaatcaaattttatagtgttgtgatcactaagtgagaatggggggccaattgaaatgtcttttatgagaaatttattatttgttaaaattaaatccacaaaattgcattccctggtgggttatttaatcatttgatcaagtcgtaaaccttcaacaaaaccaaggaaattactttcataatttgttaaattatttaggatagagaaagggccattttggttccagtgaatattagtaaaattaaaatctccaagaatgacaaaattttctgtcgagactgctagtgaggaaattaattctagaagttgcataaaattttcgaatgtttcggtagttacaggcctataaaccaaaataagacggatttttgattcggaaatgggcgaaaaaacatcaatacaaagtatatcagaattttgtatattttgagtttttataatttcaaacggtatttcattagaaatgacaaacgctacccctcctccttttttattctttctatcttttcttattaaagagaaaggaaaattttctaaaatttgcgagtcgtttattttattattcaaccaactttcggttatcgcgataattttatacctattttctaaaagtaaaagcttaaactcattcattttgttcactaaacttcttgagttaaaataaagacaattgagaaaattttgtgacctcaaaagttttttcccatgttgcctccacgccgcgtcgtcaccatttcattctttttgctttcttcataattcatccgcctctgttcacgaatctcccgctcagccgccaattcttctttcgtcagagagggcctgacgagaagtcgctgccaaccaacatgctgcttcagttccgtccggttgcgcccccattgtgccaatgcaaaacgttggaacgtcgtcgctggcaagacaactttgcccatttcgcttctcatcaatccgccgccccattctatacaccatctgcgggcaaacctccacatccaaagcgtccaacacttccgcaactgtttccgcgtcctctttggcgcgttctgacggcttttcagccacagcctccggcaggccaatcaaaacgaggcttcgtttgcgttctttttcctccgcactggaattgtcgttattgttgctgttgattttgcgctcaatttcgttgaggcgttcagcaatggcgttgaattgttctgccatttgcgttgccaaagtgttgttgttgttgtttgataataacgtttcaattgaagacagtcgaagtaaaatagttttaatatcggttgccattataatctttattggacaattccttgtctatctttttttctctaattttttgtctccttttggcgtactatctaatatttctattattaggaataacaacattcacttcgctctatagaacttctaatgcatccaattgtgacattacaattcgaaagggcatggaggacgaggaaaaaattggagcaaaagcgaaactatttatgcaaatcaaggacaataaggacaaatttgtggaatttccgatgccggaccatccgttgccaaacaaaatccgatttatggaccttatgattatgtaatttggacaatttgcgtcgtcacatttcaccgacacttcttactgatcttgatcaattgaattcaatcaactccggttatctgtgccccgatggaattgctgacgatgggccaaatgcaactgctggccaagctttggccaaatggctgcacactccgacaaaaaatggccaaccgaagcgattgtatcgcatcgctattatgcatccaaaaagtcttttcgacctctttatatacctaccaaaataaaagtgagagatttgaaaacggatgaacggatgggggggagattaaaatgatttgttggccaaaataatggccataacgcattaatttatgcgtatataaagagagagtaatggggaagggtgttttgctgattttgttcaatacatacataatttacacggcttccttatttttgtaaatgcatatatttttttcctggattctccgtatcctaattcaaaattgattgagctgataccgtccgtatatctctaattatccccccggatgattattgttcaacctccttagatagggaggggggggggggctaattagagataataggtaaagtgaattagagtgaaaaaacaatatttttacaaatctccgtctgttttattctgtttcaaaattgttttttgttctttttgctttatcatttttcctaattgtctctgttttaagttaacaacagattttttgccttttgtgacaaaaaaaaaaacaatcgaaaaagggaaaagtgtgctaattgagccaccaaaatgaatcgacggtaaggaaatttttgaaaaattaaaatttttgtctacccaatttttttccttgtttcagttggatttgtggcgacgtttggatggacattctgccatcttttgaccgtccccaactcggactcaaaatggcactgatttccgaccgtttcgactttttagtggacaaacattttgatggaaaaacggaattgacaatttggagaagaatcaaaattgtaaaggacgaaggaccaaaagcgaaactgtctgtggcgatcgatggcaaatttgtgggatttccatttcctgaccatccgttgcccaacaaaatccgttttaagaaccttcagatttagtaaatcaaaaaatatacagaaaaccaatcttcattttttcactttatcagctacattgaccattctgtgctcgcatttctccgttccaacaagcaaatttgggacagaagtggcaccaaattggaagtgtttgtgccgttatatatgaccgacgtcaagctcatttgggatgtttttacccgcgaaatttggccactttttgcgagaaacattcggcatttgagctttcataatgccgatgctttggacaattggcgtcgtcgcacttcgccaacatttctcactgatcttgatgaattggtttctatcgattctgttggtctgttccccgatggaattgctgacgacgggccaaatgcaactgctggccaagctttggccaaatggcttcacacgccgagcaaaaatggccaaccaaagcgattgcatcgcaataatttgttgggtccactgaatctcgaatggctcaacaacttcaaagaggtgtgtctagccatattttctataaattgttttttccaattttttgtttagacatttcgccgtgccaccacttctgtcagttacaatattcaattttatcttcgtgtggaaccaatgccaactgctggccaaaaataatggccataactagggcgggaaccgcccaactcgccgcggggccaactcgccgcggccaactcgccgcggccaactcgccacgccttgttttttggctatctcgccgccagatttttcgttaaaaaaatgcattaaaagcaaaaattctttaacagttaattgtattcaatgtgttatatttcagcaaagtttctctccaatttaatatgcttcaaattgaaagttaacgcaggaaggaaaaattgcagaacgatatattcctctgtattttccacaaatttaaagagcaatcatgtcggtcattggtcccgaatttttttttttctgggaattctttaacaagtttctttgggtattttgaggcgctgagcactagagaccggcgcgggacgggatcccgcgcgggattttgcgggatccccttcgcgcttcccccttgttttttttcttcgccgttcactcaacccgcgccatcccgtccctgaggaagtgtagtgtaccagacctctgcaggggcatccgcaccatgacaattgccagatttcgactgaggactccattacatttaataaagaacaccgaccagtaatgcgagttggattggcctttgtccgatggttaattgccttctggtgagaattatatgtgatatgtttcttaaattctgtccatttttttgtattaatcatcatttcgggctttgttccccacatttcttctcctatttaaatgcttctcacttctcctgttcttcacttcaccatttccattgacttcactgttctgcattggaataaagcgcacttctctaaccgtctactcgctcattattcccccactctttggctggtcccccgtgttttccgcccattcgtctctccgcccgccgcccttcttagccctttcgttgccccctcgtggtcatcccccctcccggtcgttgtccatcccctttgtgcgacaagtggtgccgttagagattcataatgtcttctgcacgatgccggatggctgcacttatccgtcttccccagcacatcacctcagccgagaacttgctggatgaagacgatcctgatgcccaatcattcga

SEQ ID NO: 14558 - DNA, 4289 bp, Heterodera glycines
  unsure (1)..(4289): unsure at all n locations
gattggggcgatcggccccatggctccctnactaggggtccattgggaaatggcggagggtccgagacccttcccgctgtttgttggtgtcccccgttttacgtgggggactgatcgagggctctgccctccaacctttggagggagcccttaccggtgggcgatcgcggcccgccttatcggcggtgatctccccttcctcgggggagtcgcggcgtgtgtttgatgtgccggggcggctcgctgccgccgttcgctccttttgaggaggaacataaagggggcaggcctttgccccgcggcgatggccagagagttggcacgccgaacatgtcggcatgcgttttgacgacgactcctccttcgcttccgcgtcgatgaaatcgcggacggaaaagttccgtccgctttttgcgtcccgttccggtgttgctgcggcgatgttgaacaattccaccgcctttttgcgcggtggtggcggcgggggcggctcttccgatgtgtcgctgccgtatgatgaacaggaagaagaagaagaagaagaagaggaagccattttgatgggcttcggcattttggaaaaggcaagtgatggtgggacatggcaaatccatgcccttaaataggttttgctaccattgaaggggcggagctcttcgatcagatttgctttctgatcgtgggaaagtggccatgggaacagcattcgtgaaaatccccattggttttcacgtgccatgttcgccgcttcaagcggctgatggcaagtccttgtcgaagggaattcctttccctccgccaaattgcagaggcacaaagccacggccacaatgaaaaggccgttctgccaacggcgcattggacggttggggaccgcccttcgtgggcgattctcaaagctgccgtccggtgaattggggcggccatagtccatggctcgctctccgcgttggagaggcgcttggcggccattgttttccgccatttcgccaacattcggattgcctcttcggaggccaatggcctcgaagaaccgtcgagacgggggtcccctgtttggcccctcttggtcattgggagcctcttccaatgccaaatatgctcttattcggggaagacgagggggctcagcctccctctgatcagctccgatttggaatcggacattgaccatgtcgattgggaagtaatcgacatggattccttgttggctattgctgaagcctccatactcttggaggcatggcaaattcgggtccacctggaacccgcgccgtcggaaatgttcctggacagtccgtcccggaaacattcgcgtgttagccggtccaaaacgcgaaaacccgtcgaaatagacattcgcgaatggaccgaggtgtgccgcaaaaagcgtggcaccggtgcgcagttctcggcggaggtgttcctccgcgtcacggcgaatgctagccgtctcataccattgttggccgtggtgtcgctcaacccatgagttcaggcgctcggtgtgttcacggggcgatggttcccgttggggaggagcatgggctccccaatcatctcgctgatcgtccatttggcgattttggccactgttttcagggaccattgggagctggggcccccaatcctggtcgaaccaccaggggcctctttggtcttcggcccagggcggaggagcattgtcagccccgggttgaggagcattgtttgctctctgtccgttctcggcttcgtattggccgatgatgtcgatgacgaggcggtcattaatgaccacttcgtttgtgggtcggctgattgttggtgccgagaaaaaaggtggccgttctcggaacggaatcggcatggttttgctgaggcgctgggtgttgtttggagcttgatgatggcgaaggaatgaaattgtcatcaaatttccttcttttatatcagtttttggcgatcgattacggtaatcgattttttgatggaggggtactgtattcacctccgcttccctgaatgaaaattcggggtcggggattcttaattccccgcatgaaacggggaaagaatccccttttcgaggttcccatccgaaggatcctccggccgccaaaaagagaatggcagccacggaaaaagttgtggcgttgttgggtcgcggagcttggttcatgagcaaccaagcaaatgttctccataacttgtacacaggagagaagtgtacaacgaaaatgatgatcacaatgccgatcatcaagacaatgaagaaaattaggcctgttttaaggccaaacagagcttgaaaagtggacttccagtcgaaactgaagtcagcccagcctgagttgctggcctcttcgaggctttcggagactcgggctccgaattctgactgttgtcggagtgggatgtaatggagttgtcccaccaaggagaacttggttctcccagccaagcacatgacttggcatgtcgtgcttatttcggcatgctggaatgggagcacgacagtgtggtccgttatgttcgggccacatttgctcgtgaaatgcgaaccatcttcgcattgaatgtcggccaatgtttggccaatgtcagtgtggcacgagtaggagagctgagctcccgtcgcacatttgtagcagccagagatgtgctttggtgtgattgtgcacaaactctggtgcatttccaaggacatttgaaggctgtccatttgaatgttcatttggaccggactatatccggttatggcgaatattcgccttccgtgattccgcagttcgtaatggcggaatgagagcggaagtctccgctgagggtcttccattagaccctcgagattggcgacgcgacaatggcacgagactgtcccgtctgtgtgatcgggaagacagcccgtgcatgcgtcaattcccagagtacaattgaaagcttgggcggctttcaagtctgtacaatggaaagagtccgtgattttctcacggacaatggcgacacttcgcccttcaatcaggaagtcagcgttcagtaggggagccggtgcttggctcactcctattgttgaaatgctgatgttgtgccatttgagcacacggcctggaagaagcacagtttcgactgtcgcacttcttccagtggtagagtcgaggcgaagttgaatatggatgccaaactcccaagagttgcatccgatgacttcgttaatggccgatgagcgtggtttggcaaaccacttgtagaagagacatgaactggctgctaggagacattggtttccccaaaaagccgtgctgtcgatgcagaaactgttcccggggaacgtttcggtctccctcagctctcggatggctgtggagggtgggacttttgtgcaaaagtcaccgacacatgagccagccgacggacatcttttgctggccacggaagcgatctcgtatgatcgtttccaagccttggtgtatgcttggcattcgagagagagccccttcaagatcacttgaagggttcccaaaatgagaccatcatcggtcttcattgacaggacattcggttgtcctaccgggagaagcgcaagggttacgcttcccttgacttggcacattttcgttgtgccgttgttgagacagctctctgatttggccattatggccactgtctcaattcccccgtgtacaaacggaagagatgccatgacaagcattgtcatttggctaactcggccactggcccagtttcttgttgctggcctgggccggcgtattcgtcggtgaggatagaggaggttttcctcctcttcactcaacacccatgtctcttttcgcggcttgaataagcgcgcgaacaagactgagaaaatccaaaaaaggattctcagtcctgccatggcgtatcccaccatggaacacatggtgaagatgaagcacaggaggcttagggacaggcctcctgccagcattgccgcaatgacgggctggcatgttggattcacaagttgtgtgaaacaaaagtagcagtcgatgagatcacattcatcgactgccgggcaggtcgtgtttgatgtgaaggtgtgctgtgagtcagtccaaaatctggcctcacagtgatgattgttgagtaggacttcgattggtagttcgaagttcaaggcccttgcagaactatgcagctttctgcacagcatatttcgaacttttggatttcgggtggcactgtcacaacgattcctatggtgtaacaagtgaggccacactcatcacatttcccgaaagggaaaccacttgcaaatggaaatgcaagtg

SEQ ID NO: 14559 - DNA, 4044 bp, Heterodera glycines
  unsure (1)..(4044): unsure at all n locations
gaaaatttaaaaactgtataggcaattttcgtaacaaatagcactcaaatgccaaaattgttcccggcggcgcctatcggcaccgccggacctccattttccactatttttacaagttttttgccttaaaacggccaaaatagggtcatttttagtgcaaaaagtgcagtttttacccagcagcgggacaaaaaagttttttattggttaaatatcaaaaaaagaaggtttaaaggttttcagttgaagagcaaaaaaaaaaaaaaagtctcgagtcgggtcccccccncccccccccgaaaattttttctagataccccctacctatatcggggatgtgatgtgttttcggattgctaatattttggtcttggaattctgttttcaaattttgcatgtatggcgaagtggcttttgtaagacgacagtaaaggaacaaagtgcaggggttcaagtcctctccacgtcattaattttttatataatttttggaaaaataaataattaaattaacaaatggctattttgaagcttttttgaggcttcaaaaaaaattttttaaactcataaactaacagaacaattcaaaaaataacaaataaattgatgcaaaattttcatggagtatatacccaactcccaacggtctaaaatttccaatttctattttaaaaaaaatcccgaaaaatcctgcgaccgtcactgaatccagcataaacaaatccccaaaaagcacatactccggcgtgttgcccttgctggactggatgagttcgatgagcgggtttttgtccgtcgatttgttcaaaaggtcgcccccgtggttgaacaacgttttcatgcacaacggattgaccgcccgcagtgcgaccattgacggcgtttcgcccgcattgttccgcgagttgatcaacgccttgcccgcctcttgttcaagcagtgtctccaacatttgggtggaaaccagggcagcatagtgaagctgaaaatggaaaatatgggaaatttgtttgaaaaaccaaaaaaattttgaggatgtgctgccattcccaccaatgttaccaaatttaaaaagtaaatcaaaaattcgattttacaaaaaaataaatatcgaaaacattttaaaatttctatataaaaatattaaaagttccaatttccaagtgttgcctatcggcggcaccggaagacctccagttttactttttaaacatgtacaaaatttaaattgaaaaaaatttttttttgtttgtttacttcaagttattcaaaaaaagcgtaaatttttaagattttttactaaaaaaatttcgaagagattacgaaaactaaaaaatcaatttttaaaagaattcatggaggagaaacggcattggacagagggcagtgttgtgcccctaaacaaacagccttttatattgcaaaaaaaaatttttttttgttcgacgcaccgcattgttcccaacggggtcacgcgcggtcagatcagccccatgcttgagcaaaaagcggacaatggagtcctggttggtctggacggccaacatcagcgggaagaggccttccggggagcaagccacttggaccaagtcggtgacggagtagtcaaaccgttccaggtaggccagcccgtcgtccgtgaaaatgtccacgcgttggcacaaaattgcaatgtgcgccatgcgccacagcggatgctccttcatctgaaaaaaaattatgggaaattttgttggaaaaaaatttatggccttgacctgcataaaaaaaattttttttttttgggagggtctaacgtgtccgacacttttgcggcccgacatttgcgtctttgtccaaaatctggttcaaaactaaatttttttcaatccatgatcgcctaaacagctttaaataagcgattgaaagtgattgtacccgatcattttatattcaaaaaatttttgaaaaaataataaattttcaaacagaaaattattgatcataatgaactataaaaccgggttttcttaattttaatgctgattaggctatcagggcttgaaaaaaatcaactttgagtccgattttggacataggcgcaaatgtctgggccgcaaatgtcggggctccgggtctaacccgaacaatttagtttatcgttgcctcaaaaaacagttactgagtttctaaaactttttttgctgaacttttttttgagttttatgaaaatttactcaacatttttaaaaattttctcatgctatatctgacaaattttgtcagagaatttgctcccagagggtttcgaggcttaagcccagtttcataaaaaaatctttaaaaattttaaacaattccgccagtaaagtaggatttgttaaactgatccctattattagttaaatttattttttatacataccacaaatgtgacgtcccagatcagttttcgcaaatcctttttctggtctacaaaaaaaaaatattttttttttgaatttttgaaaaattctctgccacctgacgtccgaaacagcacacggcactcctcgtagcgacgacaaaaatccaatgcctcctcgacaatgttcgaccttgtagagaataagtcagaaaattataaaaaaatttgctgtttatttcctcataaaatttataatttaatgacgaattttgaggggtttcgtgtaattgcaatcaaaaaaaaaaaagtttttgaaattccatctccatcaaaatgggaaggcaaaatcataaattttgaagtaccattttcataaaagtacaaaattcattgaaaaaaattacatattttcgaggggtccacagaaaacttgaaaatttttcgtattttggggggattatacaaaaaaaaaattcaaaaccgaaaaatggtgaatgttcgccgccgtccgccactctcttccaccgtgtacaccacgtggttcatcaacgctttggtggacgggtctttgtctttgatggacccttggacgaccatcagcggcgagctacacgccattggcggcagcggtgtcctccaccgcggggaacacaatgcaataaaaggcgagcaaatcggagcggaagacgacaacctcaaaggggtcgcttgagagggagaaacaatatagaaaccggaaattacggggggaaattggtataattgtggaaaattaagggcataaataccccaagagagagaggggttggggaggactggaaaaaatttaattgaaaaaatcggggtgattttttttaaatttacatatttgatgggcatcgaaagacttaacttgaccaaaaatcagtttttttaaatttagcaaatcaattattggtgaaaccagtcatctaataaaatgtcaaaaatttccaggagcatcgaccaaaaaaaacgacagaaaaatttttcgccgtcaaaaaacaccatcggacgaaatcacggcagaatgatggctaggcttataattagttcacaaaattcgaaatttacaggcttattcaaaaaaccctatctccaaacctcggaatccagtagtcttcgccgaaaacgcgctcctttgcgtttgaccaaagttcgttgattttgaccgacacttgagtgagtgagaaaaacctggaaaacagagggagtgcatttaaaattagattttcaagccatccctaaactggggattggaatgatgaaaaaccccaaaatttgttgtgttattcaattgtggaccgcatttttccgggtactcgggaaagacaaattgaacactcgcgattttcaaaaaaaaaacttttttattttgcgccgacatcacgaaaattctctgattactaaaaaaacttatcctaaaaaactgattattgctctttttggcaaaaaactgcaaaaaggtaaactaattttagcattcaaaaatttttttgtaatttggatttcaacgatgacccagccctgtggtgtccacccgatcaccttgatcgtccgaagtcggccccaccactcttttgcgcttctgccgtttcttataagtccgactcgccaccacttcctccatcggattttcg

SEQ ID NO: 14560 - DNA, 1693 bp, Heterodera glycines
tttatttaactttattgttaaaattatttatttatctccccctagtttttgcattgttatttccaacttggcaataattttggaaattaacattttcattcattcattgatatgtatatatttttgtattcataatgtataatttttagccttataagttgttaaagaaattaagaaattaagaaattattattatttttattatttaaaataaatgtcgactttaaatcttcattttgcttactttcttctcattgttgtgtttttgcttgtggactattcattggcaacgagaaagaaaaataagaacaaaggtgaggcaattatgctaattataatattattatccattgcattcatttataatttccattcaaagttcgctcactatttaatttaaatgggaccggacctgaaaaaatttgtaaatgggaatttcgcgtttttctttttcggcaaagcaaacgcttggcattccaccgaggccgatggacaaataagcggagccgacaaacaattgggctacacaattcgggattctcccaattcagtaataccgttttttaaaaaataaattttgattaatttaaatgttttgcaggaggcgtcacattcactaaaagtgtacacgagaagaggaaaacaattaagcaaatcaaacgacgcagaaaggacgacgcccactgtcggagaacaacaaatgccattgtcagccgacgcagcggaagaaaacggcacaaattcacagggaacggcgcaggaagagaaactgcaaaaaattgtcgacaaattggagacgaatcagaaagaaatgcagaggaacattgaggaaatgttgaaggaacatttgacaaaaatggaggcgaaagttgacgaggtgaaaaatgaaaattaaaaattgataaaaaaaagatattgtaaaggctatttttaattgagaaaagaaatcctaaaatagatatggttaaggctttttatataaaatgttaaaaggtacgaaaagtgaaggaagagacactgcagcaaatagtggtcaagatggaggcgtatcagaacaaattgcagcgaagcattgatcaactaattgggggacaaaagggaaatggtgggcaattagcaattgctcacgtttatttaactatgttaataatgcatttagtaatcagtagagaaacattacatcttaatgattattcttttggaattagggttaaccattggtaaccgatgggatgtcaacgcacgcgaaaatggcatcgagctaagtgggcacaatgaattggttgtggaacataatggactaaggagcggtaccatttcatctaaagcacattaaaggtataattcaacaattttaattttttaggttttcgctccgtttgtgccaaaaacccaatcccaaaaagtggcattttttacttcgaaattaaggatttaaatacattctcgtcattgttagttgcttatttgcgtcattattggaaatgcttttctttttgcagtgcagccgttggattagcgccgaaacttttgccattgggcgaacgcgcccgtttattacgacggtataaacaccgacagacacaacgacagctatgaatttgataggcttataccgtcattcatcactgattcgcctcctctcccgctttacaaacattttccaatgcttaatcctggcgatgtgatccgg

SEQ ID NO: 14561 - DNA, 1178 bp, Heterodera glycines
attttgagtggttttgggaagtgttcgagcatttgcattcttctaagttcatgtaaagtgaaaattttgtttgatttttaccttggaaagaaaatataattaatatttttaaaagtcctaattgaaaacaatgcccaacaatgaaaaaaaaaattgaatttggagggtggatagagcacccaagggttattagaaaaatgtttattttctgctaaatgagcacaaatgccgagttatgacgtgccaaagttttcgttttcgattttttaccagtcgccattggtgtaagttatggaattgcttatgttgctgcaaagaatcgcatgatataaataaatttaaaaatatttttttggagagtaaattagttaattggcaaattcgcttctaatttaaaaacttgagagtccgaagtttgttttaataaagctcaaaacctttttcctccgtaatgaaaatccctgcccataataaatgattaaaatattgaaaaaaaagatttcttcttttcactggtcaaatcatttttaataatagagaattgaataattatggtggaagtgaaatttaaaggagaagaaaaagaggaagagaatacagccaattcgtaaataaaagaaacagacagaaaaagacacaaatcacacaataattaatcatgctaatttacaaaaaaaaaaaaatccacgcaataaaatcatcaaaaataaatttattttcattttttatttttcaaaaagcaatgggatgaaattttgattgattttctggttagaaaaaaaaattcctaatttaaatttgttaaataaaatccgagaatgtctctctctgctcgtcgtttgtcgcttcattcattcattttgtttttccaattttcgttttgcaattcgtccagcggcaaaagcgtgcggcgaaatttagccaaaacttcggccgatttggtcaccaaagcaacggatttgatcagctcaaattcctccccaattcgtttcagatgcttttgcgcgctttggagcagcaatttgacacgtaaaacaaagtgagacaagcacaacagcacaacctaaagctaaaatttttaaagtttgctctaaaaaactataaaatgatgtgggctcagggtgtgacacataaatatataggcaaaaaaaaaatattccaggactctagaggtcccc

SEQ ID NO: 14562 - DNA, 1079 bp, Heterodera glycines
atgataccttccgtataattattgctcattatcactcattatttgcccacctgttcctctgagatgggtttgccttccagcaatgccatttgcataatttcatgcaaattcgccatttggtcatgcttcaacactttttccgtaaaaatttgttgaattggccctgcaatgtttgacaattgcccagaaaaatgcaatttttttgccgcttcttttctgatgatggaaagcgctgggtttagaaacacaagtttcatgtcgactcttataaaataacggcgcaacgaggaaaaagcgaccaaatctgaagcagataatgggaggcaaatgatacagaaaatgggccgagtaattaagagagtgaattggcagggtaattaaggcgctaatgaggggaaaacgaagaaaagcaacaataggcagactaaatgaatcacacaatgaattaccatcgaccaagcattgccattttcaagctaattgccaacgatttactgaccctttgtgatatcccacacatgatttagataggctattgccaactccaaagccccaaaaaagtccgtaattattttcaatggcggcaacgaatttcgttttgcttttgtcaaataaataaattcctttttcacgtaggtgccaagcttaattggtgatgttttagtaatttgtggtgcttttcataatttttgatgattttccacctgatattccaccacacttttcactccttcgccaattttatccgccccctcggcaatgttcgctttcaaagaagaatctttttctctctcggtggttttcttattcgccaattctgcgtttttctccctaaatccctgctccaattcgtcaatatgttctctaatttcatccatctctgccatttccttggcaaatttcactgtttcttttcgcccttcgatttctctcaaaatggccaacaatttgtcactttggccttttgtcggattgtcttgcaaatgggccatgaactgcttaaacttcgcgaaatatgcttcgatgggttccttctgagacgggcgttcctcctcattttccatcaatgcattgataat

SEQ ID NO: 14563 - DNA, 2775 bp, Heterodera glycines
  unsure (1)..(2775): unsure at all n locations
attgtcagaggcagtgcctggccgaaaaaatagacacacttttttaaaaaagctaaaaaaaattgaaaatttaaataatttaaaagtgaaaaaaaaataaagtaatttaaataggcatattttaaaaaagcctatttttttgccttttcacaagagaatttattaaaaaaggcaaaattcgccttaaattaataaggtgaaagtttgaaaatgtttattaaaaaatttcaggatgaaatacaattaaaataattaaaaagaaaaaaaataaatttatttttctaaataaataaaaaacattgtcagaggcagtgcctgcctaaaaaatagacaaaattttttcaaaaaagccaaaaaaaattgaaaatttaaataaatttaaaagtgaaaaaagtaaaaaagcttacaacaccttcgattcccaggacgtctccgttccaagtactaagaaggcccaacgttgcttaacttgccagatcggacgggatggcgtgctttcaacgtggtatggtcgtaagcgaaaggacagcaattaaagtcatttaaataggcatatttaaaagagcctatttttttgccttttcacaagagaatttattaaaaaaggcaaaattcgccttaaattaataaggtgaaagtttgaaaatgtttattaaaaaatttcaggatgaaatacaattaaaataatcaaaaagaaaaaagaaaaaaaataaatttatttttctaaataaataaaaaacattgtcagaggcagtgcctgccgaaaaaatagacaaaattttttcaaaaagctaaaaaaaattgaaaatttaaataatttaaaagtgaaaaaaattaaagtaatttaaataggcatattttaaaaaagcctatttttttgccttttcacaagagaatttattaaaaaaggcaaaattcgccttaaattaatgaggtgaaagtttgaaaatgtttattaaaaaatttcaggatgaaatacaattaaaataatcaaaaagaaaaaaaataaatttatttttctaaataaataaaaaacattgtcagaggcagtgcctgccgaaaaaaaagacaaaaaattttttgaaaaaagccaaaaaaattgaaaatttaaataaatttaaaagtgaaaaaaattaaagtaatttaaataggcatattttaaaaaagcctatttttttgccttttcacaagagaatttattaaaaaaggcaaaattcgccttaaattaataaggtgaaagtttgaaaatgtttattaaaaaaatttcaggatgaaatacaattaaaataattaaaaagaaaaaaaataaatttatttttctaaataaataaaaaacattgtcagaggcagtgcctgcctaaaaaatagacaaaattttttcaaaaaagccaaaaaaaattgaaaatttaaataaatttaaaagtgaaaaaagtaaaaaagcttagaacaccttcgattcccaggacgtctccgttccaagtactaagaaggcccaacgttgcttaacttgccagatcggacgggatggcgtgctttcaacgtggtatggtcgtaagcgaaaggacagcaattaaagtcatttaaataggcatatttaaaagagcctatttttttgccttttcacaatagaatttattaaaaaaggcaaaattcgccttaaattaataaggtgaaagtttgaaaatgtttattaaaaaatttcaggatgaaatacaattaaaataatcaaaaagaaaaaaaataaatttatttttctaaataaataaaaaacattgtcagaggcagtgcctgccgaaaaaatacacaaaattttttcaaaaaagccaaaaaaaattgaaaatttaaataaatttaaaagtgaaaaaaattaaagtaatttaaataggcatattttaaaaaagcctatttttttgccttttcacaagagaatttattaaaaaaggcaaaattcgccttaaattaatgaggtgaaagtttgaaaatgtttattaaaaaatttcaggatgaaatacaattaaaataatcaaaaagaaaaaaaataaattaatttttctaaataaataaaaaacattgtcagaggcagtgcctgccgaaaaaaaagacaaaaattttttgaaaaaagccaaaaaaattgaaaatttaaataaatttaaaagtgaaaaaaggaaaaaagcttacaacaccttcgattcccaggacgtctccgttccaagtactaagaaggcccaacgttgcttaacttgccagatcggacgggatggcgtgctttcaacgtggtatggtcgtaagcgaaaggacagcaattaaagtaatttaaataggcatatttaaaaaagcctatttttttgccttttcacaagagaatttattaaaaaaggcaaaattcgccttaaattaataaggtgaaagtttgaaaatgtttattaaaaaatttcaggatgaaatacaattaaaataattaaaaagaaaaaaaataaatttatttttctaaataaataaaaaacattgtcagaggcagtgcctgccgaaaaaatagacaaaattttttcaaaaaagccaaaaaaaattgaaaatttaaataaatttaaaagtgaaaaaagtaaaaagcttccaacaccttcgattccaggacgtctccgttccaagtactaagaaggccccacgttgcttaacttgccagatcggacgggatggcgtgctttncacgtggtatggtcgtaagcgaaagacagcaataaagtcatttaataggcatatttaaagagcctatttttt

SEQ ID NO: 14564 - DNA, 1402 bp, Heterodera glycines
  unsure (1)..(1402): unsure at all n locations
gaagcatatttgattgtaaagcagattccatcggccgactgacgccttaancagcaaatcactgcactctgaaggcaaaaaccaccaaatgcttggctttgtgatcagaagcagcggacggcgcgagaaggccgaaagtcgagcgatggtcagtaagaaacgcttttttcgttaattgattgatttgactaccttctttatactctccctcctctttttaaggcttgtgccccgcttcttcgatggactcccaatgcttacactaatggtgagttgtaaaatgatggtttaattgatacattagtgaatgaaaaactaaagaaaattgcttcccaatgcaggagtgtgctatttgctcaattccgaacttaacaacaccgttgtgatcaacccgtgcgattcgttgccgaaaaaagatagggtcggcacttaatacaaatgttctgctgatcagtcacgctctagaaattgcctaattagtctctatttagcataatgactacggtgcgtgtgaacaaggcttttccggtttcgttgacaatgtgatgaatgctcatactttctcctcattctcttacatcgcatttcaataattttccatcattttcagcacatcattttgactggtctcccgggggcacggaaatggacaggcggagttttcggtaatttttatcagtccatatttctatccatgcctgtttgtaccattgggaataattgtgtgacattttcatcagctcgatacgaattcactgattccgatggttttactgatttggtggaccggcggacgatggacgtgagcaaagaacagcgggggatcatcaacgttttgacttcgcacgactatttgggatactccgtccgttatgggcgcttcggcttttggtatgagcacaccgaggcgggcgaggaggccgccaatttcacggtggtcagtggcgcgactcggtacaatcagacgggtcagtcgacgatcaaatgttgcgattttcttggcattttcattttgcctttttcgcaggtgccgtcgtctttttgccattctggcgacatgttcaggcggagaatcagcgacagttgggcctttccgacgacttctttctgttagccggccatcagcttggctccgggttcggctccgctttggaagtgctcgatttgaatgccgacggcttcgacgaccttttggtcggcgctccctttgaatttcacctccgctccgatggcgcgtcgggtggtgccgtttacgtattttattccgcgggtgtgcgtcgacagaagggggacagtgcgcgagtgtttcgcgccccaaagattctcagagggaccggtgcccattcccaatttggcgctgcgctgacgcgactcggaaatgtcgacaatgacgcggaaggga

SEQ ID NO: 14565 - DNA, 2180 bp, Heterodera glycines
  unsure (1)..(2180): unsure at all n locations
gtttttctttgttcacttctctccggccctttgcctcggaatgattcgtctcgccttttttctcgccatttcgctgataataaacanccagcaggcctttctgtgccgacttcaagcccatcncaatgccaaaggtgttatgccacgagcattgttcgtacccaatggcgcggcaacgacggaatggcgttgtgggcggagtgcactcggaggaggggaggaaaagcagacacacgacatttatgtgccggtaaattcattggcatttacatcaatgccactgacaaatggctgagtgttcacaatcagaagggcaaccaagactggacaaactcattacgtttcaatttgactgtgtccgtctccccaaacggcgcactcgtgcaacagtcgttcccgctgcccataatcaacagaaaacaacgcagtcacttcttcgaaatcgcatttgacaagaaatgcggtgaggacaatgaatgccattccgagttggcactacaagcagccattctcgacataacgtgagcataccggggatggaaatgcagaaaaacattgggacaaactcaggaggcgcgaagacggcatttacattgccaaggtgacggagcgcgactcgctggtgattcgttttttggtggagaatcgtaaggagcgcgcatttctggccaaattatttgtggaatataacggagtgaggggaagtacatttcgatggaaaatgagttgtcaaaattaaggacgaattggacgaacctcacctcacgcaaagggactaccaaaaagagactccaaagttggacatcgaacggaggaacgaaggattggtggttgttggactcggaaacccaatggaagcgggaagaaaggtccgatcagacggagacgtttgttgccaagtcgtttctctttcagcttagctttgacttggcgtttaaactcgtccgtggaagttccgaacgaatcagcgcctcactgaactttcgcgcactgatcaattcgtccagtgttgaggaggaaacggcgaacaatgaatggagtgccgaagtccaactgatcaaagaagccgacctccagctgggctagtgccttcctttcttggagcccttttatcaattccttccgctttcagaaggcgcttctcggccgtccatcgtccgcttcagtaaaggcaaccgattggtcactgacgaagtggacatcggtcctcaagtggtgcacgtgtacacaataaccaaccacggccctttctacgcacgaaatgtgagcctgaagatcaactggccgttacagctgatgagcggggaccctttgtccccgcgtcaaattgcctccggcagttgggcactttacacacttgaagagccattgatacgtcataatggccaaatccgacggtgtgcagcaccaccacaattacatggacaaaagtccatcaatccgttgggcgtgtacaacgacgaaaccctcaaattggattatcaaatgacgagtcgacggcaaagaccgaaaagggcccccaatcagcggacagttggaacaaacgccgaaggcgggacattctctgccacggcaccgctgacatcgattttcgacaacggacgcattcgacggaaggaaatcgaggaaagttcaggcgccaaagttcgtattgccgacattgtgagttgatttacgagtggcgaaaaaggcacactttccccccagaattgcaaggatggttctgctttgtgtgtaccgttacagtgccatttcgacgttagtttttaagcgttttaaatgatttgttggtttggattgatgaatattcagtacattggacgcaatgattcaattctaatcgaaatacgagcccgactttggaacttcactttctccgccgtacgttgcgactgaatatcaagcaaacattcctacgattccctcacaatcaaaggattaccgtgccatcgattacatcgccatctcttccgaaggtttcatcgaagtcgaccccaaccaaggcattctcgaggacgtgaccaacaacttcgcgcgagtgaccaccgacgcgtacccggacagacctcagcaggagggccaaattcgcgtgtggatgctcctgttggcctgtctgattgggctcgcactgctcggtctcctggtggtgtgctgcaaaatgttgggcttttttcagcgca

SEQ ID NO: 14566 - DNA, 3170 bp, Heterodera glycines
ttataagttgaatgcactaaaaaatgccaaatatgcactaaaagtcccccaaagaagccctaaaaacccgaaaaatgcccaaacatgcactaaaacatgcctataaactgcaaaaaatgcttttaaccctcaaaaaatgccaaaaattgtgtataaattaagaattgcttttaaaacaccaaaacaagggctaaggagcatttttttagacaattgcaaaaatatttaatttccaaatttataatatatgctaaaacaaaattacatttttatacacataaatttttttcccaaaagttctgacaaaaatttaatttttttcgatttctaagggtgtatttttaaaaaaattccaaaaagtcgatcgttaggggtgtatttttcgcttttttcgcatttttcttatgaaaatttaccaaaaatgaccgaaatatgctctcaaaacgcaaaaatggacaaatatatatttattctcgaaaaccccctaaatatgcttttatgtgcactaaaaaccttcaccaaatcaaaaaattttattgcagaaatgctatttttgagcccctttcttcatagcatatgcgcagaaaaaatatgcaaaatcatacaacttataaccctaatcataactatttaattggccaaaattcagttaatggtggtcaaaatgcgatttatgcaattactaggattaaatcatctgaaacaaagacatgtctttggcgacccttccaattccaattaagattggatgctaatgctttttttaattttcagcccgatggactcgttatcaccagtgtttaaaataattatttacttatggaaaagccattaatcctatattttcaaattgaacatgtaaattagtaaaaaaaaattttgtttttattttgcacataaaatatgcactaaaagtcccccaaataagccctaaaaacccgaaaaatgcccaaatatgcactaaaacatgccttaataaactgcaaaaatggcttttaaccctcaaaaaatgccaaaaattgtgtataaattaagaattgcttttaaaacaccaaaacaagggctaaggagcatttttttagacaattgcaaaaatatttaatttccaaatttataatatatgctaaaacaaaattacatttttatatacataaatttttttcccaaaagttctgacagtttaatttttttcgatttttaagggtgtatggacaaatatatatttattctcgaaaactccctaaatatgcttttatatgcactaaaaaccttcaccaaatcaaaaaatttttgatttccggctcctttacagccgagaaaaaatgaaaaaatttttcaagttattagtccaaatttacagaaaatttgctaattttactgaatattttgccaattttatttgattttggactgaattcttaaaaacatttatattagaattttaaaaaatatgcataaaataataaattttatcattttatgctgttttaaaaatgaaaaacaaaatttgaaagtgggggggggcgcctcacaaaattgggtcgtcgtcgcacagaagcagcgggcgaagatgcggtgggtgttgacgttgaaatagaataggtattggagaacagtggtgaaagtgatgaactcaaccaaataggcagaaggttgaaattagtgaggaatttgcggagatttgttgcttttatattgccttttttggaatgaatttctttaagtgaattcacctctataaaaggcgttgaattttgcaaaaactttcattgccttaccctaattaattaactattataattctctctatatcgtcgtcgccgtcaacctcaatttgaggtgttttcactccattcataattttttaatctccgtttttcttacagcagtcatcacgatgtccgggagaagtggccgcagtgggaaacgccgacaggacggaccgggccgcccctcacgttcacgtcagcagcagcacacccagcgcggcgttcagtctgcatatcaaggtccacgagagccgccggagcaaccaacagtccgaggctgggaggacacgcacgacttcagctcagccctgaaaatcttcgtcaacgagacaacgcgacgcaacgtgaaggagctggtcaacgaatacacggagctgaacgccatgccacggccggagacttcgccggaattcacacggtcagtttggctgtttcgattttcaaacacaaataaaataggtaatttctttacagccacatggactgcaaccgctaccgggacgtcatctgcgccgagcagggccgcgtgcgactcgacaacggacgatacatccacgccaactggatcacggcccttggcgaacagcgcttcatctgcacacaaggcccgctcgagacgacctgcgccgacttctggacaatgatcgtgcaggagaacatcgaaagcattgtgatgctctgcgacaccgtcgaacaaaacaagaccaagtgccaccagtactggccgacaccggacaaaaaggtgggtttttccattttttccccttgcagcaattgcacttcgccaacaagacgatcaccgtgcacttcatcgaagagactgcgctggagccggacctctacaggacaaagctggcggtgctctttcccaacggctccatgcgcgtccatcacttccactggcgccggtggcccgaccgcggtgtgccccagaacgacttggcgcctcttcgtttgctgttccacgtgcagcagtttcggcgctcggtggtccaccgttcagcgggtgagtttgtgccaagttggaaagtaaaaattcaataaatttcccatttttaggaatcggacggaccggaacactcggtggcgctgcacatcgcctacgatactctgcagcgtggacatcgactcaacatcctctcgttggcgcgcaacctccgtcagcatcgggcccagagtgtgcagacgccggaccaatacctctacatatacttcgtgatgttgcggtgggttttttgtttgagattgtgtgtctaaataatcatcccctcccccatttagttatgctctcaacatctcggcgaagctcaacattgacgaacgtgcactgacgacattcctgcggagatgaacgagagaatgacgcgaacctgatcttctgtgtattcgtgatcgtatttg

SEQ ID NO: 14567 - DNA, 4072 bp, Heterodera glycines
  unsure (1)..(4072): unsure at all n locations
ttcaggctggtttcgcgggcgatgacgcgccccgtgcggtgttcccgtcaattgtgggtcgtccccgtcaccagggcgtcatggtcggcatgggacagaaggactcgtacgtgggagacgaggcgcagtccaaacgtggtattctgacgctgaagtacccgattgaacacggcatcgtcaccaactgggacgacatggagaagatctggcaccacaccttctacaacgagctgtaagtgtgctgtgagaatttgttggtgccttttttgtgattctccacgacggtgaaatttaaagtttagtggttggggtgggtcaaaaaaattcgggaatagtccgaaaccgtggcttgtgtcatgtttgatcacgaatttatttcgccttgtttcggacttcgggcgcaaatccgaacaacaaaaaccgttacctgtcgagacgttcccgtgatttttcataaaatattaaaaaatgcaacccaaaaatatggcaaaatttcgctcccgtccttttgcaggcgtgtcgcgcccgaggagcatccggtgttgctcacagaggctccgctgaacccgaaggctaacagagagaaggtcagccagtcgccatcggtcgaccaatggtcaaaccgcacggcccgtccccctgttcagatgacccaaattatgttcgagacgttcaacacgccggccatgtacgtggccattcaggccgtgctgtcgctgtacgcctctggccgtaccaccggtatcgtgttggactccggcgacggtatggcagccaaatcattggcataatgccattgctaatatccctgtacaggtgtcacccacaccgtgccaatctacgagggttacgcgctgccccatgctattctccgcctggacttggccggccgtgacctcactgactacctgatgaagatcctcactgagcgtggttactccttcacgaccaccgccgagcgtgagattgtccgtgacatcaaggagaagctgtgctacgtggccctcgacttcgagcaggtcggactttggccaatgccgtgccaaaattatcagtccgtccgccttcaggaaatggccaccgccgcttcgtcctcatcgctggagaagagctatgagctgcccgacggccaagtgatcactgttggaaacgagcgcttccgttgccctgaggcgttgttccaggtacgtatttggctggatcggccgaaatgtagccggcctataatgtcgtcgcaaaaaaattcaaggccttgagcacttttccggaagcagttttttggcaggaagagcaaaaacaaaaatttttttccgtattccccatcaaaaaaaattttctttctatgggcctggccctgaagtggggaacaggagggcaggggacacactgcttccagcataagtagagactggactgaatatgcaaaacgcggtgcattactttctgttctctatgtaattgtcacccccccccccccgagatttaaaaaaaaattttttcttgaaatccgttgaactttgaacaaaagtatttttgggctgggggcgagtcgtttctcagtgctctgtggaaatcgttgccaccatggcaacacactgattgtatgaatacacaactcctttccagccatctttcctcggcatggagtcggctggcatccacgagacgtcgtacaactccatcatgaagtgcgacattgacatccgcaaagacttgtacgcgaacacggtgctgtccggcggctcgaccatgtacccgggcattgcggaccgtatgcagaaggagatcaccgcgctggcgccgtccacgatgaagatcaaaatcattgcgccgccggagcgcaaatattcggtgtggatcggcggctccatcctcgcctcgctctccactttccagcagatgtacgtttgggttggccgtttttgttgtcgggtttggctgagcaatcaaactgcttctccccccccccccctccgcattcaattccacgcacctccgcatttgcatttttttttgcacggtaatctcttggatagtcttgtcgccattttttgggtttgtgtaacatcagactgtcttggctcttcttagaaaactcacggaaagtgccgcagggaacttttntaaacgatttaattttgtcccaacttacgagtgtatcaattttggtttacaattaaactcattttccctttttaagtgattcattttttggatggctgtagccttttaaaattggcttattattactttttccaaaactgttttatgcaattaatcattgcgcgttttctcaggtggatcagcaaatccgagtacgacgagtcgggcccgtccattgtgcaccgcaagtgcttctgattgagcggcggcccgcagggagccgaaagaaggaggaaaatgttgccgataaaatttgatttctttttttttttgctgtttgtcatggcgtatttaatttaaaatgataatatatagaggcggatttaattttatgaattgcttgtggataattaggaaaatcttattccttggcgggtgaggagtttgacagtgatttgatttttttaaatttgaggcaggcgggtaatacctctgcatgtccctcctattttctgaaaataaattttttagaaaatctaaaacgcctttcctgggttttcagggtctgattgattgacacccattctagtgattcgaaaacccaaacccgacttcaaacaaagaggaactcaaattagaaactgcacagaatgacctttttaggcgttgcgttgcaatagtaagagactaactatagcggtacttttccgctatgccgccaccccataagtcatgatccctacaatggaaagcacttttctgggcgtaaagttttaggcgccgttcaagttaattaattggaagcaaagcattattatttttttgctgacaaattatggaaaatgcaacgaataacacattctcctgaaaggaatttatttctgtaaaataaatgtaaaatttgataaagaaaaaatggtgagaagagtaaaaaaaaaattgagaaatcattgaaaaaaataataaagatctgacgtgtatttgtgaatgtttgtgagtgccaattgacattaagttttcggactataacttttttatttgttaaccaaatccaataatcttggtatcattcgaaagcttaacatgtttagaagatatttctaagctattgcttcgcgattagacaattaccaaaaaagttataacatgaaattgcaaaaaagtcgaaaattttgaggttttttcctaataacttttttagaagctaaaatttttgtttgttttttgtaaggctaatagagcttgtgaatggctttcgaatgataccaataggggcgttaaaacgaacatttcgaatcccgaacccgaattcgaacaaaaactcaaaaatccaatttccgacaaaattcacatttattgcccaaatcaatttaaatgcacgaaatttgtaatgaatgagattaaaaacaatagatttatggatttcgttcacaggggtacataacacttacttgagaccaaaagttaaaaaatacatcattataatccccaaagtgctttcgccacagaaagtaaagttcaacacaatcaaatacagcaaagtcccaaaatatgcaaattttttaaaattggcgtaataatcttgtgatagacaagcagatggtagtgtgtatgaatgttttctttgtgatgtgaagtttttgggtctgtatcgttttggcgccgccgttttggcgccagcccaagttttcggactataacttttttatttgttaaccaaatccaataatcttggtatcattcgaaagcttaacatgtttagaaaatatttctaagctattgcttcgcgattagacaattaccaaaaaagttataacatgaaattgcaaaaaagtcgaaaattttgaggttttttcctaataacttttttagaagctaaaatttttgattgttttttgtaaggctaatagagcttgtgaatggcattcaaaagataccaagattgttagatctggtcaacaagaaaaaa

SEQ ID NO: 14568 - DNA, 2865 bp, Heterodera glycines
  unsure (1)..(2865): unsure at all n locations
cataaagcactgcccattgcaatgtctccgttcaattcgtgaaattcgcccagtgtaaatgaagctcaacatcactntaaatgcttctgcttcaacgtcaggcacctccataacctgacaattagctgattgaaaattaatggtgtaattagcatgactaattgaaataattaacaaaaattattaatcttttttttaccgttttcgccttgttctttcttcgcgtcaaaacggaaccattgcctcaaatacatcggaagctaacatcaaaattaatttatgggctgagagaagcttaagaagagagagataaaaaataaataatttaagtatttccaattaattaaaatattattcaaagttatgattaaaaaaagaattttctcaattcagtaatagccactaaatactcaaaaaatgaacaatttaattaataaacaagaagaactcgcctctttttcttctccatcccccaccaaaaagtgcacatccgcgtactctcccgtgctcagcatcatctttagcccagcaatcaccgattttgacattataaattgaaatatttgctaaattgtgatacataagatgatgataattatgtcagcttttattgattcctcgtgagataacacaaaaaaaacacaacgcttcatccgatccataaattccccgacgataggaatcgcccccactttggcgccggccaggcattttatgtaaaaaaatttgacgcacttaacaaatcgatattttatcggggatacatagagttagcaaagttcaatcaaaacaaaaatatatggcaacaattgtgtcagaagagggcaatgttttgctgtttctctttcgccctgccaccgcatctttagcccctttttcagaaaaaaaagttgaccaaatcaatgaaaatataaatcaaacaatgtttttcaaaaaactgaaaaatcgatgtgtattttaaataaattttattttttgagcccggtgtttctgagtttgaaaaattttcgatcgaagcccttacggccccggtaaattggacacaaatggaaatttggagaccggaaaattggaccttattggatataaaataaattaaaaataaataaacaaaaattttggttttgctaaaagattttattttagtctgcacatccctgtgtttttataagcgtaataaaatggcaataaataaggtttttattattgtaacatcaggagaagaaagccaccataacattaataagtagggatcggatttttagtgataaaaaatcccaaaataattaactaaatagtagaaaaaaattccaaaacagtggcaaaaatagtggcgaaaaagttccaaatttaggggtgtaattttttaaatagctgttttttaatttgaaaataatttaaaattaaggaaaaagattttattcactgattgcagttacaaaatattttcttagaaaatattgaacaagaaaaaaaatttgggggaagaatttttgtgaaatttttccaattcttagggatgtatttttgaaaatttttaggtcgattcttaggggtgtatttttgaaaattttttaggtcgattcttggggtgtatttttcgtttttattgcattttttgggaaattttccaaaaatgccaaaatagtggcaaaaataatgacgaaacgccaaaatagtggcaaaaaattattttagtggctaacttccgaaatagttttttttagtggcgaagctccaaaatagtgattcctagtgatgaatagtggcactaaaaacgaaaaattttcgaaaaagaatgtgtttttcgtgcatttctcgtcgagttaaagccgcagaaaaaatagttaaaaaactaagaatccgatccctactaataatattcaacagttttaaagtacaatttctttttatgtaaatcatttattaaagcacaattaatcattttattttgcttagaagtaccatacgcaaaaagcgataaatactgtattaaatagtttaaccaaaaatgaagcacattttaattttatgaatccactgacgaaaatattcactgccgaattggaactgacgaaaaaaatggaaaacagtgaacaatcttttgcactgccgcgtctcataagatgtcagcaatttcgtttcgctttcgttttagtagaaaataaatttggacgaaaaaagcaaaaatatttacactcctaactgtggcaaaaacacataattcgggcaaaattttgtaaaaacccggcaattttttaatccattttttgaagaaaaaaaaacattcaaccccaattcatcagtaggacacagattcttaggtttttactcaaatttctgcggctttgtttcggtgagaaatgcacgaaaaacacatttttagctcggaaaatcttctctttaacgctcctatccctccctaggaatccctatttcgggtgttcgaccctaaaataaatttggccactattttggcattgcgccattattttcgcgggcccctttcggcatttttggaaaatttcttaccaaaaatgcaataaaaatgtaccttataagaaggaccggcctcttgaaaattttcaaaaaatggaaaaattaacaaaaaaaattttaatttttggacaaaaacaatataaatttcgcaaaaatacagtattgacttaaaaatgaaaaaataagccgaaaatcgaattttcttcaagaaaaactgctttttttcaaataaaaatgaaattacattcagccctgagagattttgacaaaattgcgaacatttttagatgcaaaaattttttaacatcattaaattctgtggatacaatagaatttttgctatataaatttacaaantatatttct

SEQ ID NO: 14569 - DNA, 1831 bp, Heterodera glycines
  unsure (1)..(1831): unsure at all n locations
ataatttacacgatggggaccaataaaagtggacgcatcgtttttggtagttgccaaagcgttaaaagcagtggtggacatttttggccactatttgttggcccttaattaagacaattagccaaattttccgaaggtgaccatttctgcgggccatgaaaacatcgacaccgtggaatgtgccagaaggtggtcactaatcacttccgctcagttccccacctctacaaattaggggcatccgaatgggctttggcggtgccattctcactgaagcaacagccgaaacggcgatggcacttttacttacggtttcacgccgccttgtccataacttttttttaattcgaccaaataaaataatgttgatattaatcaataggtctaaaagttctttattagcctgcaaaatttcaaaaaattatattaggttttaaaaaagatatggcgcgctgcgccaaaatggccaggaaaatgcaattttttgaggttttttggccataacttttttgcttctcagctaaattttttgaaactttgcaggttaataggcactatcaagccacttaaaatcataccaagattatttaattttgctgtgaaatcaaaatgatatagtcttgcgccaaaatggcctgcgccaaagtggccggttcccgttgaaaaataaaattagcagccctatcaatcaatcaacccgaaatgtttggtttgtgttttattttgtacaggaggagcaaataaaaaacaaaaaataataaaaaaacaaagagaaagtgccaatttgacatttattcactgcttataaagcatcagtgatgatcatttgttctgtttgtgtgagtttcattcactcttttgccattctttttcacgggttttgcggtcgaaggcgcttagaaaggagaaaagaaaacaaatttatgataaaaaattattgaaaatgaataaaaattaaaaaaacttatatatgaatggaaagaatgcgcaatgaatggccaaggaaaaacatttgggaaaaaagggcaatcgaaaaagccgaaacattgcgcaaatcaatcgaaaacggagatgaaattgcaacagaaaaagggaatgagaaaagagcgcaacaaaaagcaaaatttggatgaaaaagctaaccttagggcatttgcgagtgataattaattaataaccgtttcagtgaatgtgcgaacaacgggcaaacaaaagaaaagtttaattggttaatcaatgggttgagcagaagaaaaacaaaaagtgctgtgatcctaagacatttggtacgaccgatggaattgttggttaattagttgatcagcagacgaaagaatcccctcgggggatgccacccgttttccgttcacttctccaccgaccggtgccgattctgnctcacgagtcggggtgtgtgagacgattgtgttcgaccgangtcccagcgcttcctgcgcaccgccaccgtcgtccatgggctttttccgatcgcactgcttnnggtgtgtgctgcgcgctgttttgtccagccgggctaactccgcaaaaggccagtcgtgtcgcttccttctgaatgaatgcatcccattctgttgattatgattacaggccccaaaaagtcgaggaggggggggttttttttcccccccccccccccccttttttccctccataaccccccaatttcctttttttttttccttccccctctttttatcaaaaacccaaaaaccaccaccttttttttttttcccccccccccccccccccccccaaaaaaaaaaaaaaaaaaaacatattttttttttccccccccccccccccccccccc

SEQ ID NO: 14570 - DNA, 1409 bp, Heterodera glycines
tgttttctaattttcaaaaaaaattccaggcctctacctatacttggaagggctgcagaaattggcaacttttcagtaccaactttgcccagttcagtccccgttgaataactcattaggctttgacctgagcgcagggtggccagcggacttattgtagagctttaaaagcccgatttttccagattttaaaatttcgaaaattttcaaaatttttcgagctaggcctagaaaacggttttcgggtttttgaattttaggaatttttaacgaattttcccagaaaaacggagaccacttccaaaacatagtttttcgagctctatcgactggtattttttttggaaaaatttcgattttttcccggaaatagaaaaattttttggcctcagcgggacatttgagtcccgggcccataactcgtcaggggttgaccatagcgaaaaagaaccacaatcccacagcaggtccacgacaattgttggtcattggtgcgacataaacccgaagggtcagtcagctaaccacattggtgcgacataaacccgaagggtcagtcagctaaccacattggtgcgacataaacccgaagggtcagtcagcgaaccatattggtgcgacacatgccccgaggggccagtcagcgaaccgtattggtgcgacacatgccccgaggggccagtcagcgaaccgctttggtgcgacacgtgcctcgaagggccagtcagcgaaccgctttggtgcgacacatgcccctaagggccagtcagcgaaccgctttggtgcgacacatgccccgaggggccagtcagcgaaccgtattggtgcgacacgtgcctcaaagggccagtcagcgaaccacatggtgcgacaaatgccccgaagggccagtcagcgaaccgctttggtgcgacacgtgcctcaaagggccagtcagcgaaccacatggtgcgacacatgccccgaggggccagtcagcgaaccgctttggtgcgacacatgccccgaagggccagtcagcgaaccgctttggtgcgacacatgccccgaagggccagtcagcgaaccatattggtgcgacacatgccccgaggggccagtcagcgaaccgtattggtgcgacacgtgcctcgaagggccagtcagcgaaccatatttgcaaaaaatcaaatataaatgtcaatattgggaattaataaaggacagaacaattaaaaatgccaagaatttgcaaaaattattatttttttaatttggcagttttaattgttcttgattattctaggaaagaacttaaggcgtacctctgctatattatatttattatctattccatcctcagatttgggacagaaaaactattcctatatatagcaaggtataatttaaaataaatagaactctgaaaa

SEQ ID NO: 14571 - DNA, 1578 bp, Heterodera glycines
  unsure (1)..(1578): unsure at all n locations
ggtcgatcagaaattgcggatttctgtcaaaaaatnaataatgcaaaaatggaatcaaaaatgaacaatcaatcatacatgtgagtgatcatttgatggagcaaatccttattctccataaacaattcgggtgccgattctgtaggggaagaaaattatcattaaaatgccatggaaaattccggcacacctttaacaactttggcgaacagttcggcctcttcgcccggcactccgtaccaaattttgcgctccccccaatggttgtagttgatggaatacagcataaaatgtagaaggcggataattaaattccaccaaacagacatagaatttttggcaataaaaattgttggcaaaggtatgaaaaaaaaaatccagaaaatctcgagcattttcaattgcttcaattcggcgtagaaatgcgggttaactatgcccatgcccaaaaacacagtcttataattagaatcagggggcgtacccggattcggaatcccgaaaattctataattttttgggacagttagaaattcgctgtatctaaaatttttggagcattttgaactgtttcaattcggcgtagacaaattattttgccgtaaaacaataaggaattcgagggcatattcggattctaaatcccaaaaatgccacaattttttggccacaaagccaccaaacagcagacacagaccagtggtcctcgacgtgccaacaaaaggtggagaacagcatgccaatgtacacccatgggatgatcatgccggagatgtcggtggtcatgtggcacagcacactctcgcgcaccttcggcaaattgtgcaaattccacggatggttggcgtactgttggcggtcctgcgcgtccgccgcaacaccgcgcaccgacgcgtcctcacggcgcggaaaaccgctgccgactttgctcgaaatgctgcgcaacaaattgggggaggcgtgagcacatgtgtaaaatatatacggcattacaccaatgtttggcatggcaacaatttcccgtcaggaaattcttggtctttcccgtccccggaaaatcgcatttgtcgggcaataatgcaaatacatacacataatccatttagaaaaatttgtaaaaaaagaggatttcaaaaaaaaaatccaaaaaagttttgaatggaaaagccgggggagagggtttgaatattgggattagggtcagaaatttgtcaagaattttagtagttttttcaatcgaattgtcaaaatttcccaaaattcactctctccttgaaaaaatgccaattcatccaaataaattgttggttagagttttaaggcacaaattccctagagtcctgaattgttgggagaaattcggaaaattaattttttttttttcataagttggggaattccaagacaaaaaaaaaactcagaggtccgccccgtacttcacttgaacacccttgtcaatgtcgatcacattgcgccaaaattccctttccacgcggtccggtgggacctcctgaatgggaaacggtacagaaatttaacaaaaaattaaaaaaacaggcaacttacgcgtggctcctg

SEQ ID NO: 14572 - DNA, 905 bp, Heterodera glycines
  unsure (1)..(905): unsure at all n locations
tcaggcgacaaaatttatgaattnagtggctaattaccgtcaaataattaattataaatgagctaattgattaaagactgacaaagacaatgaccaagcaactgtattttttagaaaatattctccattgcttaggtcattgttctggtgcaaattggtcactcaaaaaaggcgctgtctccccaaaatggacaattcgaattgtccggcgttgtccaatttggccaagtgttgcggacggagccctttcccttctttgtgactgataatccgttggccaactgttgtcccgagagggatttgctgctgctgcccttttccaggcatagtttggcttattctcctgatcaccttcatttactctttattcgtttgctaaattcactggaattttcccagcaattccctgtgcccttttcagcggcacaaccggcacttccaaaggcgtgatgatcagtcatgccaattggggaacaatgatgtccattgtggtggaccatttcggccggtacattcacccgcacatcgcaccgccgttccgcgcccgggacgaggccgaattgttgctgctgcccttcttccactgtttcggtttcactcagctgaacatggctttgctgaacgggtccaccggcgttgtgctcagcaaattcgagcagaattccttttgccgagtggtggagcagtacagggcaagagaaaaagcaaatgcaaaaaacaaaaaacaaaatttgaaatgccatccgtaacgccaaagaaaaaactggcagtcaacaaactcagggccttaattgcggaccataaacgtgccgtctaaacatggcgaagacgacagatcagtaaaccaattaagggagagattaacatttccccatttccttgtgccgtccattctccccctcccc

SEQ ID NO: 14573 - DNA, 1976 bp, Heterodera glycines
cgggtgagtgatcagtatctggctggttgtgggtgatcagaccgtaattcgttggtgtgctgatcataggtgacatcgtgttggtggacaagtacggcttcatcactgtggtggaccgactaaaagagctgatcaaagtgaacggattgcaagtgagcaaccactaatcagctgatcacctcacttttgcttctgcttatggtcgctccttctgagttggaggatttgcttctctcccaccccaaattgcaagactgtgccgtcattggcgtgccggacaaagtctccggcgaattgccacgggcatttgtcgtgccaaagaatggggcgaaagtgaacgaattggaaattcagcaatttgtcaaaggttgcggaattacaagctgatcaaaaagacgaacattagccaattcagaaagaatggcgtattataagcagctgaaaggcggtgttgaatttgtggcggaagtgccgaaaagcccagcggggaaaattctaaggagaattttgagagaaaaaatgacaaaaggaaacggacgacaaaaggccaaaatttgacctaattaaaccaattaaggacctaattaatacaatttgtcgtttcattttaataaaatggctgtttgccctttcattgtttgcttttgctttttttaacaacaattgccaattcgcttttttttctcccatttttcaaatttcgcccccccggcgaatttcacaaattcatttccgtcttctgtctccttatatatgcattgcgcaatgccactatttcctataatttatttgctttttcgtgctctccccccccccccccaatttccaattttaaggcattcattgcctttctttttcattgattttataaaattaaatcaatttgccatctttattttaaaggtgtatgcttatgacatttgattcaaatattctcttaaaatgcaatattcgatatataattgccctttaataattattttcattataagacactgatcactcattcgttttcattctgttcggtttcatttgatcactgatcagtcccatgcccttaagccttaaattctctttgcctgcgggcaatgcgcttcaaatgcaaaggcggccttttgctgctcacttttctcgtgggctttgccggcggcgatttggcccacaacccaatttataagccaggtaaaaaacgaaatgaacagcgaagagacaaacatttgctttttattcgcttccatttttgtttccgatttattttttcagataaaaatgacgcggttgtttttcatggacaaatttgggaggaaaacgaagtgaaagagtaccaaatggaggcggaagtgttggacgagcaacagccgataaaagaacctaaaataatttgggcgacggataaattgggcgacagacactttcggatgacttttaaattcgccggagggacgggcaaaaggcaaattgacaagctaaagttggaactgttcacaaggtaaagccaagggaaggcaaaagagtgccatggaaatttactgtttcagcagaacagtgacatcgttcagagaaaagaatggccgagttgaaaaggtgaaaaagaaaaagggagacactgaaaaatgagagtacggtaggagaagggacagacaaaccaaaggggtacggtggaggaggggaacggagagagagagagagagagatgggggaacaacggaaggatacggtaggaagatgagaaggggaccggcgggcgaccgaaatgggccaattccgtcacggccaattcagccccgtgtctatcatcattggggaggggggctaaaattgtaaaaaatcgaataattaaaaaataacttttcctctgctggaggtgacaaaaagccactttaggacatcaaacacactttccttctgcacaacgtcgactcgaacaaacatttcgcgttggatttggacagagaaaaagcgtggaccatttagga

SEQ ID NO: 14574 - DNA, 1012 bp, Heterodera glycines
  unsure (1)..(1012): unsure at all n locations
atcaaaatgatgcacacgggaaaaggtgggaaaggcaaagaaaggcacaaaaggcattgtgggttcagaactgtcggattacgaagtgttgagcaatggaaatggctttttcgagatcgaagtgtacggtgagcacaaagggacggtggaaatacgatatgtgagcgtttggggaggaggcgaaggcgaagacggcactttagggaaaagacgcgcagcacaccgaaggctttctggaagagttagacactctgtacaaagcggcctttcccgaccatcccgaacatgaccatttccacgggttgagcacaaaagcggaccaggaaaggcaccgcaaaatactgcacttgcactacaaggactacggaccgtacatgttcgtttatgtgagttgggcgacggaatagcagggcaaaactgactaaaatggacaaacaatactgtacatacagtatgttgttttgtaccatctttccaacttcttcagcacatttacgggctcgtgctcaaactggactccaaacaaattccccaagtgattatggacacggaacggtgcgccgactgcccttaccttcagttggaatacgcaagtgaccaggagcacgacgttcacaaggcaaaagggagggaagggagatgaatgcggatcaactggtgagctttaagcgattcaaagccgaaattgaccacaatttggacacgggagagttccgcataaccattcggaatgggtacggattggacccggagaggaagaggcgcatggacaagaactacgggaagctgaacatcatcgtggtcagctccacccttgtgaacggaacaagactgttcagacaattctgatgggggctaattaaagggggtgggaggcaatggcaatttgggaatgccaatgattggaagaagccttgagccaaattttgacgaatcccttaaccgaaacacacccgggttttccgctnaattgtatcgttgttgctgttcgttgttttcaggcggtgaataa

SEQ ID NO: 14575 - DNA, 1411 bp, Heterodera glycines
gtgaagatttaaatctttaatccattaaaatcatcttttaccgttttttgcagtttgttccttagtttccaatgtcaccgatatggccaaatttgtcgtcaaaaatggcacaagcattaataaagttagaaaattgaatttgttcattttctattaaaattaatgctctttaataacttaattattattttttactttccacattacgattaaactgattttttttttttttttactacgcatactctatcattccaacaaatcttattaagaactgaaccaaactcgaaaattttgcataaatttgatgccgaaaatgagagtattctgcagatttttcgaaagtaaaatttaagcaattttttcagaaatttctaaaagaaattttccaggcttttgggttttttgcattttttaaaatattaattgggacggtatgcttagcaaaaaaaaaactcggttttattaatctatttgaatgtaaaaagcattgcttaatttattaaacaatatatataattataatgaaaaaaaatgatttctaatggcctaaataaatatattccccaaatagctaatacaactgacatttacgtagaagctaaatgccatttttgggatgggggaggggggtgggcatgccaatatttgccatgtctttcacagtggatatatgatattgattgattatccatatgattagcataagcatacgaaatagctaaatttattttaaaaaatggtttcataaaaatgtgaagtaaataaagttttgtctagaaattttgttaatttttaagtcttaaaatgggtcggtcggtctatgaaaattaaaaatttgaaaatgaggccgaaagcagaaggctaagctaaaacaaaagagttctattgaaaagcttattattagggggccctagcttagacacaataaattcaaattaaacttttatatttttaaatatgtttgaagttatatagacacaaaaaatgttttgtacataaaaattgcatctctatttaaagggaaaaattcttattttttcggaatcagacacttaagtggtaggccgaatttcggaataagtaaaattatgtagaaaacgcaattccggactacgcaaattttttggctccggaaattaatataactggaattgagcatcttgcgaatccgcgaatttatgctagtagaaggcggaatttccggacccgttttgtggatttcgaaaatttattataaggcgggttgcgctttccggaattttgtgatagtagaaggcggaatttccgggtccgtatatagaggaagaaattgtggcttccggaaatatatgatagtagaaggcggaatttccggacccgtattgatagatccctggaaatttatgctagtagaaggcgaaatttccgc

SEQ ID NO: 14576 - DNA, 1911 bp, Heterodera glycines
tgtcattttgaattaccgcaaaaggaattgctcattggctcgattgagcatcttttaaaaaaaacaagaaataatacaaaaacaaagaaaatataaaaaaataaatgttttgtggtttgtccaattaaatgtattataaaaaatatttttaaatatttaaattgttttatataaatatggaggcgcaaatgtggaggcgcaaatgagcactgagcactcaccaagtcggctaaccatataatacacatttttattagttcttaacgtttttcaaatccatacatcgcttatcaattatttttaaatttaaaatatttatatatatatatatatttctttttaaaaattaatccacaaatgccgccacctcatccggtgttggcccagaaatgattgcaggcatcccagcaccaggtggagatacatttcgctgatgcttcatatcaaattcattgtcagagtcggctggttcggtaggggcaaaagagtcatcaaactaaataaattaacaaaactaagagcgtatttaaaataaaaatatattcaattttgaatgataaatatagaaaatatgtaaacaaaaatttaagaaaaactacggaataaaaattttaaaaaattaatttttcgttaaaaaatatttaatgtctataatttaaaaaaataaaattccttgttttcttctttttttttttgttagttgtaggtttgacatttgtagcggggtgtaacgaattcagagattttttgggccggaatttcggatgccagaaatttcttagactccagaatttttattatacatattttgccattttactttcattgacttttaatcttttgccatatgtattttaaaatgaattaaatataaaaattcatgaaataatgatatgtattcgcaccgagtcggtcctctgcacaccgcgtccgcgtcgtttgcttccgctgctgcttgcgccgctgcgctgcgacaccgccacgctgatttcgctgctgaagctgttccgggcgccgccggtgctcgtcgcttgtgtgtcactgtcgcgctcgttgtcaccgcagttgctgcacaccggcgttggcatgccggtgccgttcacttcaattgtcagatggttctcacgcacgtcgcacccgcggaaccagcgcaaagggtccgcacactgacgtatctccgccgcagtcatttgcatgctcaacagggccatgttgcgcagaaagttttgtcccgggtccgctgcgaatagcagacgcgtgcgcttctccagctcgtcattcagcgcgtcgaatcctgttaattgacgaggccgttagacaacaggacggttgtgggcgggggatatgagaggtacgattaccccacatttggccccggacatttgcaccctgaacatttgcgcccagacatttggccccggacatttgcgcctatgtccaaaattgggttcaaacttaagttttctccatccctgatagcctaaacagcatcatatatcaattaatcaaacagaagaatgaatgctccataaacttaagatacatccccctcccccaagaccctccacattagaaatttttaagggaagatggtatttttgtgctgaaaattttcaatttttacttatttgtaccccctccaagacctccattaccaaaatttcaaaaaatgtcgataaatttctccaacaatgcacaaaattagcatttttgatgaagatttttaaacaagcgcgtcgccaaaaaagtgaaggaaaaaaagctcgtcgcccgggggcgatctccccctcccccaagccgaaatcctgggaccgtcctgatagataagtggggatgggttcaaaaaaatccgcaattccggcctctaaaagtttgccagattcaatctggcaatgccttcaaacttttggc

SEQ ID NO: 14577 - DNA, 3154 bp, Heterodera glycines
  unsure (1)..(3154): unsure at all n locations
acaaagtgcttaaataaggacaaagcttacaaataagaacatttaaaatttgtaagatttgaaccctcaaaataaggacaaatcttacaaataaggacaaagggtaaccctggtttagtgtataaaaatccggtctctataatttattaaacccaatttaaaaataattatttgcaattaatatactgtgattcgggtttagccatgcgatttttgctaattatccctgctcaattatttcaggtacgcttcatttctgagctgaaaaagttgcaggagccgtcgctgatgaacagtgtgttagagaattttaccggtaattgtccaactacagtaatcacacagtgttttttaaggtcatgaaatgtttgcgaaattgagcgaattttctgtttacaaaaaagttcttgctgaaaatcaaatctttgttttacctctctttgaaatttacttaatatgacattgtttttatttttatttcaactaaaggtttttcaattttctgttgttctaaatttctcatttttaattaatattttctatattttataaatatttaatttaaattgttttaaaaaaatttttaattaaaaaaaaattcagttcttcaaattgtcactgataaacaaagcaacgacacattgatggtcatcgcgttcatgttcggaatacgagaggagtaagcttgtttaaaagtttgatttcaaaaaaatttacagtatcgttttagtcaactcaattacagtttccttacggtgtcactaaaacatgggtgggggaacgtattccagcttttttagcgcaagaatttcatgattttttctccagaaatttttttattgtaaaatatgtaaaattctcgggtctcaaaaattttaaaaattagaaatatttgcactttttaattaagtgctaacattcgcgacgacggtgaaggagacgatgaaatattcaccaacatttatcggataacagaatagggcttctcactgatcaccacattcactgaccagatcagactggacaaccaaaacaggagaaggaggagcaattgggctgctgttggtcagtaaattttttcgcctgtggtaataattgtgtcgagactgacgagattcgtcctccaaaaaacaactgactaaacaattaactactctgcttgctcatcgagattgtcgaacccaacacaaaattgggacacattgtcaaaatttacatgatattttttctttcgtgcctgtgtttttacattgaagaagaccggatagggtagatcagtagcagcatccttattttgggatttgcgactttaaagtcatttgcccaacatttggcggcacagattttgatccgccattttcggtttaattcgccgtttccatccaatttcaaatgtttccattaagccacccatatacatagaaacgatgttggcattaataaatgaaccggaacaatcccggtcaaaaattcttgatctgtgaaaccaagcgaggtggttacaagtcgaattagagccctcctccagaaaaaatatggatggcaataaaaatgtataaaaaaaacggctggactcgcctattccggtctttatgtataacccatatcctcatcctcctctacagctaattatgtgtatggaactccatcaattagtgctagtaattcaattcaattcattttgttctttgctccgggtgtgtacgcggggggttttgatgttgttcgaaatttattcaaatttctcgagccaaaaaattgttttttggccgattctcgagcatcattaacgaatttttgtgtggagatgcctctcccttttttatatgcatttgcctttttgtgttgtttcattattactattattattaattttattttttattctctcagttcaaaaatttcatgcattcgctctcagtccacttttttttcttctctttcttccaaaatgttgtgtaaaaagtgccattttttgtatcatcattttttttattaattattattactttttaattatttttattattttcaaatccatttcaacatttcgtgctgctcttttcattcatattttctttttttcatatgattattttctgcgaactctaatcctcaacaccattttaattttataaattaaataatttaaaaataaatttaaattaaatggaaattgcaaaaaattattattttttatttaaatcataaaaatattagtaactcctaatgagcaacaatatgaacaaacaggtgagaaaaatcaaattgggacaaaacaataagaatccctttgtggttgcggaattgggcgaattgctattgcaacgatcacctaaattttaaatattttactgatcaatttgttcaaaaacaaataacatatagaagagggttccatgcgtccaaactttgtttgtttgtttttttcgtttttgggctcttaaatttcagcataaaaatagaattctatttttattttagtgagggttgtttccattagtgagttttttaattcaattaatttggtacagtaatggattgacaatttttaagccagacaggtggcaaagcgggtcgtttccgtctgattgtgagccaattttttcgggtcaaacttttttccaaattggccaattttcacaaatttaaagctctcaattagagccattaaaaatgaaaactaaaaaaaaagttattaaaaagaacaattcaccaatataataatgccaaattttatggaccaaaaaatttggcttacaatcagaacagacggaaggaaggaactgattgacccacaccaccggcggcgggtggccccggttccacgaccctccggtaaagttacaataccaattattttcataccataacatgtgcacaactgcaagtccccggtgatcgcaatttcgagttgtcttggttggttgaagagcctctcgcgaggcaaatgtcggcatttgtccacctgtttttttttaaattttcctgacaagtttccatttccacataaacaacacctggtttagccggtagatttgggcggccgtttggttaaagccatgtcgcagaattcgatccccacagcctcgaatatacttaaagcccacaaaaatgcctttcaaaatttaaatttttacaagaccnntgcagg

SEQ ID NO: 14578 - DNA, 2118 bp, Heterodera glycines
  unsure (1)..(2118): unsure at all n locations
atgcactcaacttcgaaattcaattggagaatgttcaaaaagatgccaagacgatggatatcttcgtcgacgatgtgcgcgaagcactcattgcatgggcagatttactgcgcaagctgcctgcattggaacgcgatccggcagaagcagaattcaacaaattctagaaaaaagagaatcaacgacaaagtcaacgaagcagcactgaaactgtgcgacctaatcggcacaaaacattagagcatccatttccaccggattacggtagccccccatatctatgggaggggtgcaggccaactgagcgccagccatttgagcgccgccaagtgagcgcgggccttttcagtacagaaaccaaaacctattgcatgttttttttgcgaccccgtacctattacaggggtcgcgacttttaagtaaaagaaaatccgaatttttaaagaaaaaccgaaaaatattattataaatacaagtgcttactaaataatgaacatcttgcgaatggacaataaattaaaaggaactttgcataactatcaaaaataaagacgctgtaattaaattggcaatattcttcctatttggtcgaatgcatccattaaaagacggaaattgatgaaccacagagatattaactttgacaaataattttataagatcaataactattaaaaaggcaataaaaataaagataaaagtcattagaacaaaaattgaaacgggaaaaaagcaacaaaagaaaaggaatggacaaatttaaaaaatacacaatgtttatttttgaccccaaatgctgattttattattgtccaattgctgattttgaaattttgcagttcaaaaacaagtgtataagtttcaaatttaatttgtacctaatcgataaatattaaaaacgttgttttccttgctgaaaactttctgaatttggaataaatccacgagagctcaatttgtcaactcccaaccccgaaaattgttatatgtgcaaaaagaatttttgttaaatagtttgaattttcgaacttaaacatcaaatgatagttcggtattttaactaaatttttattaaacattttgaagttatattagggaggaagtgtttaaataatgacatttattttagtgccgtaatcgtgtgcatatatttatatatatcatttcttctatattttttgtaaagtgatacgaatagttatagaattgaattattaaatttttttacatttacttacagtgatggtatgtacttattcaaatttcttcattaggttttatttccaagaatatttaattcattcatttcttttccttaataactcaaaactaaggcttttttgttttgtggtataaattaaattaaatcgaatattaaattaaaattttttaaatattttctcagttttattcaactttttttcttgttcatgtgaaaatattgagatataaattgtgtgattaattttctttaatattttatccgtcaaaaataaataattgtatctcttcataaacttttatttaatgttgctattgtatttctttaggttatcattattttattcttgaaatttttcaaatttcttcttaatttagtgttctctcaatacattctttgccctttaatttcagtggtgataggattttatttgttcaaaaaataaatttgtccctagtatcatggaaattctgacgaactaatcagccctgttttcaaattaatggtaccaattttacgaatttgtttaaattgctattaaactaattcaatgctgatattttatacggtttaaattttattataattttcaacaatatttaactaggtaatattgagtgagcggaaagtctttacatagttgtcaaatgagaatatcttcgacatttaattattttttttttttgcttctattttgagttcagcggtaccgataaatttcactttaaccgttaccggtactataaaaacgttaattttcttaggtctatttttgtacaattgagcacctttttaacataattttaaaggcacgcttcttttttttaaacttcttnggaggagcgaactccggcgcgtgatgcgacatttacggcgcccagtcaaagcgacttttg

SEQ ID NO: 14579 - DNA, 1848 bp, Heterodera glycines
gcataagccatgagaaatttcacgcattaattatgtctcacgtgataaaatgttggcgccgcaaaagtcggcgccgaacttgtcgattttttaaatttgctttatttagattaagtgtttaaaatttacttacctgtaaatattttcaacttgatcttcgtccctggatgatttgttgttgttcaaattaaatttaaaaacacaaatacataggagaatttgaaaatttaaaatacttgtaataagaaattttgttagcgtattaatgataaaattgatctataaaaaaattttcattatagcagagaaaagaattatttattatttaagtttaaaatttattattacgattttgttgttagattaatatatttaaggggaatttactatgataaatttataatttatttgatttttaatgtaattttaatacagaaaattatttaataaacagatcaataaattcaaaattttaaattacctttttcaaaatttataatataagttaattttcatgaaaatttgttagtttgtattgaaatgcatttatgttatatttaaacccaaaaatttacgaggacaaccagaaaaaaaagtcagaagaagaacgaggaattttatttagtgaaattttattatttaaaaaataaattaaataaagaattaacagaaataaacaataaattgattagaaaacaaaaataaacaattcacaaaaaaacgtttttgtaatgcagtaattttccaattatttcttttaaatattatttaattgtatttttattaaatagaggaaaaaataaaaatatcaattaaatccttattaattatgctataatatataattttaattaagatttactaaaccaaagaaaataataaaatattgaaggattaaaatattttattttatttgataagatgtcaaaacgaaattccataattgatagatcatgaaataatcacataagtgaaaatatgaagaataaagaaatattattaaacaattttgtgactgaaatataaattgaaaagcaaaaaaaaaaaaacttaaaatgcattgatataaattgatatatttttttatctgttgttaaaattatttttacaagagcaataaaatatataataatattaaatttattttaaaatgttctattacttaattatattttgaaattaattttgattcaaaaattattaaatttaaattaaaaaataaacacatttcaatatttacttgcatataattcatttaaaaagtttaatttacacaaaattatttaagtaataaatgcatctgttaaataatttaaattctaatgaaattatgaacaatctttttctaaaatttgtacctaattttatttatccatttatttattatttcagaaattagaaagcaacaacaattgaaattttactgaattttgaaagttctcattttttctttttcgataattaatttttataatttaaaaatttttatgcatgcaatatttaatgatattttagtataatttcaatgatatatttaaggcctttatgattgttttatcttcctatttaaagagataaagcaccttaggataacagaatttagcagaaatattttcctttatttttttctgtttttcatcctttagttttttctacaaaatatacaattaataattatgaatataaaattttctatattctttaattaggatttttgtctttaaattaataaacttattaaatattttaattgaattatttaaataaggcttataaattatttagaaattaatgttctagtcctttaacgacaaattttgttttttctgaatattatgagattgcatt

SEQ ID NO: 14580 - DNA, 3106 bp, Heterodera glycines
  unsure (1)..(3106): unsure at all n locations
aaaaggaggaagaggggagacgacgagagggaggagcgagtgggggaagcacaacaaaacacagccaacgccaattctacacacttaaaaatttattcattcattcattattgaagcaccagccagccagcccttttatgggcaaatgatgatgaacttggcacaataatacacccaattggcaattaagttaggccatttcaagtgagcaaaagtgaagttggcgactgacttggccattttatcaagtgaccaaaagtgaagtcatggccaaatgccaagagcggtgatttaatgggggcaaaaaaaatggagaccatttttgttcgataaatttattcgattttgacaaaaaaaaagggtaaaccgtaaaggataggatatttttcaagaatttacacatttctagagtttttaacaaaaataatttgaaggaatttttaaacaatcggcagatgtcatagaaaaagctctctcttccaagttgaacgcattttatgtatgctgattagccaaaggagaccagaacaattcacatgaattttcaaatggatcaaagccacttgtcctgcagctaattaacgactctgccgaccaccaattagcctcacaaattaacacttacagcagacccctgctgccctcccttttccccattttttaatcaacagagcagcaccagcagacgcgcagaacgcaccggggcgaataaatagagcacccattcggaaccgaccagcagcaaacacagcatgactcaactaccaccgtggtgagtcgaagtgtcaaaagtatcgatgtgggcgaagtgtcaaaagtatcgatgatgggtgatcgaaagaggcgggtcatttcagtacagaaaattaatttaaataattaaattaaattcatttataattgaataacaatcttttaataataaatatatttgtctctattttagtatacacgacccttcaaaaaaacgagaccatcaaataatttgacaaatttaatgcaatccaacttttttacaagcatctaaattaagcatacatggtatcatttgatagccctaagtgtcctctattttcctgtaaaatttcaaacgatttggttgagcttcaaagaagttgtagccaaaaatatttaaggaattttaagcgcagcttgggtcgtttatttaaggatgaaatcacagcctaatttaagaataattttagttttttttttaataattaaagtgccaaaactttccggtgcccaatctttccactgtgaatccttaaatgtcgcccattgtcttgcaccagtttttttgtaaatatttttggtcccactgatttaaatttatataatttagagcacatttaattctctataacgaacctaattattaacttttaatggagcatggatatttcggcacgttgttcttaataccaatataatgcctgtttttagttaaactcatgaaatcaaattacattaaaggattttatacatggattataattttatataaattaataaagccttcattttttgctgacgtaagttgcttttgccacttttgcaaatgtcacatgatgttccatgcaaaattggcagttctttctttttacaaatatcattttgaaaataaaattattatttttattatttttctttaaaaatgattcaaaatgcttttattttttcttttatttgctttttcaacaaaatattttttgccgaaaatgtcaaaccggccatcaatctgatcaaatattcggctatcatttctccgccgggtttttataaaattgcaatttgggacagatttgaaaagaaaaaagcacaacaatgcaaaaatctttttgaagaagttgaacaagaagtaagaaattaaaagcatttttataaatattcaattttggctaactttgccctgaaactttgagagtgatttttcattatgccaatattctgccaattcgggaatagtaattcataaattaaatattaaatattttaaatgaaaaattctttcagtaattttcaaagtttcaatttcaaaaaacgattattttcaaaatattttctttttttcatgggccaattgtccgaattttgaaattttgtgctttttctcccaatttaattgtctaaatttttacttttaatagttcaatggtaaatttcatgctgttcgtcgcttcaagtattatgatggcattgaattagaatattttgctgaatgttttgaaaactttttcattgctcagaccaatgaagacggtgaatttgatgtgaatttaaggggtaacattggagaaacaatctttttccaaatatttccactctataataataaggtaattaattagaaaatattaaatgtaattaaaatatgacattgatactaatattcaaaacatatttatagctaaacgaagtgaaatttgcatattttgttaatttctttaaattaaattttcattaattccttcttcaggctccaatccgttccgattctttcccctccacttttctccaaagcatacacagaaaacccgattggaggttatgtgtgcattttgagcaacatttttattttctaattcataaggaaaaaaagactaaaatcggcacaatgttggacaattggcagagaagtgccaatgccaacccatcggatgaagaagcctttttcctcaaggcatgtttacaggaaatagcgtcaagaattgttgacacattcaccaagggcatcaagctgaccaataatgaaatcagcatccagcgcaaatattggagtgcatttcaacagatgaaagggcatggaattttggccggaaaattggcacaaattgatggaatgccaaagttaatgaaagatttatgcagatttacggttgctgattatgaggcgaactccgccgatggattcgaatttaatgacaaattatttgccttggctttcttttgtgncgaattataaaaaatggcaatgaaaacatgagagcatattggagagaaatgagcttgtgaagttngaaaaaagtggagaggaaaatgaacaaatgtagacttatttattgtatcacttnttattttttngtggaatgggattaattagttt

SEQ ID NO: 14581 - DNA, 1338 bp, Heterodera glycines
gaaaaagcgtgaagcgtatatgaaatatgcccaagatggtgtgccgctgaaagattttgccggattttggacgcttggcatggacatagtgccatgggatgaagatattttgcgactgttcatcattcgtgattgcaaatgcaccatggaagcatgggtaggcaaaaaagccgaataatttgtagaagcattcgtgtcgtatcactcataagtcaaccaaattaggtgttgttaataagcatatccaccaaagatccggcaatatttgctaacggaaaaccaaaatatattcaaaaagttttgcccaaaattttcatatttcttagttctagagtgctgctggtgatgccaaagcattgatggcaaaattatttttttgtttttcaaaaaattaaatgtaatttaattaatttgagtattatgtatacttcatgaaaaaaatataattttttgattatttgtacaaaaagtttatccgaccgtcggattctgagcccgaagagcccgaaataccgacgcaagggccttacggttgccatgaggaaaaggaaaaacaaaaagccatcgatctgcgcgacaaaattaaagctgagaaaatgatatacatacgccttttgaccagcgcaagaactgaacacatcagattaacactgcttggaaatgacgcgggtaaatgaaaattggcacttttgtggaactttttttaaaatcagagggcgtttcttacataaagaaatcgcgaattttttaattataaaattttgaaattatatatgtataaatataacgaatactctattccctcaaacaaattcaagaatataaaatttgttataaaagatttttatcggaaatttacgcccgggagtctgaggggccagggggaatgatttttttaaatacgtcacttttatttggagcaccgataaaaatgtaaactggaaacttttcttatcaagggatgtcgctttaagaaggtcttaactgaattcgtggtgttattgggggtccatgatcaccgatctgaaatttcggaaccttcttgatcacggattccagaccctaaatacactgggggtggaatattattgttaatttttaaaaatgctgatttttcttttatataaaaagattttcaaaataaatttgtttttgtgtcttgtgaaataattttttatctttataattgtaacttacctaacaaataagctatttttgttattttatttttttgaaaattatgagtttttcaacaccccgtttcttcaagataaatttgggccgctgatgaaattcagttatgttcgcaaggaaagcaatacgccatgaatcagaagt

SEQ ID NO: 14582 - DNA, 1275 bp, Heterodera glycines
agttgtttgccgttgttgcgacggcccagcaaaaggactggttgcacttgcgttgcttcacagaaaaggacaaccgcatgttgggcaagttcggcagagaaaaattgctgctccgcaaacctaagacaaaaataattaatgattgtcggttactaatggattcgagttttttaaactgacttaagttttcagagtcgcgctacttcgaccatttacaattttagagaaataaaaaaatctaaatattgcacacactgataagccactcccctgtggagtgcctttgcctttattactcattgataaggccgtgtgcttctgacggtgggatcaagtggaagtcaatggccgaagtgccgccaacttcaatgagttcatggccagaatcgaagcgtgatttgttcgctgcagccaccgcgtccaacttttcgatggacaaaaatgtcactttgagcgggtcaccaacgagcgtgcaatcggacggcaaattctccttgttttcatcgcacaattcgtcgtcctccactttggctgtcattgccatggcacgaaagcgttcgtacgctttggcagccgtcgcttcatatccctaagatgggaaaattatacaaattcaattgaagcgtgatcacggtggaatttaaacgggatttggagagggggagggggctaaaaaactcggtcggtaaaacggtgtctttgcgtcccggtactcccaccccggccacatttccaactctcggtcacatttttcccaaaattcatgaaggcaaaagtatttccatgattgctgttgttgttattgcattttatgtgcctatttgagttttgtgagtccaatgaaaattttgtttcccggggtgggggtccccctgaatgaccaccaccaatcattgggaagtctcataaaaatgaaagcaatgtgtagggtaacacatccaacaaacttcagcctccggcaaatcaatgacgatcactttgccacgcaatgtaatgttcataacaaagcgggaccaattccgaatcaatcagccgaactctgtagcgacccttctaaaataccaatgttttagtgaaaaccttttgaaaagcattttataccaaaagcgtaacatcatcagcattagtcaattgtgcaatatttatcattttattgtttctgaaaaagaaaaatgaagcaagaaaacaattagagaatctgtctctgttacaataatttacgcgttcaatcaatgacttttgtctgtctttgacccagaattaatggtactagtt

SEQ ID NO: 14583 - DNA, 1127 bp, Heterodera glycines
atcatcgcacgacgcttcacctggtcaatcatgcgctgcaccaatcccaatccttcctgttcagttaggtctaaaaatcaaataaaataacgccatcaatataaatttaaaaaataaacctgtacggtagaaactgtccatgatggagtaagcaaatgcaccaggaaagccgtagaagatgaaattctaaaaatgtgaaattttctaccacaaaaaactccgtagtttgaaaggggtttctacttggggaggaatatttgtcgcaagataatcaatcatggtgagatacgctttcttgtccgttgaatcaaagccgccgatgattgcattgacgcgccacatgtcctccgagcgcaaattgtctgccatgttttttcgcagccaatggtgcacctccttgggccgtaattcataacctatgtgatcaatcagaagttattaaagccgatgaatggaaggttctagtcggttttatgcgtcacatgacagattatgcgtcccatgaatgaccatacccagtttcttaggcataacttttttcttacttggtcaatacctatattcttggtattaaacaaaagcttaaggtctatagaagcttttgtataactttatttttagctaaatgcaatagacaaaaaaattatgctcggaaaagctgaatttcgtttttttcattgtaatttcttttttaatgccagtatttgctcttttcttgcatttataaaatctcgagacttttgtctttcgcttggtatatgacatgggacgcataaaaccgactagaaccaatttttttttcatttctacgtagtatcaggggggcttttcgggccgactcgttgtcactattttttgatgcaataaaaaccctagaaatcctgcgaaaggctttttgtccaaaaaattggatgaaacaaaaaaatgtacaccatttcgacgactgtacagctcgcagtttgcctttgcccagtttgcgaacgagtccacgtcaccggcctcgccaaagcacaccatggaagtcaaagggcccaacttgtactctttttggtgtgcttaacaagtggagaaatagaaatcaataaacaaaacaatttctttaatcaacccatgggttattattattg

SEQ ID NO: 14584 - DNA, 904 bp, Heterodera glycines
ttttgatgtgcagtccgttcggcaatgcaccattggtgcccaaatcctgcaagttttgcagaccacccatgcactggtaatctcacgcatccgatcagcacgataattgaaaaagaccaatgtgtcattgtctgaaattgtaaattgtgattgaaaatgaatgactaacaataagcatctttagagccggtacagcaaaaaggctgagcacaaaaaaaaatttttttttcggcgttttgcttttttgggtggagggagcaatatttattttctaaaaaattggtatacccttttgggtttatttatttatttcctatttatttttgaaaatagtacaattacatattttcatggtcgttgatcatgaatatgttcgttttttcaaacaaataattctccatattattttttgcttgaaaaaaatctaccccccccccaaaattccaaatggataaaaacagcaatttttcatacctttcacacgcgcttcgtccgaaaacacgatgggcgtcaggaattcgtcagtctgttggtttgcgtagcgctcgttcaccaattgtacagcattcgccggttcgcacttttcgccctctccggcaaccaatgcctcgtaggcaaccttaaggaaaaatgcaagtccaaaaacgatgtttttttcgaaaatgagtgccttaattcgctcccatcggttgtcacggtccatggcataataacgaccaacaatggttgccaattcgccatagttttcggcacttaagaagtcaagcagttgttgcaagaagccggctaaaaatgcgggagtataaataaaaacagatttgtaaaatgagtttatttaacctccactggttggcgatgtatcacggccgtcgccaaaaaagtggacaaaaacttggagcacttt

SEQ ID NO: 14585 - DNA, 3200 bp, Heterodera glycines
tattattttcaaatatgggacccgaccccaaaacctgctgctgggaaaacacaaattgcggattggcctttgaaataagttgcaagagtcggtaacaagaagaatccgctaagctgttgttgaaccataaacaacacaaagttgccgatagcgcattagtgagcaacgacataaaattggtggaagactgatcagtggaagaaccatcggccttaaaaacaataatctgttaaaaatagcccacaaaacataactgtctcttccgaatgattgcaaacaaaaaatttgacaaattgttcacaagaagccaaacattgaatgatagcactgaagtaacaagtgtttccgtggttgatcagtccttaattcacacattcattttctttctcgtcaaatacgctcacctttaagacaaggaacttgtgaactccgagaatgttgtttcagcattaactccccatcattagcagcggatttttctctgaatgaatgctgtgcatcactcgtcgttggccgtggttgtaagggctttaacgaattatgcattggtcgagaaaaaggcgaaggcgttggaggaagcgtcgacgtggaaaatttcgtcgacgttgagccaatcttggtaggaaattgatacattgatgcagacggaagccttggacgtatgtcggaagtcgaaatatccgagaaacgttgcatcagttcagcgaactgtggtggttcatccgactcgcaatcagtacttgtcaccccgtttttgcgcctgtcgtgattaaattgagaagacggcatgttatttgtggctggtattggtgcataatcagttgtccctccatttcggtaactgaacgactgacgccgtgggaaagcggacgaaatgattgaattagaacgacgacgctcataaggatctgacgatgaagacgaggaagggagtccaccattaacctaaaggcaataaaaggcacttcaaacgcaacgcaaatttcacagcagaaactgcacttaacaaaacgaacatttagcgttgaggaaaagcgtttgctgtcaatcggctcgacggaataatcccttttatgtgtgggattagagaagccaagatgcttcttaaagaaagaacgtaatatttttaaggccgatgtcttgttctttctcgcctcgtcagcattaatctgtaccggaataactcggcctccgttctgttgctggtaatcaaaaaaaccttctagaaaaaaacaaaaatggaatggttatcttttgaatgatattttaatagtaatggatcgaccttttaaccgttgtccataagtcgatttggtgtcgtacccatcaatttttccagaatatgacgaggaataatttcttggtggcactgatggagatctcccagatgttcttctctaaattaattttaaattttataacaaaaatattttcccactctgttctccaaaaatttgttagacaacgaaggctggacagaatttgagtccgagtaacaattaacagagtttgcggtgccattagatccattaatcctcgtcgataatggtggtgaaaaatgtgtattcgtcctgggatttttattatcatcagagtcgttttttggaaatttctcaagagtatatgcaagaggtcgacgatatggcgaaggaagacgttgctttctcaagaatttgtcgacttcattggattgaataagataaggacgaacactgcgacttcttggctccatgatggcacctcattcaaatagcaccagcagaaaatcataaaacaaacattcacagaaaaacactgaaataaaattaaacatttttcatgtttattattacgataagaaaagggactataaaaaacgcaaaggaatctccaaaaatgcgggggaggaaacggagacaaagaaagaatattgattgattatggaggaaggactaaagagattagagtgtggaaagtgattgatgtgatgcgactgatgagcaaaactatttccaagcacgaatacacatagagatgggaaagatggaaagcatggcagaaaaatgagtgaaggagagggggataaaaataaattcaccaattgcagttgaaaacttgggtaatcaacggacaaacagccaaataatttggaaaatatgatttgaaaatctggccatatgcattttttttttttggttccccaggtggaatttagaattttaaaagcttaatatgcattatgtacatattttttgggtcaaaagtagagttgagcgggaccgggacatggacacggacaactaagtacaactgagtaccaaggtcccggttttgaccagttttgaccgggaccgggaaattcccggcttttttcccggttttcccagccaaaaagtcccggttttcctcccaaaaagtcccggtcccggtcttgcccaaatttcccggtcccgctcaactctagtcaaaaggtcgggatgtaaaaatctctgtttcgagaccaagactatcgagctgcagaagtggaccgatcttgtcgagtcttgctgtgtttctttagattgtaaaccaaaaaatggccccatggcacgccctgttagagaaatatgagcgcgcattggccacaatggaatccgaggaacgcgaactgagccgaattaagcaggcaaatggaggggggaagtaaagcttacaataatgaaagcattcacaggtctgaggcctatgtgagcccaatatggcatactcaaacacaaaaatttatccctaaaaaaaagttttggccaaatgaccccggagcatttaattgtaatgaaattggatttaaagttgcagataattgagaagaaaattgagatgcaccaaaagaagttgaagaagctgatgctgaaggtggtcggaaacgcaacttttgtgagcaaaaagcgcaattagcgtaattaattgctaacttatgcattccttttgagcaggagtgcaaattccgttgaaagtggtggatgataatgaaggaagcggactcatcttaatcatttaatttatttatttcatttttattatattttcttcattttgtttttcaatgattgcaaaaatgacaaaaaataataatccatttttctgaaaatacactgtcaggccatagaaaagtttggttttaaatatcatccatccatcataagatagaagaagtgctacattaaaactttttaaaaccaaat

SEQ ID NO: 14586 - DNA, 3581 bp, Heterodera glycines
agaaaaaagttattccagaagttctggaaattctcgatttttcagaaaaaaatttgtagctgccttctgaaaaactattcgggaaaagtaaaatactacaaaaatccgcaatttttttctctataatataaattttattttacatttttatcacatttttaaaaaaagatataaaaataaaactgattttgtgattcggggccgaagggggtggacaggatttttgagtggaaaattttttttcacaaaattcttccaaaaatatgtctttaggggttatttgggccgctgatcacgaatacgtaatcagattttacttttgacatcgttaagacctcagaatccctgtgtgattggggattctgaggcatcattttgaggggggggcaggttcgaatccggacggtgtaacattatttttttgtgcatttttacgttattttcaatgattttaattaatttaaaatattttgttgagttaataaataaaaaattatatttaatttaatttttttttgataaataaattttataagtttaaatttcacagttgtacctctttgatcactgttgtacctcttttaatcacagttgtacctcttctgatctctgttgtacctcttctaatcacttttgtacctcttttaatcacagttgtacctcttcatcacatttgtacctcttcaatctctgttgcacctcttctaatcactgttgtacctcttttatcacttttgtacctcttcatcacatttgtacctcttctattcactgttgcacctcttctaatcacttttctatcactttttcactgttgtacctcttctattcactgttgtacctcttcaaatcactgttgtgtctttcccttccgtggttgcacttgtacctcttctcatctctgttgtacctcttctcatctctgttgtacctcttctaatcacttttgtatctgttctaaaatttaaaaaacggcgcgaagcggccgttcgaggccgcaaattggcctaaaaaggccacaaaaagggtgcgaatcgcccgtctgagtccatcaaaatttaataacgggcgcgaagcgcccgtccgactcaacacaatttaaaaaacggccgcgaagcggccgaaaagcacaacaaaaattagaaacgggcgcgaagcgcccgtctgaggccgcgaagcagcctaaaaatcaccgaatttaaaaaacgggtgcgtagcgcccgtctgaggccgcgaagcggcctaaaaatcgctgataattttttaaaaattccaaatcttttcacaacccgatagctaatctaggagcgaagctcaagaagcgcgaagcgctttatcccagctaaatagccgacggttcacgcacccgctagtttttcccttatagagtgaaccaggggcccagtgaaagcgccggggccgctttcaacaccggggccagcatacatataaagcattcctaatggtggtgattttcccgaattcgcaaaaaaaaattcacttagattctaagcctgtacgaaaatgccaagcaccgatcttgagtccggcattatagatcttgccaatttgcacgtaggtgatctctacacatataaacaatatttcctagcgtgttagttttcaaaaattcgctcaaaaacctccctgaatccctgcatagcccactgagccggattcagaaaaacagggcagaaaacatgcacatttttaataagcctgatatccctttttcgactacttcccgaacccggaccctaatctatcctatatcattttaaagagcagagtctgtagatgtgcagaataccatttgtttttcgattcgatcaattctaacgcacactcaagccctagatttcccttataaggagaacaccacactttacatccctgccacccctcccggccctcggaccaattcgcaccggttgtgatcctgcaaaaatcgttaagaaaatactgaaaattgtttttatttttatataaagttttacgcgctttttaatttgaccattttttcaaataggtaaataatttaaaccattttttcaaataatctttttttctatttaaattacaaatgtaattaaatcgattcattatctaataccaatatgatgtttcttacgtcatattatattaataaaaaatttgtatgaataatataatttatgaaaaatgaaaaatgattattttagtattatacaaaacgcgaattataggattacaatttttcttgataatttgcattaaatcattttcataaatttatttcccattaattttttttatagaaaaatgaaaacgaaaattttctatatttttttgtcattgcttttgctattctctctgatacaacgaaatgagtcgacaaacccaaagcatttgaaatttgttggaagaaatgggaaatcagtcgaaaatgggcatgaacagaaagaacaaagtcaaaaaattggtaattaattatgggtaattagcgggtggaaggaattcaaattttattaaaaacccacaagaaaaatgaataaatttaataaaaaaaatttataaaaagttaaaacattgttcctatatttgtgttcaaaaaagaaaagattattttattattcaccggagttcactcaaagtttaataatcgttttaaattttaaattatgcaaaaaagaaaatttaaaaaccaattattttaatgccttttcagaggatccatcaaattctgatgacgccatcgttgatgctaatgagcaagttgaggcgaataatgaagaaatgaaaaagaacagaaaaggaaaggtagcgaaatttgtttaaaatatttacattttaaattttaatttaggcaattattgaaatgataatgtcgcctaaattttcgaaaattgttggaagaaaaggaaaacctatcgaaccaccacaaacaaaagatgttgatgaacaaagagttaaaaagggtaaaatatttaagtataaataatttttgatattaaatccataattatcacaaataaaattgcatttttaccaggaacgaaaataaaaataaaaacaataatttttagaaagaattaaacaaaatgttgcttcatctcctaagagattagaaaaaagtcatgaagaaagcggcgacaaaaaggagaacagagtaaataaggctcgaagaaaaaattaaaattttaaaatttaggcaattcataaagaaattatttcacctaaaattttgaatgttttaaaattgaaagggaaatcaaaacattcacaggagcagcagacagatcaaaatcagaagaaaagtaattgaattaatattattatgagaaaaaggcatagtttctgatctatttagttagcgatgatataattaataataataacttaattatagtatatttattaataaatagacactaaaatatttcagaaggaattgttgaacaaaatgatattgccgaattattttatttaaaaaggaattgttgaacaaaatgatattgccgaagcgttgaaaagtccaaaaaaccaaagtgaatttttgagagcacctgataatcattccgacaaaagtcatcttatgagaa

SEQ ID NO: 14587 - DNA, 3186 bp, Heterodera glycines
aattattttttgcaatgcataaatatggcttatttttaaaatttgcatttcttaaaatttttttagggcgtgtcattcatcgaatggcccaccgaagcgctggcccaaaaagaagtggggacagacagaattaagtttattatttccattggaatattttatgtttaagatcaatgatctgtacccattaacacgggatacaaaggtaattgttttaatattaattgtattttatgattattagggatggaaaaaatgcttataaattttatgaggtttgaaaaagctggtttcttatatttacgttttaaaaacacacgaatatttgtttgtaaaaaaaactttaaaaaaatctgctttcaaacttcttgaaatttgtgcatataatggaatttccaaatgatcagattatgcttggcccaatgtggcctgattaccattgtggctttcctgatttcttggaccctttgccgaacaccacagattggtgggtggacgaatttgtgcgtttccacaatgaagtaagttttttaattaactaattaaatgttttttaattttacatttttatcattttattccaacattatttaacattcattaaattttctgaaaaataaattaaggtacaatttgatggaatttggattgatatgaacgaaccgtaaggaaatcaaattaaaatgaagaattcaaaaataaatttgttttaattgaaaaaagtacataaatttattacatagaaattttttaaattttgcatatttttcaagctccgtctttggcacaaatgagaaacatccatggtactttgacacgcaacctgcatttgccggcaagccaccaattgcgccgctgatgtgccaagagccgaacaacaaattggactacccaccgtatcgcacatggaatgcatacaaatgggactcgaagaatacggtaagtagagaatttgcctgacttgaaccaaaatatgatccacctttgggttgcctcaaaaattttggtcctttgatggagatttttcttgattttttttgagtctaactcaattaatttgtttttcttatctcatagcaaaaatttagtttggacactcaaaagatggcaatattttattttattttttaatctcgttagtgagctctaatggtgtaatttagaaaatgcaaaattttatttcattattaattttatttatttatacaatttgcttttatgaattttttaaggatttttaatttaacttggcatattttgtattcaccctaaaataatgtcaataagttttagattagaagctttttttaaaaaaactcaatgttgttaataaattttttagaagagaacgctgaacgaaaaaacattatgcatgattggaaaaagtgggcgccgcaactggacaatgtacgatacggtaaatgatcaaattaataattaatattttaatttttaattatttcttaattggtccagcattctctctacggctggtcagaaatggtcgccacacaaaaagcgttgcgcgtctcaactggcaaacgcggctcactcacttctcgttcaacatttccagtatgcactggaaaataattaaacacattaatataggatatattttgcagatatgtctttttgctaatttcctatttgtaaaacgcacgaaaaacaatttttttaaatttcaaatgctagcttttttgttcttgcattttgaaattttggtcactaatgcccggtctggattttctgaaagtttcttaatataacgtataaaatgaaaatacccctaaaaattttgcaaaaaatactctcttaaaagtgaccttgaaaaaaatatatatttttttaaacacacccgttaaaaactggaaatttttcacaaaaattcacctcctaaattttttctctcaatttagaattttatgaaattgatttaatttcttccgtagttttttttatcatcattgccattttcagaaaatatttgaattaacaaacagcaaatattttaatttctaagttcaaagctagcgcaaattttaacaaagatttttgaaaatatattacaaatttctatattataaatatgcttttaaattaacaataaagataaattaattcctcaattttcagtcatctggccattacggtggccattggcttggtgacaaccaatcccgatggcctgatctccggctgtcaataatcggggtcatggagttcaacatgtttggcatcccacaagttggcgccgatgtttgcgggttcatcggagactcaaatgaagtgagaaaaataggataaagcttatgttatatatattttttaatgattttaattaaacaaatttttattaaggaactttgtcttcgatggcaacagcttggagctttccattcttattaccggtcgaaataattaaatttaacaataataataatttaaataatctattttattgttcccattttagcaatcacaatgatgttaattcaaaagttagccaagatccggcacagtggaaatccgtggcaacagcaacacgcggttatttgaaaatggggttgctccccgtccttcagggagagaaaattcggggatcggggaggacattccccgtcaaaaaatgccgggtatggcttgagaatttcaaaaataccggagagcaacgctttttcgggaaggaaattttcataaaaaaatacgaattttatcgacgacattcgcaatcctccgaatcgggtcggggagcattcctaatttggggaaataatgtttaacatttaattcttttaataattgtttagttgcgaacttattccgatatcgtcatcttccttatttgtataggtaaaaaaagaaaaatatatataaaaatattttataaaatatttttaaaataaatactaaaaaggtaaaatctaggaatacaactaactaaaaatattaatacagtatctcgtcatatatctgccatatttgaatgggaatttataaggttgatgatattcataaatccgcgctctcataatgtgtcagcctagaaatacgggccctcccatgccggaggaggttcgttgattctagttctttttcagcagctcgtccattaatattttgaattttttaattaaggagccgttcgccaccgtcggtgaccgactttggaagaggcaaaggccg

SEQ ID NO: 14588 - DNA, 1101 bp, Heterodera glycines
ctctaaattttgctctaaggcaatttttcgctagaaccatacccctgacgagttatgggcccgggactcaaatgtcccgctgaggccaaaatttttttctttccgggaaaaaatcgaaatttttctaaaaataccaccaatcgatagagctcaaaaaacgatgttttggaagtggtctccgttttcccgggaaaaatcgttaaaaaatcttaaaattcaaaaaccaaaaaatcgttttttaggcctagctcgaaaatttttgaaaattttcgaaattttaaaatttctaaaaatcgagctcattgagctctacaataagtctgctggccacccccctcttagagcaaacccctacgagctattcgcctggtactgaagtgtccaaatcaggtgttcctcacgttgcctaacctacaggtcaggcctttgatctgatcaaaaaatttttgctggcaaagttgtaggccacagttggggcatttcgcttttggagttcactaagccataaatgcaaaatgaaaaattttcgtaacagtgagactgttagcaaagacattttcagcgtcgctgggactcagttgtccctcggagaaaaaaacctatagttttcccgaattctcctcaaaaagttgtaagacccttccaccactttcagaccccggccggccttcggccggccggaattagtttttgaaacgaaactcaaaacctatataacatatatataaacaaaggaaaaaatgataataaaaattttttagtgtgaaatgccatacagccaccaaaaccagcacaattctaaatgcaaatggaagtgtcacaactgccagcgtgttggatcggacttcaggggaaattgcattgactccaacgataattttttcgagacctgcctgggatgttcaaaagtaaagcaatgaatccgttgtatttttaaatgaattattttagacattcaaatgccgaaagtgctacgaacaccactgtaaactgtcacaatgtaaaatcaagcgcgggactgaagtgacaaccatcgaaaaatcgatctgcaagagtttgaaaaagtgtgtcgactgcggaataatctaccaaactcgggta

SEQ ID NO: 14589 - DNA, 1577 bp, Heterodera glycines
ggctgacgagaccttcgcatgggcacgttcgagttctacacccccgaagtggagccgcctacgtgtggacgaccccctgacggccttcaccaagtggctcctgcactttgaagctgatgtcctcggccttgaccctgcggagaagcgccgcaaacggaagcgtgcgaatggagacaacaacaacaaggcccggaatcctgctgcaaatgccttcatcgacatggaagcggaagacgacgacagcgatgacaacgatgcagaaaacaactacatgcttggctatgatgaggagggagagaaaccacgctccgtcaccacatatgccttcgcccacgcaggtaaacaaattttaacaaaaataaaaggaaaatttatcgatttttaagggtcacgttacgatcacgtgctgatctacggcgagatgctgcgcatgggtgtgcgtcccgaactcgtgcgccatgggaatcagctgctggagatgaaggcccgcaagaggggagccatcacaacgacaatcttccgggacaggtaaactgtgttaaaataatataaaataatcgattatttttcagttacaaactgattcccatcaagctggcttcctttgtgaagacgttcggcttggaaatagagggagtggacaacaagaaatacttcccgcacaagttcaacaaagtaaaaaaatcaataaataaaaccaaaaacaatcaataattaaggctgcaaattatggtgttgtgctggacactcttccgccgcttgaggactactaccccggcggacacttccctgaggagcgaaagaagctgaagcagtggtacgaggagaaccgcaacacgccgtttgacctgcgcgaagtcatcgcggactactgtaaagcaggtaaaaatcggtaaaatcttgaaaaatatgcaaattttcttcagatgtccaaattctcgcccatggaatggtcaaaatgcggcagttgttcgccgctgcaactagccaggagctgaccgactccatcaccatcccgtccgcctgcatgaagttcttcgtggtcttgtcgcacgtcggcaaagagagggtggccatcatcccccaccttggctacgagaagcgtgggaagcagagtgctatcgcccgaaaatacctctagtggcgtgccgaggaggagctgcgcgaaaatggatggacccttcgccacgtggaaagcccaggcggcgaatacaagcacggcaacttcttcctggacggcatgctggagcggatcggcgaggacaaaaacttggcgatcgaagtgaacgggtaaagaaacacttgcaaacttatgctaatttttctccgttcaggtgttattggcacgcgtgcccgcactgttttcccgaggacgactcaattgttggcggcggagagacggccggtgccattcgagcgagggatgagaagaggatccggcaaattgcgcgtgacttcgaggtggagatcgtgtgggagtgccagctcggacgaatgctggaagtggaccctccgatgaaggcattcttcgacaacacgcccgactccggccccaatgactccatgatgcctttttc

SEQ ID NO: 14590 - DNA, 1239 bp, Heterodera glycines
cggtcatccaaaggtcatccaaatggacaaggacgtctattggactacgaaggaacacattttggacgacgacggcgtgaaaatggagggcatcatcaagtgcttcgttgtcccgcctcggcactgcctctacgacattccggtcatcccaatgcggcgcaacaacagaactctcttcccactctgccggaagtgcgcggagatgtacccaaagggtctgtcgattctgggtacaactgccctcactttgaggacgctgagaggggtaaagttgactgtatttgccaatgaattttaaattttccttcgcaggattctcaacgaccatcccgcacatcgagctcgaggcggcgctgcgatccggctacagagttacccatgtctaccgtgcgtacgtctggccgctgtattgtgaatggagtaacggcctcttccactcctacctcaacaaattcctgcgcatcaaatttgagggtaagtagtaaattgatcaatcaatcaaccaatcaataatatttagccagcggtttccctgctgactgtgccgctgatgagattgacgaggaggatagggagcgcagaaaggagcaatacatcaacaacccctggaagggctgtacggtgcggctcgacgccaacaacatcaagccaaatcccggcatgcggtacctttcgaagctgtgcctcaactcgctgtggggccgctttgccttgcgcaatcggattacgaagacggaaatcatcgattgccacgccgaccttgcgaagcttctgaacgacgtcaaaaccgacatcagcagcatcgaccaactgacggagaaattctggatggtgtgctacaaggcgaaagatgagcacgtggtggagcacgacaccagcaacgtcgccattgccctatggactacggcagcggcccatgtgcacttgctcaactcactgcaattggtctacaggcaggaaaatctagttcagcgctacgacacgcgcattttatacatggtaagagtgtgacaataaaatattcataataaaatattcttttttcaggacaccgacagtatcttccatgacttcaagactgcactgggggacccgctgaagggaggcaaccaacttggggagctcgcggacgagtaccccagccataccatcgtcgagtttatctgtggtaaggactttggccaaaataatttgaataaatttcatcgattttcagctggaccccaggcctacgctctt

SEQ ID NO: 14591 - DNA, 590 bp, Heterodera glycines
taatccctcgcaaagtggggcttatttaaaaagagaaacaaaattcggaggcttttaataaaatttatgaattttattgttttttatttttgattattaatattttcaaataaattggtgaattttgttttttccattttcagagcactttgctaatgtattaatatttaaggaacagatttttatgagtttaaatcaatggttattgatgcgacttcgctgttttaatttggttggatttttttcattaaaatttcgtttttttttcattttattttgttgattttaaacgtctatcaaacaattagtgagtgagccattaaaaattattttcaactctcttaccttcttttttagtaattgaagcatacaaagcagaaaatgccagtgccattttgttgatttgccaaggcagatcagaaatcctttgaagaagtaattaattaattaattaacgagttaagaggtctcttgcaattgcccaacctgtgcacacttcttggccaaatgttctggcattgtttcgtactgtgatgcgactcccccgcgcccccaaatgccatcaagcattcgagcaacttttcgcgccg

SEQ ID NO: 14592 - DNA, 3681 bp, Heterodera glycines
gttgagtcccgttgattggaatgttggtgggttgagtccctttgattggaatgttggtgggttgagtcccagtgattgaaatgctggagagttgagtcccgttgattggaatgttggtgggttgagtcccagtgattgaatgctggagagttgagtcccagtgattgaatgctggagagttgagtcccagtgattgaaatgctggagggttgagtcccgttgattggaatgttggtgggttgagtccctttgattggaatgttggtgggttgagtcccagtgattgaaatgctggagagttgagtcccgttgattggaatgttggtgggttgagtcccagtgattgaaatgctggagagttgagtcccgttgattggaatgttggtgggttgagtcccagtgattgaaatgctggagagttgagtcccgttgattggaatgttggtgggttgagtcccagtgattaaatgatggtggattggcgcagaaaattgtggggggggccgaatgccccagtacgaggccgcgaaagcggccgagcgagtacctttggcgcaaaaaattgttggggggctttgccatcacgagtgaaaataaaattatatgctgatgatgttaaattgtatatatgttataaagcaagagcagatacagaaattatgcataaagcattgcataatttatcagaatgggcaaataaatggcaaatcagagtctcaattaaaaaaacttttgtacttcatttggggaataaaaaccccaaagaaatatataaaattgatggaaatataataaatgttgtggatacaattagggatttaggcataaatattgataataaattgcaattttccaatcatgtcacgcaaataataaagaatgcatatttacgtatgcgttctttatttcgggttattaaatcaaaatcttctaggatttggattattttgtataaaacttatgttagaccgttattggaatatgctcctgaggtttggaatccatctctgctaaaaaatattaaaaaaattgaaaaatgtcaaaaatatttcaccaaaagagttctttttaaatgcagccttccacccattccataccaacaaagattagaataccttcaactgccgacacttgaaagcaggcgaaagctgtctgatctgttcatggctcataaaataatttatggccgaacagatcttaatccctttgaaatattcaaaccttctgaacgctttaacattcccttttatagacttaactcgaaatataaattaggcaaaaaatttataccttttgcggggcgggtaactaaaatttggaaccaactcgataaaaggctcattgaaataaactcattaaatcaatttaaaaataaaattaaaactatctctattcccgtaaaatagaccggaaaaattaaagtcgaatttttaatccattcaaactaaaagtgatttggtcgctatttatttatttgtattgatttcatattatattttattttttggcggcgatctcgtttttaattgttttgcgctttcttgaggacattttttaaattaatgttttgtcctcaatgtaagcggatttttcccttttgtggactttttctttattgacaataaacaaactttgcgggagtaatccctgcggggtcacatcccgcaaaaagtttgagttccaaacccgcaacatgattcgaaaatttgaaatttaaggcaggggtgcgatctgttctgagttgtcagaaatgttctgattttggggtagcgaccaaaatttgttttgatttcttaaaatccttcagaattttgtaattttatggcgtaatgtcaggctacatgacatttcgcctactcgacatttcgcctactaagccaaaaacattcatttcgcctactaacccaaaaccggacatttcgcctactgtcatttcgcctactattcatttcgcctactgacatttcgcctactattcatttcgcctaccaaaccaaaaacattcatttcgcctactaagccagaaacattcatttcgcctaatggaaatacataatgccaaagagaaaataaaaaaagagaatatacaatatctacctataatgtttttgcatcaaataaatcattcatttcatttttatgtcatttcaaattttcttcaaaaacaaagaaatttcagattctaataagaaatgccaactgttcgcgaaatacttgagagtctgcaaaagcgagtaaaaaagcctcgcattgctacaaatgaagacagcgtactgaatgttgagaggacagacgcagaacaacaaattgaaggcacttcaaccaggaacaatttgggcgtcgcttcgagtgatgacgaagaaaattgtgagcccgttcaattcaaacgtgaagaaacaatccggggagctctttgtctttggtatcaaggtgttaatagtttttttttgatttttatttctttattttcaggctttcgatttatcaaaaacagaaaagatggtagctggttcaggtgcgaacagcgcaattgtccagcgacagccaaattggacgacaacgatttgatgacaggcattttgggcgcaaaaggacatcaccatggttgcgcaccatcgcgttatgatgcagagacgaaacgaaatcagatgaagcgcctgatcaaggaggagccaaaaacgaaaccatgtcaaatccgcgctcaaattcggactgacatcgacgatgaagtcttcgaattgctcggcaccaatgaagcgctcgaccaaatggcgaacaggtagacaaaattcagagaaaataatgatgcaatatttagaacaaagaacaaattcgttaggtggtgtcaactgtgccgacccactgaacatacaaattccgcctggtcttttgataaagaatgatgagtctgtcctcatttatgacagccgtgaagtgaggactggacaatctgatggttgacaacgaagcaccgattcaataggacatccgttcactaaacattcaagcgcttctgacaacgtaccgaggagttacattcaaaaatgggacgaatggctgacactgccggtgtgctactcggaactgagccgtgacgccattttgcacttcaccgtttgggaggtgggcaacacaattgagccggtgagtgaaatgtcttatatttaaaacattcttccgtccgctattttcccaaaaaataactgcatcggacaatgagacaatcttttattctgattctttcgattcataccatctttatagaactagttttttagactttactccagcataaatggcataaatttatgaagacaacaaatttaaaattcatataaacacacaaattctgtgtcgagtaacatatgaatacgaaaaaacctcatttatggatacgtctcggattgcgaatgatttgcattttcaggtgctggtcgcccaatgtgccaagcctttgttctctaaacatgccattttccgcaacggtctcatcgatttgactttggactttgttgccaatgcggcgacaacggacaaacagcagagacggcccgccgtacaactccaagcagcacacagcaaaagtccgtcgaagggaatggcgacggaaaacgcccggccggcggaacagtcggtagaagccgacgacagcacgccgctgcatcagcacaactaagcaca

SEQ ID NO: 14593 - DNA, 3809 bp, Heterodera glycines
  unsure (1)..(3809): unsure at all n locations
tcgcatcgcatgcacttcctccgatttgaactgttgttgctttagacgaatcagaaggaatcgaaggtgccggcacacgttttgatgatgtgaatggcaccacttttgctttacccgtaatcgtcacaatttgtttcggtttggcgaagacttcgcccgccggcgattttgctgcgtttcccccttcagtcgaactctccataagcggggccaaacttggcctgacttgcggagaccggccccgtgccggagggcacattccctcgctaaagaagtgccgaaaagtgaaatcgatgaaattcggtcccaatggctttccgccgccgtacgccgcgcattttaatcggtcgtttccatttccatttgttctgatcaattcctcgttctccacttcaaaggtgtcaaagtttgacgtgtcctcgggattctgcactcgtggcacatattcggggaaagtgttgcgcaaattggcaaaatcgatgccctgcgggaagggagtgaatgctctttccattttggcactgctaattcgcaatttgcaatgcccaccttgaaccacgggtgtgctttgatgtccttggccccgttgcgatgtcccagtcggttctcctggtcacagcacaatttggccacacaatccacgcactgtttggacaaacgcacacccatcgcgtttcgcaagtccaaaaagcgtctccaatgcactatcataaattgcgtttccgccgggtcgtcgcgctgcgacaaaaacggcggtcgtccgtagaccatttcgtagagaataacgccgacactccaccagtcgcacaattgggtatgccctgaacaactttgtcatgatggaccatcctacttaaacatcaaaagcatccgctgaatgtccattccccccttttttgacattttttccgtttttctcaccaattttctgcaccacttcgggtgccatgtaattgcccgtgccgaccaccgaatgcgctctgtccctcttccggtggtgccgcatctccaacactttgacgcgctggtccaacccagggggcaacgagaaggagtcgtcccggacatggccaatgggtgctccgtttgattgttcgtcgtagactacgtaatgccttttgtcatgggtccatctgagtccggtgcaaagtccaaaatcagtcagtttaatatggccactccggtcgatcagaatgttatccggctaaacgatttaaatgcatttgaaactttgaaatcaaataatttgcacttttatgtcacgatgaataaagccaagggaatggacatattccacggccaaagtcaactcggcaatgtaaaatctgtaatgtttggcgttaaacattcaaagaagtgaatttagtctgaattgcctggcgagactttcggggaaaatgcccatgttaatctgaaaatgatctgtgtgtagagagggcagtttgggtggaccaaccagaagttgcatcatatcgcctccggggacgtattccatgatgaaataacttatgtaagcaaatggggaataaaagcgaaaaatgaattaataattttacaggttttcggtgtcttgaaatgagaagaacaatctgaaagcaaaaaataaaatacacaacacataagtgaaatttgataaacggagatggtcaaagtcagtgtcagtggccaaatcaattggaaaacgttcaatccgacaaatgaatcccacgtttttggccattccatgcccaattagccaattgttggcccatctccgctctttcatttgccacttgcttcacaatccatgggctgttagcttccgacaaaatgtctctctccgctttgacgtgcgccgcctgctgcttttggatgacgtccgctttgaccagtgttttcatcgcatacacttggttgtcgctgtccttcttccgcaccaaagtgacctttgccaaatgtttctctcatttcctaattatccgctaatgaccctcccccttggccaatctgctcgaattaccttcccaaaagcaccgattccaatgtgtctgatcagttcaaacatttcccggttcattttttgccttctcaaccgaatgtatttggactccttttggcgcagcaatcgcaacatcctcgtctgtaattggtgccaaattcggcattttcttggcactttcgtcccaccttcaccggctctgccagtccggccagttccatctcgcggatcagttgcatttcgcgctgattccgctctttgtactgctgcgttagcttttcgatgtgttgctccatgaagaagctttagcaaaggaaattatttacgacagtttaaaattaatgccttttttgaaatgctaccgaaacattggcgcgcgacaactgaaagaaagcggcaaaacaattaatagccaacaaaaaagggaacagaaaaacacacggcttaacagcacggtcgtaagtgttgtttttcagttttttggcgaccgattcgggcaacggcgaaacgcaccgattgatggcattggagcggggggaaacggcggaggaagcggcaaactgctgaaaaaggcgaagaaatgggggaaattggcggaagggaatgaatgacctaattatgcataattagccaactatgagggagagttaattggaccatttccgatgtcccgtgaattttcagaaattctccccttttcagaccaaaaatccatcccaacaattattttaccttattagagatgaattggctataatcgggtgcagatttattggccacacggcacaaggggacttgaggatcgacaaaaatgcgttggacgagttggggcgcattttgatgtggtcgggaaggagaggaggaagagggggcacagacgggaaaagcagtgacacagtgctgctgaaaagtgaactttggcattattttcagaaggattgactttctctctctctttttctctctattctgtgcgctaactgtctcgctttataacttcccttgccttttttttccttaatcccccttgtctctcgccacctttttatccctcgccgtctctttcatttgctcctctttctcttgcggtctgtccatcgtcgtcgttttgcattccgttcgctcacttcggttccgttcaattcgcgtcactatcccttgcggcggattccgtcgtctgttggcaacggcatagtgatcagtttgaccaatggaatgtgcagccaaaacatcggcgggtccaaaagatttgctctgtcgcctaaggggaagaatagcaatacttaattagctttttgttggcttaacagagcggcggaattggcatgtgccaacgatttcctcggggttagctgaggcggcgatttccattccgataattgtgctgcaggtgatgccatttccgtccttcgctgccgaagggtcgtcggtgagagggcattttgagtgtaagcgctgcgcgggaaagggtcagcagggggcagagaatgttcgcctttggccggggaatgtctgtcttggccagccgagaattttggcacagatttgtgctggttttggtcggacgattcgttcacaaagacaagcgaccgagaaggagtcaattgggcgcattttggcactttgttggcgttgtgttgtttctgttggttttgctgctgtctgactaatttcttcagcagggaaaaggaacgctgtacggtaggcagaagcaaataaataatacggtggcattgacctgcttaacggaggaaaaaggttcgnccgcctcggncagcgnccgaaagtgccctaaagagcgcgtaataagcactttcctggaaatattaaa

SEQ ID NO: 14594 - DNA, 2263 bp, Heterodera glycines
gaatttttaaaattctcattattgccataaaattgattttaaaaaagctaaaagtagtcacaaatcattgaaacatcaaaaatgatcattttgttcagattctaacataaaacaaattttcaaaattcgaattttcggtttttgttcgaatttgggttcggaataggcccaaataattgccatattcgcgatcagcaacctcgaaaacccccgggtacttttctctacccatgtactaattttttttaacaggttcaacatacgttctaaaggcgaaacaacgattttaactcaatttcctacttttgttaccaataatactgctttttgttcatcaatttctaaacaactcacaacgtcagagttgaactcaactccaacgtctccttttccacaaaaacaagcacaaacgctgcagaaacaaccttgcccaagtggtttttcccaccatcgtcgcgtttctgttgtcccatccaattcatcgcccgctttccatcggcactgtccgcctggctcggcctcggcttcttcggcctcctccttcgctactgtttcacacacaactgtggctaacgctcgattaaaaccgctgactacgccttccgctgcgccattgttttctccatttggcgtaaatgagctcaacaacaatgattgtcttttatacaataaaaaaaacaagcagcaaccaaatcaaaggcatttggtgcccttctcctcaagctcactgtccacgtcaaacaatcagcaggacagtggggaagtccgtctcaaactttggtaggctaaaaataaacaacggatcctaaaactcgaagcatttaaatttgggaatgggaagatacggtcaaggaaagaatattcaatccaatcgacaggtacgacatggacgaagtgcacccctttgtcaactaccggcccctctatttgaatctcgtccgctctctgaacgttgatcctcacgcatgctctttaatctcactcatccaatgtttacctgtgtgccttagcctgtgtctttgtttttgataattatgattaaggtcgacctggaaaacctcgctaagccattgatgaaaatatttgtccattccaaccaaattcgtcaattctttcgtgcaatttgcatggattatgtcaaaagttgcaagtaatccacgccaagcctaattaatttaaagcattcaattttcatttagcgatgtgaatactctgtttcgcagccaatctttggcttccaaagtcatgtacgaaatgatgaaatttgttggtcaaagttatttattcaattcgctgaagccactcattgacttggtccgtttggattactcgtcaatgggattgctgattgtatttcagatttttgctgagagaaagtgctgtgagatcgacccatcaaaactcaaaacgggtgattccctcgatcaaaattttgtacgttatttacttaagattggttagattatatttgcaagcctactaacccatttcctggaaattcttcttcaaaacctatgtactaattgaaaatcatatcataaaaaataaatcctttttatacaaaaatagtttttaaaaagtccgaaacaattttacgtgataattttcttgacttaatcaatttaaaaatttataataaaaaaaatcgacttgggaaagaatttaatagcacattttaaagcggaccatatatctttcttattgattttttattttcactaacaatttttgaaaaaaaagacaaaaaagatttacctaggtcaattttttaatccagcgtttgagaagaagccggaatgggcgagtgctccgtattatcatgtcaataactgacgtaaaagattaggaaaattttctattaatatttttgaaaaataaacttacttataaaaagttaatatgagtttaaaaaatttttctattaagatttttgaaaaataaacttacttataaaaagttaaatgaagtttttattccaaaatagtaaatgaaaatatgggtgaaccattcttcatgattatcccttttaagatagttgaaaggttttccgtcctttttgaaaaaaactcgaagaaatttggatttaaattatttttttcatctaggtttagttaatgacatcacccacattcctagttcgtgttgcccagttgtccctttccgtggctggaataagcgtgctcccccccccccctccgcttaatgtgtggctataatttagcacatttgtttttatttagcgtagcattacgacttatgctga

SEQ ID NO: 14595 - DNA, 2100 bp, Heterodera glycines
  unsure (1)..(2100): unsure at all n locations
acgccgtaccagtacaattccancataaaagggcggcgggccaagcaaactttatnttccaatgttttaccaatntaatttataggatgtcgaagtttcacgtacgctggtgcttgtctcaaaagtccttcagcgaatttccaattgcgttgtttccgcacatccgttgaccaacaaagagcaatggttgacgccggtccttcaacgcttctcagacagggacaaaatcgcgatgatacaatttttggacaaaatctccaaaaatgatgccgaagacaatagccagtcctcggaactgaatttcgctaacaatgaaaacatttcgccagcatccagctcattttgcgaagcgacagtacttaaatcggggtattcatagaaaaatgcgaatttttcaaggaaatcgactaaatttaggtatttgattgaacgaaggtgcagccccgtcaaaaagcgttccttcaaaagtctaatgcattcgaagcgtcgctttgtccttctgaccgaggcgtcgcttatatggcacaaaagtgcaaaggacggcactgcgtcgagcacttcctcggtgatgtcgaacagtttgacggtgagcggcgacttcaacgcgggcgccgaacaacagaaaagtcaaattgcgctgtctgaagtcactgctgtcggcgtccttccggacgcaaaaaatgcattcagagtcagtacgatgaacacggaggtccattttcaggcgaacagcgaagcggaattaaacgaatggtaaggggagcattttctaattagatgattagcaaaatgaaacggaaaaaattatattcggcgtttttaccggagtgtgattttaaaatagcgatatgtcccaaccatacgctaaaaggggtgggatcaaaaggtgggtgacgcctaatttaaggggtccggcgtcctaggtttatatgagacaggggtttggggttcgaatccgcttggctgcggattattttttacgatacattaggaaaacccgtggacaaaaacattgattttgcaaatcttagctcatattcgtgatcagcgcattttttaccccgaattaattgtaaagaattttttttaataataaaaattttggaaaaaatcaagtacttgatgaaaagtcatagacaaaatcaatgattttgccaaatctgagttcaattcgtaatcagcacccttttttacctcaggaaagataagacttcgttatcacacgtataatacgaaatttattaagaaatatttttcttttaggattatactgatccagaaacaacaacgccgtcagctgatggttaagaaccggtccatcctgacntcacaagttcagcagcaaatgtgcgctgaaattgacttggaacgggagttacacgtcgtttacacaaatttggcgactcacatggacacactttgtgatcacaattggtgctgtcgcttcgaatgcgcacggtgcgacggtgggaagtgaactcggaatgagtgcacggattcgaggacggatcgctggaattcgatgggaggaagcggccttattaattattgtttttttattgtaccgattcggcatcagaaatattttgattcaggaaatcagaacagaacttctatctcgttcttttttgtaaatgctcttttatctgtccctccttcgtttgtcctctcaaatacattatgataacctctctaccttcacaaccattcaaacaattttgtcacttggatttcatttaaactgtaatctttgtttgttattatttatatttgttgtaaaaatgattgattgattgacttaatgaaaaaaaactccttttttcagttaagaaaaagaggtgtcacatgttgtgatgttaattaggtgattttaatatcaaatatagttatagtttctgttgtttttttgtattgaaattggaacttaatgttagcagtttaaagggtcacatgctcgatgccgacgttgactcccaagtcaattaagatttacaacacaataaataacttatatttttgctaattaagaaattgcgcatcatcgaatggcaacacttgaacttgctcaagttttatcctgatggtttgcttttcgttttt

SEQ ID NO: 14596 - DNA, 4897 bp, Heterodera glycines
atgaaaggttcagtttagtaattatggtcaattgaaaagtgtcaatggcatggtcagtgtcactctacgcgtggaaaaggcagtggcggcgtcgtcgaaaatcggcatcggtaacggcactttctcaatgacgaattggcattcagtttctgtacggcatcgttctccagaacagactccacgacctgcaaaatgaaactttagccttgcaaatgaattccattgtttaccatttcatttctgcgacggttttccgaagcatcggtcagaaattccgccgaggttttgaagtccgcaccagcttttttctcaccagtctgaaaacttgcagccaatttaaatagaaagtccgtgttaagattatccatgcaaaagcacccaatgttatgcgcccccatacacctaaaaatgtcatggtctcaatttaagggaaatttgattattttcctaacagatcgtatcaaattgttcggctccgccggcctcctttcttttctgtttgaaaattgagcgcaaaaatttttggccttcaaagtcatcgccggaccataccctatccaaggcgaaattctgaaaccatcccagggcggcagattggagaagtaacaaatataattacaagtaaaaggctatttgtataagaaatgctgtaaatgacacattttcctgggaggcgtcactttccccctgctgcgtgttcatttcctcgtcagggtcggccagacatccagtgaaactgcgtgcgaggccattcagcagaaaacgaagactgagcgacgacgaatgcgcgaggaagtcggacgaatggtcggcgtaatagcgatgttcaatgccaatgccaccactccgattgtgtcgctcttttagtgcagttgcgaggtcgtaattcttaacggaccctgaagaacgaggagaaatgacattggtaattgcaaggcaactgtatcggtggtcaattggcgagtgtttgaggcctccactcaattggctgtctaagcgcgagtccatcggagtcgaacgacgcgtcaagcgagtgggacggatgcaacggacgggcggctcgggaatcacaccgtcgttgtagttgatggcgagccatttgcggattgctttagtaatgaaaaagaagttacgaatgatgcgcatcacagagccaaccagaaactgaaacgaacgaatacagacactgacaatgtaatatcatttgaatattcacaccatttgtggaaagtcaatgggagcggagaccaagtcgtacccaacgatagcagaaacgcaaatgagcactcgctggacaaacaccagtccaaggtcgaaggcacaatagctcagattggactaacaataagaactatcgcaattggaagactcaaaagtaaatccaccttagtcccgccacttgacatggagtattttccactatctgagttacgggtgctcatagtgactgccaataatatgaccaaagagaggaagaaagaatttctaaaaaagcaaaagttgtttttcaattaaaaatagacaattggaatttggattttttatttttaaaagatttttattttttaaaatatcaaatttgcgtaatgaaaaagagcgttatttttgaatttaaattttttgcacaaaatgacaaatttgcatatgaaacagcgttatttttgaatttaaataaatctaagtgctatgctgatggaaaattttttctatcaaaaatccagagttatgatcgaaaatttccaaaataagcatatcgctgatcaattgcatatttttttaggcggggagggggatgatctaatcttacataattctattcgatttttttaatctttagactattatataatgttcgaaaaaaagccgagaacttgcatttctgaacgtcgatctctcagcaatctcacaaatgtcatttataatgatgggaaaaaaagcaatgccaaaggctccgctgaaattaccaggaaggacttacacaaaaatttcgcggacgacttcgttttgatgcgcaaaaatttagaattgcttaaacaaaagtggaagggaagagaagatacctttgtcttgccaaaattatcgctgaatgaatccaagaatgttaaactcaaaaaatcagaaggttgtctcttttaagaaattaaaaaaaatgtaatttcatagatttagaaaatattttttggcaaaagcaatgtcccatcaatgtaattgacgcagcccgaacaattaaaacgcattgcctgggtggtcaccatgccgttcaccgcaatatgtttccaaaaagtttcttaatttgattattaaaacgttttgttggcttaggagtccgcggagctttctgttatttgtgtggattaaatgatggtgttgaactgaaaaaatgctcaatggccggctgttcaactcgctttcatttgttatgcgctcgcaacagcacactcggagggtacacatacaaattcatggaacgccggtcggaacgtgtcggattgttttgctcacgacaccattgcaccgcttgcttttcggaccacaacagaacgcgttgttttgcaggtttttcaacgtttttcagtgggaaaaacataatttttaacccattcttccaattgattaatgcgctgaaaaagacaacagaactgaatacaatttctatttgatttctcttttaggggcatctctgatcacctgcgatcagtgtgaattggcttggcatcgtgactgtgttccgagtatgggttgagaaattgttacaaaatatatttaagaatttgtcttttcaacaggtggttgctccattgactctaaaaatgaaatcacctgtcctcggcatgtcgcttttcccgattttcccgcctttcatttaagacattgcgcctattgccaacaaaaacccgaatcgccaggtttcacagttacactaaccttgaacttgactaacactttttcagatgaactagttaaatgtacagtttgctttcggtcagcacatttgaaatgttacaatgaatcaaaactgacggcgacaaatgacgagggaatggggcaaaagccggtgatttgccattggtgtgagaccttcgattttgtgcgttatggtaagaaatgcgaacgaacctccgaaatcatttcaatgttaatttttctcaaggtgattatgcaatggggcgtttttcaagacagtaagcaaaattgaagaagcaaattaaaattgaattcatcacttttaagttggtggtacccttgccaaacagtgtcaaatgatgaatttccacaaaagaacaaccctttgttgggttctgtcgggtatttgtgtgtcaaatggtgggttttttatgaaccaatgaataaattgtaagttaaattttgaaacttttcaggttaccgtataaagggaaaatactttacaatcttttgtcacataatcggtatgtttgtggaatttgttgtgtaatggtctcttcctcttccttggcaatagaattgttgtaatgactgatcatgattacttttttgtgagcgaggcacaaacatcggacattttcaggggtttcctttgcttacggcaattattattatcattttttttttgttttttagagtggcgagaagcgcaaaatttcatggtacggaacaacccactgaacagaccactcaaaagtgatcaaattcccgagaaagggattagcaatgggcagcggatggtcaagcacctccaggtaatcctaatcaagcaaaaattaacaaaggattcgcaatcccggcctcgttctaccaacgattagcgtcccagtggcatggaaattgtcaaaacgatcggataatttctcacaatcagacaaatctgaccactttcaaggggactatgttaaaactgatttttttcctcgttacctttcccttttataatctttcactatgaaaatgaggcgcatcccttgttaataatgcaatatcattcttaaaaacaccaattatgttggtttacacttaattgtttagcgtaatcactattcaaaagcggagctgaaaactcaaagtgaccgtctgttggtgcccgacttttgcaattgtccgaatggttctgaccgatgtgggccgtccaccaattgcatcaatcgatcgcttctgcaagaatgtccgaagggttgcggagaagacttcaaccttggctgtgccaacagacgcataagcgagggaaacaattgcatcaaaatcgagataaagttcttcccgggcaaaggttacggggcaattgctaaggagaaagtgccatctgtgagttttttttcatcgaattcggcatttttatttcttatgaagcgaatagttctacattctcactgttcgtccttattcagggtggctttgtcggtgaatatgtcggggaagtgattagcaatgaggagggaaggcgccgagttgagaaaattgccgagttacaatcgcacgaggctcaatattacgtgatggagttggacgaacgacggtccatcgatgcgcaattttacggcaacgatatgcggtccatttcccaaattctgtgctttttacatttaatttctttcagttatgtgaaccattcctgcagccccaactgtgtgatccagcaaatccaaagcgattttgacttgcatttggttttggtcgccaacaaagagatttccatcggggaggaactgtcctttgattacaatatgcaggcgaacggacgttccgtgccgaattgccattgcggggcgccgaaatgcacgggagtactttcggcagaaaaaaatggcaaacagagaataagtgagtgggtttattttttaaaattggcatttatgtagcaaagagccctagcaaataaaaaaacggggaaggggggactgcagattttgaattattcaaattt

SEQ ID NO: 14597 - DNA, 3459 bp, Heterodera glycines
  unsure (1)..(3459): unsure at all n locations
ctatgaaagtgtttttatctgattttaagttctcgggccttccatatgattatattttaattattttcttaagttctttccgcgatcttttatcccttgagtcatcccatcgattaatttcgttggagatgttgttgaaaaagaaattgcgctttttaaaatttatttaatttatgattttgcctccgcatattaaaatttgaatttattcgtaatgaattttatttcttggcaaaatcctttttgtttggtttaatctttaatcagattcggaatctacacatgtaaaaaaatgaaatattttaaaaaattaagttttttgaataaaaacccgtgatttgcaacaattttaccgcggcgatctcttcaaatttttatcgccataaacgatctcggcatttttccatgctcaacacggaaaaaacttatttgacaagatgtgatggcgcaaagtttttttaatgagatcaatcgagcagataaatttgttgcttccaaattattcataactaagctataatagcaaaaaattttcatcattcatccctaattgaatatcttcaagattaaatttcttggaaaatatgcccttttaaattaaaaaattttgaattcaaataatattattatgccattgcattgaacccagaagggatcaaaagttaagcgcttatccacaaaattaaatgtctttatttttaaagttttatttttgcgattgggtatttattggcaaatttatcaaatgcaacaaaaaaaagggtgaagtagagacctttttaatagggattttaacaaatttaatacaaaacgtaaaattttaaagaaataggctttttcttacatttatgggcaaaatgccgaatttaaggacattttggaaataaggacatcttcaattttccaagacataatgccagatccaagagcctccttttaatccaaggacagatacgacccctcttttagcatttttcattgcttctaaactacctcaatcagcgcccataacatgggaaaagtctcaaaaaaatgcttgctaattgtaaaatcttttttatgaaaaacggttccgccattcaatagagcaaaaatgctctattaaatttgccttttgaaaggtgtgttgactcatctaagctacagcttgaatcacttttttaatacctttcctactgtaattgccaattattaagaattaatttaatggattttattttttaactaaatttcggtaccaaaaagtatttacaattgttttggtgctcacgattaaaattcaattatttattactcgaaaattttaattggtttaaaatttaaaattctctcaacggctcctttgacatcataaattatcatttgtttaaaaatgcattcaaaaaatattataaaaaccaatttaataattttcaaaaaataattaataattcctctcgtaaaatatttttatttataatttaattaagttttgcttttcgtgaacctaattgaatttttataagaaaatttattcagcattgaaatttaaaaatatatatttgtgtgggaatttaaaaaacttccttactggcgaaaaccccaaaataattcttcttcataaaataaaaatgccattgaactaatgggttaggaattatatgaaaatccatattttattttcatgaaaactgcgggaggcctaaaacgcacgaaaaacatgtttttagcttggtttgcagcttctagctggagttcattatctattttttccatatttcgcaatttatgtctacatttccatatttttccatattttggcactttgtccgtgttttatgtccatattttggttttcccataaacctctattagaatggcccccatcagttaaattgcgcttctgactactcctgatgatcagaaattttccgaaaaatcattttgaaaatttttagtttaaaataaacttacttaaaaataggtaaatttgtttgaaaaatatgcaaaaaaagagaggaaaatttcggctttttgatccttttcagagctttttttccttataaacgacttttatacggtattcagccattttacatgaatttgaaggaattttggaaaatttacctctcaattcggaaaatttatgttcaatttttgcaatattatgtctatatttcgcgatttttggtcctaacccacataattcccaaccctaaatagcatacttaaaaacgcataaaaatacttaatattgatattaaaattaataatttaattttcagcaatgcgaaatttgcgtgttccaattttacttatgctattgagcacagtgattattttcatattanaatttttattgcatgaaaatatgccgacaaaaataacaattaaccctgttgcgggaaattttatgcaacgaaggattttgttttttgatagtgacgtagactccccaaagttgctgcttggaatgaacacccaagtaaaaatatgaatatttgagtcgaatcataacacatatttcttggcacaaaaaattataaaattaagccattgccaacaaaaagtcactttggcatatttaatgaggagacagtatttgtagaaatgatgacaagcaataattaaaaagaaactttaataaattcaattagtcgataatcatatttattgagttccaatcaattaaaaacaaggattaatgagtattcaatcaattaaaaagaaactttaataaattcttagtcgataataatatttattgagttccaatcaattaaaaacaaggattaatgagtattcaatcaattaaaaagaaactttaataaattcttagtcgataataatatttattgagttccaatcaattaaaaacaaagtttaatgagttttcatattcctttggcagtcattttgattcaattttgcaaactatttaacaattaagccattgccaacaaaaagccactttggtacatttaatgaagactgggacagaatttgtggaagtgatggccagcagcaatgtgtgagaaagtttgatggcaaattccagcgcaatgttgtgtgtttttgttataaaaaataattaaaaaataattatgcattgttaaattataacttaaattaaattaattaaatatattttaattcaattttagtttattccgtcgcttaaattggccggctgtttaattgcaaaaaattcaaatgttttcttggaggcgttgttttgctacttaacaaacatgaacaaaattaacacgacaaatatcgattacgaacttttcaatttgtttgtttttaactatttataattaaacgtgacttagagagaatggcattatttttttttaaattttagaccgagaattagaatgatgttttgttatgttgagtcaccgaattatgctgaatcgccaatgtaagaggtattttgatttgcaatttgtacttttggcgttgcgtctgtctctg

SEQ ID NO: 14598 - DNA, 1332 bp, Heterodera glycines
atcgaggcaaggggatgataggcttggccgttcatttttctttggcaaaacacaattaaaaaaaacattttaaagtcaattgaaaattgatgcctaatttacttgtttatatattttttaataattttaaaattttatttaatttgtttttaactccgtttatttatatttttaaaattgatttagcaggtaaatctggcaaaagtttccgcgattccccagactttgcgtctatgtccaaaatcgggttcaaactcaagttttttcaatcactgatagcctaatcagcattatataaatgatagaaagtgattgtgtctaataatttgctagttattttaattttaaaagtcatcaattattcaaacagctgatcagggcgagaaaaatccgactttggacataggcgcaagtgcccgaggcgcaaatctctgggcactgttgctgcaaatgtgggaggcaaaaaaatggggcgccatttgcaagtctttgatttgtgacccaacggccgcctaaagcgccgtagggcactttcaccatttttaaaaataatatttttcgtatctgagttaaattttattattattgcagagcaccattgtatagatctgatgccactggtggacgacaatattgcaatggctgtgggccaaatttgacatgttttgtcatgacggaatatgaaaaaatgttaaaccattcgtcgtccaatctttcatttgcggccacggcggaggactcgcatttttttccacaaaattggtatgtaatttggctaaggtgtcacgcaggaaaggccctggattttgatagaagacttataacaaatattcaaataaacttcatgaaaatataaaaagtcttggacacgtgagtcggtgaatcttcggtctccattctttacattgagatgccaaattacaggttcacccccgaaaaaaccatatgcaaaattaatgcttttttgaccaaaaagcgtcaattatttgatatttttgggggaaatttaaaaaatgttaatctgtaggattcctgttttcctttaaaaaaatagagtattacctttctccctgttaataaacatgtgttccttctgttggggccaaaatgtatcgaaaatcccgaaaaataatttatattcatttttatttttaggctatgcccgttccagagaatcaatttcactttaatcaaatataaaagtttgacaaaaactgaggatgaaaaaaatttcacagaccaattcgtggcatttttggccaatattccaagcctaagccatgaaacgattgaattcgtccgagcccaagcgggtttgaagcttggccatca

SEQ ID NO: 14599 - DNA, 2663 bp, Heterodera glycines
  unsure (1)..(2663): unsure at all n locations
gggttttttgactctattgcagtcatccacgaccattaaaaaaagaagagcacaaaataggcaactttcatgggcaattgtgtagaattgtggtcccgacgaaaaataaatctaaaatttttatttttataaagttgtcaaattattttatggtcgtatctttttttaggtcgtgtgaaatgtacataaaatagagccggttttttggcttcctgcgatttacacgtccataaattcacaactggtctaacccttctctgtacataatgataaatatattttcagtcttatcattgtcatcctctttagtatacatatagcaatatttcaatgttgcataatagtgaacggaaccctctctacaaatactcataccaaattccgggccaggaacgttcatacacttattcggtaccggccgaagagtttcaacaaaaggttcattttgttaattcttttctcaatcgcaattaagttactatgctcgatgggaaaattttttttattatatttcacaaaaactaaaaagagttatttttattgacaggagcatgacaaagtgacaaatgggtactttcccaccaacggaagtgctgaagcggtgcttcctcatcattttgaacacagcgttaaattggacgatttgatttgtgttcgctgcaacgaaggctttactctaaatgagcaaattgtcaattcgggaggccaagtgtggcacgccgaatgttttgtgtaagtgccttttatggccgatattaccatgccttgttcacaattagaggaagattttgaaaatgtatttacccaagacaattaaaaatagtttatactttttctggcttttcatactgccggattatggagtttggttttttgtggtttttgcttttgagaaaatttttcgatttcggaattttcatgggggaagttgtacactctcagaatctgaattaattatctgttctttcagttgcgtccaatgctttcagccattttctgacggaatttattttgaattcgaaggacggaaatactgtgagcacgacttccatgtactgtatgcaccgtgctgcaataaatgcagtaagacccaatttatattcaattttgggaaatgcgatatactcaaatagcaaaatgtttaatatatcaatagatttcttggcgagagtattgcttaatgccatttttgatttactattgtcacttaaattaattttaagatgttttgtcattccatttaatcttttattcattttactgtgtccattcccaaaacatttttaactgaaataggaggggtgggttggacttcgtattggttggacaaaaataagctctgtagggaaaggtggtcggagacgaggcgtaagagagaggcgacttgtttttttttcctcaaaaattcacatatcgaagctccaattccgtaacatttgaatgttactgcgtcttaaaatgatgcccttcggttgtttaagtagtttatatattttttaatttcaaacattatttaacagacgaatttataatcggaagagtgatcaaagcgatgaacgccaattggcaccctgaatgcttcacttgtgaactgtgcaacaaacaattggcggacatcggctttttgcgaaatgctggcaggtcgtctccgtactgacatcaaatacgagcttgttttgtccgtttagggcactttgtcgcgaatgtaatgaggcggaaaaggctgcaggcactggcaaatacgtgtgccacaaatgcagggcaataattgaagacggaaaccacattaaattccgcggggacagttaccacccttaccatttcaaatgcaaacgatgcgacaacgaactgacggacgacgcgcgagagatcggcggagcactttactgcttgagatgccacgatttggtagaaaaaagcatttaaaggaataccttggaggagttaattccatgtgcttttacagatgggaattccaatttgtggtgcttgtcaccggcccatcgaggaaagagtggtgaccgcgctgggaaagcaatggcacgttgaggtcagtttcagaatgcctctttctgtgcaacgtcttttagcactttgtctgtgccgtgtgcgaaaagcctttcctcggccacaaacactacgaaaggaaagggttggcctattgcgagcaacacttccatttggtcaccagcaacgcactgaaacttaacacttttctgtttagttgtacggccatctctgcttcaaatgtggcaatccttgtgggggagaagttttccaagcgcttggcaagacttggtgtgtcaaatgtttttcgtgctctctctgcgacaaaaaaatggaccaaaagtgagcattttctttcctcttaatcttaatgtgtcggaaaccaaattcttgatttatttcatgaattattctcaggacgaaattctacgagtttgacatgaagccaacgtgcaaaaaatgttatgatcggttccctactgaactaaagaaacggatcagcgacaatttgaaggagagggaagcagaaacactgcgacggagatcagcaagtcccgcacaaccacagaaatcaaaatcacccggactgaaatgaagaggaaagaagcccatcccacaaatacgaatctgagtgtctgtccccaccatcaanagaa

SEQ ID NO: 14600 - DNA, 705 bp, Heterodera glycines
caccccagagaaaagcaatataaaatttttaactttattttccggcgggacctccaattctgcagtattttttcccctgatacagtggaaccatgtttattacaaatgttttagaggtctttgaacgcgatgacttccattttgactcgaattcctatcttaattccaacaaaaagttggaaattcgaattttcggtttttaggtattttttcattttttaacatattataaaatttcggattttatttttgttgtaattctggttaggagtaaggatttagcctgctaatgggtgctataaccttttgaaacggactttgcgcataggcgaaatttgtccgagccttaaaatcatttcccgcaatttctgtgagtaccacccaaaaacttattattattattattttgtaatggcggacgaagctgaggttgatgaagaacttatcgatgttctcagagaaacagacctcgtcaagtttcaaccaatgatggtttttgacaaacaacttaccaggattgaacactttcgggatgttactgacttcgagcttatggttagtttgtcgtaaaaatatggtctgttcttcgattcaaacaatcccaaaaaatgataaactttgttaaagtgtcttatttgagatgattttgcattgcttttagtcctacggtctttcggagccggcagtgcgacgtcttcgtaatgc

SEQ ID NO: 14601 - DNA, 2624 bp, Heterodera glycines
  unsure (1)..(2624): unsure at all n locations
tactatatantctttgaaaaccattaaaaagaaaattcgcggctatagtatataatacagtaatatgcacatatttattcagtccgggtttacacttggacatttgctaagtgtagtttacacgagagcattcaaagacggacacgtggacatatgtcgagcacgaaaaatgtaaataaataattaaaaattatttgtttgttaaaatttatagaaaaatatttatggacaattcgaaaaagggctattatattgacgatgaggatgcttcggcatttcaaccgttttccggttcatcttcaaatttgataaacacccaacacctgccttcttcttctcttctgccaaattcttcatcttcaattcctcctcctttaaatttcattcccacttcctcccttacacaattggcatcccttccgccaaattcttcatcttcaattccttcccattcaaatgccattcccacttcctcccttacacaattggcatcccttccgccaaattcttcatcttcaattccttcccattcaaatgccattcccacttcctcccttacacaattggcatcccttccgccaaattcttcatcttcaattccttcccattcaaatgccattcccacttcctcccttacacaattggcctccattccgccaaattcgtcaccttcaattcatccacagttaaatcccaatgccggtccctccattacacaattggcctccattccgccaaattcgtcaccttcaattcctccacagttaaatcccaatcccggtccctccattgcacaattttcttccattccgccaaattcgtcaccttcatttcctccacatttaaatcctattcccacttcatctcctacacaactgtcttccgttctgccaaattcatccactcaagccgcattacttccgtccgattttatggagcctacgagtatctttatcattgactatcaactttataaaaagtatcgcttccttttagcggaaaacccactattttctgacatatcggacgcttccgcttacttacaaatcgacgagcgcgattatgggaatgaacaatcggcatctgcacaagttttacgttcaatcttagacgtatgtttgttctattacactttcaaaaacaattttttctgattaagacgaaaaattccaacttaatttgattctcacattaaacatttgagaatcatgaagtttcatgaaaataaaaaaatatgggaattttatacatactttagtttttatttaactttaattcattttcattgctagttaaatttattctgcaaattatcttcataaaacaattatttagctccgtccaacatcatccacggcgtcatcgcaaacaagttcgacaacaagccggaattttcgggaccatatgaggaaactgtacacagaactgggcgaaacaaatcgagatgaacgggatcgcgcaatgaaagctttagagttcaaaaataaacaaatcgaaactaggtcggaggatggacaaagaagaagatcaaaaggatcaacctccgaagatgataagaaaaaaagcgtattttgcaatatctgaaatttagacatgattatcagtgcgatttttgcgacaaacttcatcaaaattataaaaaatgattttttgaaataaaatggaaatgttaacctaaaatggataagacttctacagtggcggcaataagcaatagaaataatataaaatttattaatttttaaataaaaaaacgaaaaaaatatgaatttcattttttgtgttagttgttgacagattttttttttgaaaatttaataatcatataaaaattttttagtaaaatgatttttcaaatattttcactatcttaaggggccaaaaaagtcaattgaactgatggccatagtgattttttgaaaacatccatgcatatgggtataagtcgcgaaaaatggaaaaaaatacttattcaagttcatcttagttctaaagtctcgaattgtatagagtgtaaaagacaccaaaaaatagcataaaaaggcacgaaaaagatacaaaatatttttaatcaatgagcagagtaaaaatatcgaaatgtaaagtaaaataaatgctcatttttatttttgaaaaaattttgtccttaatttatcaacaaaaaaatgtgtgaaaataaattattttccaaaaaataatttttccttttccctccattcttcccatttgaaagagtaatgatcggtaacatcattcttgtctttttcttctttctctttctttcggattgctgcgcttctctcttcacactttcttccttcgtcctccattctttgctcccatcgctctctgtctctttctcgttcctctttttgttgctcccaaacatgttgccgcctcagcatgtcactgtgccagtcgccccgctcttgccgtctttcttccgcttccctcctccgttcttcacacctgagacgcacttcttcctgccatctcctctcgcgttcatcccactccaccatttcttcttcggtcagagcaaaaacgacttggtcgtcgttttgagcagcgttttgcgccataataaaatttgaaagaattttactaaaaaattaaaaattaaa

SEQ ID NO: 14602 - DNA, 1519 bp, Heterodera glycines
aaattagtgaatgaccttcaaactttgcaaaactttttggtctttgtgcaagtacggctcaaatattacactaaaaatcatgcgattctattagtaacgaaaatgtttcatttttgcgattttattagatatgccgaaataatgaataaaaaatttctctttttctttccgtacgatatgggctaaaaaatatttccttttcgggtttaaacaaatgtttaatagctgttaatcgtattttattgtataacatttttatgtcaaatcgattattttgcacttgtttttggaattcatctatcttcttaaaattggtatctgacatattctctgcttcttgacatttaaatatatttatttctttgaggccaatttctaatttttgcatagctaaggcttggtttatatattcatgcataataagccctggtaatttttgaattttttcaagcatttctaagaatgtaaaatataaattttcgattccaggtgcactaaatgccgctatgtagaaatttttcacccgtttaaaaaacatatttgcaaaaatttcgagattatttgatcgtttaactatttttccagaaattttccaatttctcgtaattttgttttttataaaattaatttcttggtctattgtcgacatctgggattatagttacttctagtgttatgacatcatccaaaggatagaaaagcgaatataattcttcttttaatatgacatgttggaacaaagcctcggctgtgttttcgctagggcatctaagagggcaataaaatgattcaaaaccaaaggaaagcttcagaatgcttttgaattttccctgttcatttttataaatttcttcgattattgatgcgagtattagtttaaaattttcctccgcattaattaggaaaggatttttaaaataaaatttggttttatattttgtaaatccaaattttaagtcctcatgacataatgactcaattacagaacacccttccattttggctgttgcccttttagtttttttgttcttatataccaacgtgctcccaaacaattgttttgagcctattttcataatttaacatttggctctgaacccttcgggactcgaaatgtaatctccgggcttccattaacgaattttgcgcttgttcctcgaattttgttgcctggtcaaaagttttgcatctctcgaactcgcgccatgcagattcagcctttacagactccaaattaatttggtcctcgattttgaaaatttcccaaattgaatcggacattttaagatataattcccgaacaccgttagcataaggagctttttctctagattttattgcctgattaagtgtttcgcgagaagacttggcaaaatcgccaacttcttctgctaacgccgctgcatccctccatgctctctctgtctctttttttgcagcttccaccaaaatggtattagctttttctgatttttcagaattcatttttttatttttcatttattaaatttttctttta

SEQ ID NO: 14603 - DNA, 1738 bp, Heterodera glycines
tcattttcttttgctgttctcaaaaacatttcttctcccaaattgtttcttccaattgccaatggtatttctattaattttcaatatttttccaatttctttttcactcattttcgggttttctctttttatttgccaataaattttcattttttccatgttttctttttccgttattattttccggctaattccaaattgcttcttccattttctaattactgaatggctaactccaattttcttactgatttcttcataatttttgtcccattcttttttcgaatattttcttcctttttgtttgtattcgtttgtcatttcaataaattttcgaacaatttcaaatttttgttcctcactaattgatttgaatttatataattttaattctttgatccattcataaacatacatattggcgatttgttcccaattttttcgctatttttctttcaattttttcccattcttttcttgggtattttcttcctttttgcttagttttctcttttattttataaaattttccaattatttctcttcttttctgttcttcgtttcttttttcttcccatttttctccaaatatttcttcaaaagatttttgttccaattttttcttttctgatccgatatgatcagttaggatgatcaaaaataaaattaaacagaataatgggcacaatttcatatgcattcttttaaaatattacgaattttttcaaataaaatgcacaatttggcagaatttgtttaatgttttgaatatattattaaaattgttaataatccataaatttgatgacgttaattagaaaaattttcgcctgttttgtaaaatgttatccaaaaagcaacaaaataaatgccaggtaattgcgataaataatttttaaaatcacaagttaatgtcatgaaaaaaacattttggagatggaaaggacggacatttgcggacggacacttgcggacggacatttgcggacggacacttgcggacggacacttgcggacggacacttgcggacggacatttgcggacggacatttgcggacggacatttgcggacggacatttgcggacggacacttgcggacggacacttgcggacggacacttgcggacggacacttgcggacggacacttgcggacggacatttgcggacggacatttgcggacggacatttgcggacggacacttgcggacggacacttgcggacggacacttgcggacggacacttgcggacggacacttgcggacggacacttgcggacggacacttgcggacggacacttgcggacggacacttgcggacggacatttgcggacggacacttgcggacggacacttgcggacggacacttgcggacggacatttgcggacggacacttgcggacggacatttgcggacggacacttgcggacggacacttgcggacggacatttgcggacggacatttgcggacggacatttgcggacggacatttgcggacggacacttgcggacggacacttgcggacggacatttgcggacggacacttgcggacggacatttgcggacggacacttgcggacggacatttgcggacggacacttgcggacggacagttgtggacagacacttactgacgtacacttgcgtacggacacttgtggacgcatacatgcggacggagatttgcggacagacatgcgcggacggccacttggtgacggacact

SEQ ID NO: 14604 - DNA, 822 bp, Heterodera glycines
tccgcaaatgtccgtaaggccaatttgttaattagatttaataattaaaaataataatcaaatgaaaaaaaaatcggtaaaataaagtgcgggcatatggtagcgaacccataatgaacaccacaacaccaatctgcagtttttaaaactttgattagcccatttattttttttaccgaaaaagtcattcttaagggtgtaaatattttcctttttcgtccaaatttgattggacgaaaacgaaactcaaaaagtaccgaaaatgtagtgacgaaacgaaaacgaaaaaagttcgtgcagccctgagtctcattcttctccgaatatttcatcaaaatttggtcggattttgcccgattcaatttcaaaagcaaagaaaattatttttattataaatattaaaatagcacaaattcatggaatatttataaaataaatataaaatacaaatttactgctttttgagggttggggaagagaattattttcatttatttcttatcgatgatcattagtgcaaatgagcgtgctgagacgatgcgaagacaaaataatcaaattaattattatcgggtgttaatgaatttaagggattatattttgtaagattcaattttatccatgtaacatccgttcgttaggccataaacaagccgtatcaactatgatttattcaattctctaattttcctggtcaagaataaccttgaagtaaaataaaattttcattttttaaaatttttagcaatattataattttaaaaatacttccatataattgatgagtatgataattatacgaatttagcaaatcgcataatt

SEQ ID NO: 14605 - DNA, 3584 bp, Heterodera glycines
gtggtgaaaataagtgatagacaataggaaataggtgaaatgtctaggcttaggtggtgaaaagcaaacagtgagacattcatgataagtgatgaaaaccaaaaaaataattaagtgttagtacatattgcttagaatgcattttcgtcgcctgtaaatacaatgtgatatagagtgcgcggtataaacaattcgctgaattttggctgggtagcccaaagtcattagaaagttaaacccaaatgttatttggaatgatccgggagatataccatatgatggacttttgaaagttaaagtcataccgccgaaaaggttgcggtaccctttattgccttttcatgccataggttatttatttttatgccaaatcgatttaatgtttaggatggttttttactttttccgacttgtggagagtgtgcacgtaagtctaaccaggaatttgttagggtagaatgtttcaagaagtacagacactcagcagaaggacggggtttagttgggttttcacttctattgtactccgaaaagcgttagaactcggctacaaaataacgaaattttatcgagcatacaattatgagaattttgacacaaatcttttcaaaaattatgtaagaatgtttttgaaaattaaaatcgaatcgtcgggctggccggataatacgactactgaaaagcaaaaaacgagttttttgagtatgcacaagcgtaaatatgatatagagcttgatcctaataatataaataaaaatccaggattacgtttaatagcaaaattggtgagaatcaaattcatttaaatatgtatgtaaaatcttagggcctaaactccttatggggtaaattttcaatgagaaactccctttgtcagaccaaagtgattaatagttcgactgagtggtataatcttttgcttgatgattctatagaactttctagcccaataataataaatgatgagatgattcgtgtgatctatagaaagaaggatagttttatcaaagaacacggagtctcgaacataatcatttctctatggtgtaaggataattcgacgcatttccctcatttaattattccttattggccattatcaattcaatcacatttatccattttcacacgtttttccttttctcattgtaatgtttctccgcccattctcttcgcatttctccttccccagtgatcagtcagtcagtaatgatggaacagacttcaattattattccgatttctcgcttcgtataaatccaacaacgaatgaataaagacatctttaacagtcaatgagtcgtttgggggttcggggcttggtcaaaggcgccttggcttttccccattccctcccaaactccatccgggataaacggtacatagttggtctgggggcgtgcgcatccctcactggtagcaccggatggttcccattttgggaaacgacgacccatcattgacgacgaagctgagaattgggtaagccggcagaagtttgtgggagatctccctggcctgagggctagaaacaaagacgtgtacacgcaagtaaagaagtctgacattttaaatttctgtccgggctagtcgaagactaaagggactttaaaaaagagaaaagatgtgagaaaatctgtccgggctagtcgtaaactaaagggacattaaaaacgaagagaaaataggtgagaacatttgtccgggctagcgaaaagctaaagggattttaaaaatgcaaaaaaaagaagaacgaaatttgcccgggctagtctaaatgctaaaggggctgactgcatcgaaaattgacaaatttgacaattatttgtaggagagagagagaataagaaaagagagtgaaggaagccaaaaataactaaaaaaaagtcctggtagcaaacgaataaggaccaatttataaaaatatctgaacgattgagaagcaaaaaaagagagagagagagagagaagaagtgagacaaaaaaaaatagaacaatttttttttgaggagagcaaaaaggcccgggctgataaccaatcaaggggcactattttagctaattaaaaagagggaccaattaaaaaaatgaaaattaggccctatcattttgcttacagtatgagatacagtttttacaagttccaaagttcattttatctctttgttttctctcgtttctcacgccataagaatattcacgtaatcacgtgccgccgcatttttcattgggcgagatcattcactttaaacatttttgcggcgcctgagaattgttaattgctcttgataggcggagtttaaacggagatggaacagataagcccattcctggaaggcgttcgcgtccattcgattacccgctatcattcattaattttttttctctctcaattaatgcataatgggattaccaaacaaatttttttttagcaaaataaaacaaaatcttattacgaactgaacgacttcgaatgtctacatcagggggctcgtcaaatgagttcccctttggtacatcccaagccttcgggcaggaaacaaagatgtttttgagtggaaaggatgatgagtcctcgatttcggctattgataggaaactttggcaaggaaagaccacgataaaaatctctgatttagaaaaagctcaaaatgatatggggaaattagaagatggagtgaacagagcttttcgctgcctgaatcgttccttgaaccaaaaagtcaattgggtgaaagatgtcgtggccaatacaaatgccaattttgagactctgaaagtccaattcgagaccctaaccgaaagagttgatatgttggaacaagacagtgatgggacgaattcaggtgggactgttagcattactaatttgaatagagcgtcgcgtgcgccgtttgtgacgccaatgggcaatgcacagcccaaccaagttgtaccgaaccaagtgccaattcatcaattatcaagcgaagacgaagatgacgggccgactctttttggcctgaacatgctctcgagcggacccacagtggggtcaggtttggaaatgttttgtgaggagtctgtttttgcatttgacgattgggctgaacgtttcaaggattacctgtccgtgtcaggcaaggcttacactgaacgagaaaaagtcacaagactcaaattggctctgagggacactcctcgggcactgtttaaggaattattgccagcacaaacggacactcttgactcagcattgagtgaacttcgacagaaattggactcccctcagcgtcgggaaattgcgaaacgaactttatcgctgtgcaaacaaagggaggatgagacagtggcgcaatttctgagacgcctaactcctttggtggatgcgacaaattcgtcattaaccggtgacattcgtaaagagaaaatttgcgaggaatttttggatagattgaagcctaacattagttttctgatccgtctggtgggtttgtcacgagcaaaagacttggacctggtaagagcacaggcagaggagctggaagctttactgttgataaacaaaggtgatgaagcatcacgcctctctcaggcagtccatg

SEQ ID NO: 14606 - DNA, 1603 bp, Heterodera glycines
tccacattaactttaaatacatttgcatgattctcttttttctaattccaactgctcatttccatttttgttgttcatttccttcgtccaaatgatgatatttgcattgttttgcttgtgttgtcgtacttttttgctggacaaacacacactctcttctcttcctgcgcattgccaaagtttccccccccccctctcctcctccctcttctcgagagtgcttcgcccaattctcgagaccggcgatcggacggaggataaatggacaccggcggagagagaagaaacggacggaagggacgacaaaaaggaagagaagagaaaaaggcattgtctcctcctccgtccgccccttttcttggttaaaaatatttcattttatttgttttgttttgtcgtcacatttttcgcgcatttttttcttttgcgattttggcgtattattgaaaaaactttgaattatttgtcatttttgctcaaattttttgttcctctcatcagcaaaatatttagtgggagagcgccggaatttgtttacatttattccattgtttggcttcaatggtttttgtccccgtgccttatattaattagttgcgaggtgtgcaaatcgtaaatgaatctcataatattttcacgtattaacaatgtgttgattttaatcaccattttaattaattaaatgtttgctttatttatttataattattttatttaattcgttttaaaatgcctttcttttccgccgctttttcctttttgcccgtttttctcttttccgcttctcttttggtcagtttatcaactgtttcgcttttgctcattcttcagttccttttcctcagttcgcttttgcttcggcttctgctgcgtcaccgccgcaccaaaagcagccccaattttcgcccgcaatgtccaaatttgcgcccaccgccagcggaggagtcgcgggaggagcgcaacaacagttcatgacggcaccgcagtgccgatgcaaagacttggacgaatgttcaaaggaaattgagaaattggtggccaaatgcaaaacggagtcagtatttgtggccaattagcacgaattaattttaaaatgccaaaaaatctttgctatcgattttttaattttttaaattgattattttaggccaaaatgcgaggcgcatttgaagaaaattggaaactctcaaaaaattcgtcaatgccttgcggacgagcaaaaggacatggaaaagttggaacaatgcgtggagaaagcggtcggaccaattgggtaaaaatattttaaaaattatattaaaataagaataaataaacaattcggtttttgagatgcacaaacgatgaacacccaaagaatttgaccattccaatcattccggaaatgagcgaagaaaacggccaaatgccaaacactgccagcggcgggcgacggcggcgaagtgcgggcactgtacccgcactcccagctacggtatcttaaagtttttaaatgtttggcgcgttgattcattgcgcaaaaagtgccaaatgggtgttccctaaaaagtgccgccattgttattttttcgagaaattttttgatttactaaatcactcacaa

SEQ ID NO: 14607 - DNA, 2780 bp, Heterodera glycines
tttagcaagaggacgggcacgccccgcctgagcttatcttctttttctttcgcgacgattccctccctttcactgcctaccgtagggattatctgatgtgcgtggaccaatgcgcggtaaaaggcgcttcgccggacgcgccgccgacactgagtgcgacgcgggagggcaacatgaactgtgcctttagactgaagtacggtgttcataattgaaaactgtgcctttagacttcactgctatatgattttatatgtacaataatatttaatttaacaaccagcctaaactaaatggttttttctcaaaaaaatatttaaattattctaaaatttttttttttgcttacatgtgcgctaatgcctcctaatgagcggcaggaaaaggcatttggcgattgtgagcaaaaactgggtctgacagcacaaaagcgactaaaaaagtaagtggtttttttgtcattttacatagagaatgacaaaatcaaattttctcatttcttttactttttgttggtaaaaaatcatggtattgtaaattaaataagaacgctatttaaaaatggaaagtatttcgctttaacttttggcttttatgaagttaaaaataatagaaaagataatgctataacatttttaaaattttttttttaactgacaaaatcactgggaaccacaaaaacctttctaaattaataatttcaggtcctgcgaatgtctgaaggcgtccggaataaaaattgtgtgcccaaaataagaaagaacgaagaaatgaaaaaaagccagccagactgatgagagattataattggaaatatttattgtcgtgaatcatttaaaatattatattgctattgtaaataacgggaaattgaataaattgttttataaaataatcgaactgaaataaaaattaatataaggggagacaaaaagggacaaaagggggaactgtcataaagcacaagggacttaatgaataagaaaaagcggaaacattctgagaatggtggtggctctttcggagcaaataaaaatcatttgaaaaatgggaaagacaaatttttaatgataattatcggtagagcccgtaaaatctccatttgcgctgcacagtcaaaagtacattaacattacttcttatccaagctataaaaaatactaatcaaaaaatatgaaaaaattttactaatttaaaagataaccatctaatttttgtttttaatcaataacttccatgcacagttttgaatgagcggcgtaagaatccgttttattgaacgggcgcaatgcgtggcgcaagaatcgcgacataaaatgtcgcgtctaaaagcggccaatcataaagcgagggttctcaattattatcagagtggaaaatcaattctcaagtgaacaaaatgcaaaaaaataaatttatatagtttagcaaatcatcaagtgattaagcatcgactgcgccttcagcggtggtctttttgcacttggccattgtaatcgcattgtaagggtcgatgcgctttcctcttgaaccggtgacgggcgcgataatggcgggcactagacagaattccaaaaaattaattgaatataaagaaaatccttacaaatttgttttggcatttctataaaattctttcattattaaaaatttacatttcaaaattaagcgatgttttaatgtttttggacttcaaaaggcagcagatgtgatagtttttacatcgaccaacggacgagaaaaatgaagaacggcggcagcagaaagaaaggccgccggacaaagggacaaaggtcatccgcacgcccaatccacttattaggggatatgctttaggttcgcggctctgctgaagggtgcatcacatttgaccttcaatcacaaaatttggtcctatttggataaaatctgttaacaaatgccactcaaatgttcaaaaaattttcccggcggcgccttagacgcctccggacccatttgttccccaaaagattttggaaaaagcacaccgcaaaaaaatcagtttttgaaaaagcaaaaaaatgtaatcaagttcgacgttcagacccgttcgcaaattggcgctgaccccccccccccccccccagacccattagcaaaaatttaggttgattccacatggtaaaggccaacttggacccactcttgctggcgctaacctttgaattaaattaataaagtgaaaaaaagaaaatttacgagcatttaaaaagaaaaattgacgtgatacctacgagataaagactgaacaggaagagggccaaactgtttcggagatggaatgatttggggaaaagtgattcaggaagggggacaaattcgaaagaggggggggggggggggggaatgtctgatattcaaaaggaaatctgagacatttcagatatttttgcgccggaatttcggattttgatgaaaatttttgaaagtccagtaatttaatatttttttaataccaaaaatgaaaagtgctaaaaatattttgaataatataaaatatgccatttaattatttgtacggagtaatgacaaaccaatgaaaaattcaggaatttttaaaatagtaacaaacaatgtttaatttatttactccaaaatttaaattccttaacattaatagattttatgtgaaaacttttttattatttaaaaaagtttgggttgttttttttggaaaatcatatcttggtgatatgtgtgatcactaaccattgtcgtggatggtaagggtgaatgcaaatccccgggattctccaccc

SEQ ID NO: 14608 - DNA, 1005 bp, Heterodera glycines
ccaaattttctttggataaagcaagccgcaaaaaagggtgtaactgtcccaaaaaaaattccaaaataatataaaattacataattattttgaaaatcattaaaaaaattttcaaataaatatataaaaacagtgtgaaatcactagggcataaaattatatgcacatgccggaacccgtcagttgggcccccaagtttgggcctcagcatgttatttctggctataacttttttctttgttaaccaaacccaacattgttgttatcattcgaaagctctttatatgcttctactaaccttacaaaaattgaaaagatttaataaatagcctgtaaaatttgtgtagaaaaaaaggcgactcattttttgaattctgttttttattggccattaagactaagttcttacgagtaaattattatggcagtgaatcgagccaatatttgcagttctctagtaaaattatttgtatcttttttaagaaaatgaaagtctaagaaggtttctcttgtaaaaacacagaattgattggccaaacagtacaaaaaggccaaaaatggagggaattttttaaatttttctgaattgatcactatcactttttctaatcccttagtttgtaaatttcaattttcggagattttcatttgatggcttttatataacgcccttttgaggttttttataatgactcagcaccaccagaaacaacaaaaaaatgaaactctgacacatacgcttgacacattcgagacactggaatgtaaaaaataaaaaaatgtactatcagataattgaaattttcaaactaagtgattagaaaaagtgatcaattacatgcttaaaaacggtcagaatcaatgtaaaaaggttagaaatgggttgacaaaaaatagaattagtggtgcgcttcagggctgttgcaagtttcgcttttcgcctttcgcttttttggctgaaaagcgaaaataacagtaaagaatggggtttttaaaataaacaat

SEQ ID NO: 14609 - DNA, 1643 bp, Heterodera glycines
caaaggcgactttatccctgtaaaaccaattcaactcttcatacacaaccagaataaagtgagaagaacgtgactttaaatattattataattaaggggaacacaaaagtcattatggcattatcatatttaatagctattcattattgagttaatgagttttaaaacacaaaaccctttttaattattgtccataataattaaccactaattgcttttagaatacaaaaaggataccgacaccctattacatgaagttgaatagggcggttgtcgaaaatacgacgttcactctccagggcgagttgcacccaaatgcacaatatttacgcgtctcatttttgtacaatgcgcacgatcggaatgtcgttggtaatacagtatccatttcatagacagtttataagaaattttcaaaattattttcttcaagatttaatttaaatccataaaattgtggtgccagaaggaaacaaatgttaaaagagcatgggaaaagtttggaaaagggagcgattgtagctcagttggttagagcatttaacggtatggaagggccgtgggttcgatgcccactgggcgagttagcttttatgttctacataaaataataattccatgttatttgttcaatattgattatgttagctttataatgtgtgtttagttggcgataccgttttcgaaatttgcgcaaacttttcaaggggtgtcgtcaattttcgatcatacccggtaattttataatttatttatttttcatatagataattagaccaagcattagtgatggtcgagaccaaaaatttcccgagactcgagaccgagacttgaccccgagactcgagaccgagacccaaaaaacccgagacttttctcgagtcgagactcgagaccgagacttttttcaaaaaattttcttacacacttaaaaatcgattaaaaatcatataaaaaatcaattttttaagttttttctaacatttttttgcctttttccttatttaagctatagtcagttttttcttttcatgtgaatgactttttacactatttttttgcggcgaacttttttaaaagaacttttcgggaatagaggttcggcggtgccgataggcgccgccgggggaaaatttagaaatgtttaatgcgccttgttaataaatttagtccaaaaatgacaatattttacgattttaattgttaaaattatgattgaattcccatcgaaaaaaacattaattttgaaaaaatgagaagaaaatataaatacttgaaggggagctgatccaacgcaaaaatacggaacagaaacaagaaccaacccactggacaacgtatatttttaacaaatctgaacaaaaaatgacctaaaatttataaaaatagaagtttaccaaaagtcaatcattaggggtgtaaaaaagtctcggtatcggtctcgagtctcgaaaatcgagaccgagacttaaaaacccgagaccgagaccaaaaaaaccgagacttttctcgagtcgagactcgagaccgagactctcgaacatcactaacagtaattttcaaaaaatgcaatatgcatttcataagtatttctatacaaaaaaatgtaataaaaagaaataaaaaataaaagcaaataaaca

SEQ ID NO: 14610 - DNA, 2024 bp, Heterodera glycines
ttgaaagagacaaaaataataaatatatttattaaatctatatccctacagtaattaaattaaaaaagtaatattaatgtattagtattaagtatcacattaagcgcttaaaaatttaaaaaataaaaagatttaatgtaaatgatgggtgagacaaaaagtgaactgacaaatgagttgtaaacaaattacttaactttctttctttttttggcaatttttctctaaaaaaaggatttttagaaaatatatttgagaaaaattaatgaatttgatattttctgaaagagcacacacatacttcattctgtaaaaacatattttattttatttgattattattaaatttttggcgaattaggggtcggaaaaatatgtttgtgtttttcaatattttttaaatattataagcatttttagaattttcatgtaaaattttggaattctttaacaaaaatgaaataaaaaatgatttatttttgacgcgatgacattttttggcgaaatttttacaaattttcaaaaatatttgacaaataaatctgtcgaaaaataatccccccgggatgataaaaagagcaaatacggaatcccttttttttcttaccattgtccgatagagtgccgtcgccatgcgttgagtcctcccactgattctgttgcccttcccactccatcattggctcgtcactgtttcctccgtcagccaatttgactcgcacgacttcggcataactttttgtcttcttcgtcgatggattgtcaaattgtgccggattctgttgacccttttgagagaacaaacaaatatttatttatctcttaacaatggatgggtagttgaacaaatgaacatacaaattgcatatggtccactggtgagagaacatcggccagtccaatggcttctaaattgtagcaatttttatttggttcgataaatcaaaattcggaatatgtgccaaccgaattcgttcggttcatcgccaattttttcgaaactgccgttgacactttgcattcgtgacaaagtcaattgctgattctccgcctcggcattttcaatggctgcttcactgacggattgagtgcgtccaatcgcacctggaaattgaaaacagaaatgtcggcatgaaaaatgccgtaaaaccgctttgaacaaatgcatttgtctgttggcgttgtccaaattgttcaccaccatccgcttccgtggcaaactgatgagtaataatgttcgtagctgaagggaggagttaggggtgtcaatgaatctcggcatttttgcttgcctttgtccggtgacatttcgtcgtcttcgtctgtatcgtttgccgaatttgtcacgattttggttaacaaattcatatttaattacctatgtatctaaaatttaaaggttgaaaaagtgtttaatctaaaagttggaatcttccacgtttcagactaatttcacaaagcaaagagagaaaaattaaaatatttctcttctacccaagagggaccgggaccaacccggaatttttaaaaattaaaaaaaataaaatctttatttatttcaaatgaaatatacaaaagtaaatttttattttgtttttttgtaaaagatttgaattaaatatttaaagaataaattttgacagcaaaggttgtgctctctgtgaccaaaatatcatttgggaaaccatggaaagtatttgactatgactgtacaacaaatcaagggcgtagccagacccttggcttcaggggggggggctgaaattaaaaaatcgatttttaggggtgtgttttccgttttttgaaatcccgaattaggggggtgtattttacaaaatttttcgccgtttttcgccaaaaaattacaattttttgccattttggcctctatttttcaaaaatatggtaaaatgggggtccggcggtgccgataggcgccgccgggaaatttttgagagttttaatgcaattttttaagaaaattgcttaaaattttaaaagatttactgaaaattttttacttt

SEQ ID NO: 14611 - DNA, 1348 bp, Heterodera glycines
ccccccccctgcctacgcccttgcaacaaattgaggtagtaatttaaagctgtgcgtgggattataagcaaatttataggcggggaaagatgaccgagggcgagtatgggggttggagatgcatttgcgactgagaaaggggcggacaggcacaaaaaagggacaaagaaatgggggggggggagcaacattcggcccctcgtcggagttgacatttgcaaaatgaataataaaatcaacatatttcattcaaatctgcatttattggaatccaactaaatgaatgggaaaatgccgaggacgggggaggagttggggaagcatttgctgctgctctgctgctgaagaattgggcagcggtgggcataaagaaagggacaatgaatgagcaatgggcaaaagttcagccccacgaagatttatgatttgcaaaatgaataaaacaacaaatcatcactttattttgtatatttgctgtaatccagctacaaacacgtcagcagaatgtaaaagtgcagaggatgggctggctaatgagagagatttgcacaatgaaaggttaagtttttgcctgtggcagagaaaatgtcaccgattgggggggggggcagataaagaaagataagggaatgtttgtgattgacaaatgaaaaggatcggtcggccgatccttttctgctcgccatccctgccgatctgctggagaaaacggggatcagtactgcaaagcacaaagaatcgaaaaccaacaatacaaatgattttgaattcagaatggtaataaaattagagccaggattattgtaatggccgggaccgggatttggaaaattgatattgaccgggacggcatcccgggtccgggactccggttttttgggaccggtctcggtaccaatttttgggccggggccccgccgggaccgggagtatttcaaatttgtgcaacattgattataaaatttaataaatggcaatattctattttagctttggtatagaccaagcaatgcaatgaccttttttgtttggtttcaaaagacttttttagggacgcttttgttaatttcaccaaaaactaccaaatttgcgattttgggccaatttttagggattttaatgaatttttgtaaaatttttattttttttctaatgccgatttccaagggtatccttggataagcattacaaccacgggggaagaggtacaacagtgattaggagagatattagatgcattataatttataaaaaattttagaacaaattctacttttatttataaaaataaactttgaattgtttaattatagaatatttattaattaaattttatttttttacaaat

SEQ ID NO: 14612 - DNA, 2090 bp, Heterodera glycines
taactcgtcaggggtcggttttagccaaaaaatgccttataacatttttgtagagcattttaaatgctatcgaatggtgtactatatgaaaggaaattttcaaaaattttcgagctaggccccctagaaattttcaaaaattttttttgggttgaaaaagagggtgaaaaatatttttctggggtaaattagggtcctgagcacaaatatgatgtttattttaagtttcagattttttggaatattttaaaaattctttattttttggcaattttttggccctcgggattttggcctaatatttgaaaattcataacaaatcgaagggttgatcaattttacaggaataaagccttaaaaatagagaaaaatcaggagaattttatggactttatttggaatttctatctaaaaaaggaaaaaagttattccagaatttctggaaaaattcgaattttcagaaaaaaattcataactcggttctgaaaagatattctggaaaaataaaatactacaaaaatccgcagttttttgctctattatataaattttatttggcatttttatcacttttttaagaatttttataaaaataaaagtgattttgagattcgggaccaaaggggggtgaccaggatttttgagtgaaaaaattttttcgacaaaaatcttccaaaaacatgtctttaggggttatttgggccgctgatcacgaatacgtgatcagattttacgtttgacatcgttaagccctcagaatccctgtgtgattggggattctgggacatgttctgagggggggggggggggcagcaggttcgaatccggacggtgtaacattatttttctttgtatttttggcttattttacaatgtttttaattaatttttgaagatttcttttaaattatttaaatttattttttttaaattaaagaatttcattatttatttttgaatttgtaaaaaaaaattcatttaatttcaaattaaataaatattcaattaataatttccaaggttgtttttaattaataaaagagtattttattattaaaaaatttttaaattaaaatgcactcgatttttaacttttaataaaaacgtttccttatttatttaattttaaacaatattgtacctctcctaacaatgttgtaccacttctaatcacagttgtacctcttctcatcactgttctacctcttctgatcactgtttacctcttctaatcactgttgtaccacttctaatcacagttgcacctcttctaatcactgttgtacctcttataatcacttttgtacctcttctaatcaccattgtacctcttctaatcactgttgtacctcttataatcacttttgtacctcttctaatcaccattgtacctcttctaatcactgttgtacctcttataatcacttttgtacctcttctaatcaccattgtacctcttctaatcacttttgtacctcttctaatcacttttgtacctcttctcatcacttttgtacctctgttatcacttttgtacctctttaaatcacttttgtacctctttaaatcacatttgtaactcttcatcaaatttgtacctcttctaatctctgttgtacctcttctaatctctgttgtacctcttctaatctctgttgtacctcttctaatcactgttacacctcttttatcacttttgtacctcttcatcaaaattgtacctcttctaatctctgttgtacctcttctaatcacttttgtacctcttctaatcacttttgtacctcttttatcacttttgtacctcttaaaatcacatttgtacctcttcatcaaatttgtacctcttctaatcattgtttgtacctcttctaatcgctgttgcacctcttctaatcactgttgtacctcttataatcacttttgtacctcttctaatcattgtttgtacctcttctaatcgctgttgtacctcttcatcaaaattgtacctcttctaatctctgttgtacctcttctaatcattgtttgtacctcttctcatcacttatggacctcttttaatctctgttgtacctcttttaatcact

SEQ ID NO: 14613 - DNA, 4187 bp, Heterodera glycines
  unsure (1)..(4187): unsure at all n locations
tttacctataaaattggctaattttcagtgaaacnctgtttataaatgatcaaaatttccaatttttttccccggcgtcgcctatcggcaccgccgcgcccccaaaactcctattttttcttagaaatggcccaaaatcgcaaaatttggtaatttgatgaaaaactgttctcagcgtcgccccaaaactcctatttttcattagaaaaatgataaaaatcacaaaatttgatcattttttagtgaaaatctgtcaacaaattttaatcaaattttcaaaaattttcccggcggcgccgcctgccccctcttcccaaaaagtttttttggaaaaagcgcgcctcaaaaaagcgttttattgatttttaaatttggaataaatttaaaaaataatttttgctttatgattttagctattaaaaagttgcagaaaaaatttcgctttcgcattttcgcatattttagcttttaagtttcgcaaatttcacttttcgaatttcgctttttatttttcaattaaaaatctgattttttgattccgaatgcgctaaaattgatgatttgctaattttctccccaaaattgttaaaatcgataatgggagacgaaaaatataatatttgatacatttttgatcgaaaaattgtaaaaataactgatttgaagcaattttgcaaaatgtcctgattttcgaccccagaatctgattttttggacccgatgttctgattttgaaaatttttcgatccgagccctgccgtaaagtatgaaatagccacaaaatgacataaaaattacttttttggtatttttaggcaacattttcaaacttattttttctttataaattttcaaaatatgtaaaaaaatgaaaatatatatgaaaaaaatccaaaatatgtacaaatatgtaagaaaatcccgaaatatgtaaaaatatgtaaataaaagtcccggtttttgttcgcaaacacaaaaaagaaagtgtttttcctgctatttagagcaaggagaagccaggaaaaaaatgtatttacataaaattggcagccctacattcgaccaagttaaatataaaatgaaaaaagaaactttagctccacaaaattcaaatttctcctcttcgatggcgagtttggcacctgtcgctgtgcccgcctcggacggcggtggtggcggcgaatgccatccattggcgagtggcgacagtttggcgactaatgccaacagcggcagcagcacatgcgcacactgtggccgcgaaaatgcatccacgtacggggagcgagggcacacattttggcccattttttagggttccaagttttaaatttttgggggttttagccgcattataaattgaaaaaaagagaaagtaatgggatttagttaagaaacaagtttaatttttgcaataatgaaattcgggcggggcatttttaggagccaagaataattaatgcatttttaattcaatttttttttggggggttttccgactgattttgaaatgtctaaaatagtgattttttttagcttcttttgactcctattggaacccatttacacatttaacttcctccaaatccgctttttaatgcaattttttagaaaatggatcccaaattcgcccccacaaattcaatgccaatttttccagtgaatttgccgactccgctgggcccaatttgctgctgctgctccacgccggtgcgctcccctcacaggcatggctttatcctttggctcctaacaaattttctacacttttcatggcatggcttaatttttgtcgcctgacgggggatgatgtccaatttttctgacaaacttttttgggaatttggtcaataaatccgcttctgtttgcaaaattcgactctgattgataagtggtcgtttttgaaaatttattaaatcaaaggaacagaaatcttttctcattgaaagtcgcgaaaaatttttcccggggattaattaacgaccctttggtcgaattcaggcctgatattcggaattggttgaaatggtggtcagcgactcacaatctgaagacccccgggaacatttttctcgacttgtcaccaacttaaaaattttttggaaatttgtaacactaatggaaaattaaaaaacaaaaaaaatatttctaaaaatttaggaagcaaaactgttgcgcaaacgacgcgatttggcatgccaaagtgccgaaagtgttcctgccgctggcgacgacgagccgagcgtttccgaatggattttctgcgatttgtgccggaaatggtttcactgtgtgtgagtgaagcaattgtttttttttcttaaaatcaacaaattttcaaccatttttggaaactcactgtttaattgaccacttagtcacaatagttttcgcggatttaatgtcagtggcaacacaaaaatttaaaaaaaaaccggattttttttttgtttgaaacccttcgctttaagttgtgtcaatgtgcaggaatatgaggtaaaagacaaatgcgaaagtgcacacttttccacgtgcttttgaaatcgtttcccccggcatttgctgattcagaattattattttttcaatccctgatcgccttaacagcatttaaataagtgattggaaattttttgaaaaatcatcaattcttcaaaacaacatgattaatgcccccaattaactagaagactacgatttcttaattttaatgctgtttaggctatcagggcttgaaaaaatttataatttgaatccgattcaggaaatagcgcaaatgtccggggctcctttgaaattatgagaattttaaatctttttttaactttttttcaggtcccactgatcgacaaattccattgtccgacctgtcgctttgcgcacggggacagcatcagtgggttttggcaaaaaattattttctaaaaattccagccttttttcaaaaaaagacccctccaatgattttaaataaattcgatttactcattttccttttctttttgcagtgaaagtgcgccgtctttcccatcgctatgcctttgatgatgagtcggagcgggagatgcccgagcaaatcggcaccgagcaatggattcggcactttcgggagcgctacaaccaattcccggaggcgtaagttggcggacggtgcggtggttacaggggctgtggctgtactccccccttcgctccttttaaaaatttcagttttttaatactttcagtgccccccccccctttatggcaaaattttttgttcttttagttgcattgatttgggcattttttgggatcgctggtcacgaaatggtgacatccattttagcctgttccgaagtcgaacaaaaagtcgaattttaaaatttgcactttcaacatcaaaaaaaaaagtcataccgattcaaacacaatacacaattgtggatttttgttgatttccttgtgactaaaattaaaccaaaataaaatcgaaattttaattcattttatttttctctttttctgtcaatatttgttgagtgctgatttgtccccatttttcagtcatcagccgtcgctgatccaagtgtttgaccacggcgccgaaatgttggccaacttcgactttgagaagggttggcatttgcccatcaaagtgtgccatccgcatgggctcggcctgcgcatgccggacgacccgtactttgacgtgttggacgtgtgccgtcttttgagtgcgttttgaacgcgcatttcttggcaaaataaaattgacatattatgttcaaaaacaaggtttttttgatttttttttttcaaataaacgaaaaatctatggtccaaagaatcttgcggagactttttcagggatattccaagggcaccccaaatttttaaggtaaaaatgcaaggcctacctcatcaaaattcccaaagaattttttgtaaggaatttttgtcgtttttttctatgtgctcttagcaaattttgtttttgccagaaaacataaattggacggcacggcataaaatgcgtacataaaaagccattcaaattgccccatttttcaacttttccccaggcgacgccgtcaccgtggacaccatcgacgtgtacgcccagcgctcgtacacaatgagtttgggccgcttttacggcctgtggcgcaagcgggtgagagaacggctgtacaacattctgagc

SEQ ID NO: 14614 - DNA, 1915 bp, Heterodera glycines
ttggggataattgaattttgtcaacgataaaaaaagaatttccccccctctccgaagcattcaaccaaatttttgtcattcctatttaaaggaaattattaattaattgtcctcctcctccaccttatctctctctctctctctcctctccctctgaacattgttttgtcccctctctgctgacgctcatcatcatcatctccctgattagattagattccgataaatacgccataacattcattttgttcatcgtaaagagagagtttgagtgggaggagggggggggggggggagttataaatttagtatggtgtcgactaatgggacaaaattgagcgggcggacaaaaaataaggggggggggagagagtgattgaaggcacccttccgctgaagggtttacaaaaaaaacgacgaaaagaaaagaaatataattgaaaagataacaaacattttgcaaaagtataggggcagggaccatcaatgcaattgttggacagttttgcaaaattttgcaaaagagccaaaacaacaaaaattgataatggccccggggggggggaggggggagagacgagcggtggagacaaaaattgctcgtccgttgtcccattattgatgaggaatgagagtgagaggggggggggggggaggaatagaataatgggaagaagggaaaaatataaataaaaagaaaaaatttgaaaatttaatgaaaactgaaattaaaaataaattgccgagattctgaagtaaagtgtcaacgttttaccaacaaggtcaagttgaactcatttgtaagaagtgggacttgaaaagtcatatttttggggcgagatattatgaattttttgaaagtgaatctatcatttgtgtaataaattattaaaaaaaataaaaataaaatttttcttttatcaattaaatcttattatttatttgcacatatttcaaataatttcatctattcgatagaacattctaaaaacttaaattcgggggtgaacctatcattttgtgtcacactgtaataaattcaaaaaattcagtaaaattgagttttgatgagagagcggaccctaaaaaggcatttaaatatacaaaaaaaagaagatattaatctgatatcaaagataagaagaggaaaggaaggaggaggttaaaggatgaaataaaaaaactgaagaacaacggaagatgatgaaaagtgcgttatcaaatcacaccgtttcacttccatccatcacatacagtcacgagggcatgaagttaaaagtatgatgatgatgtgattgaactgacagacagacaatgagagagtgagagaaatagtacataacattttctctgtttggcattgtgttcttatggcaaaaaaaaattttttttttaaatgaacagacagcacagaaggaagaggaggagggtggaggtcaactggaaaagcagcctactattttggattttttgggaaatttcttaacagaaatgcaataaaaatagacatttcaatgcactacaccccccccccccccctcccgccgttttgcccggaaagtttttttaaacccgaaaatttttaagttttctaacttttttcgaggttaatctaaaaaaatttcattaagagaattctttcgaacttaaaaaaattccaagtttaaaaaaatatatttaatttttccaaacaaaaaaagccctaagaaaattagaaaactataaatttatcagttttttagaaaaaaaaaaattccctgggggaaggggatgggaaacgatacgaggtggaaacgaactgctccccctctcttcaccacccccactaacaacagtcactcccactccaccacccactttttgcattaaaaatattttttgtttataatgcatttttatttgccccatcgtcatg

SEQ ID NO: 14615 - DNA, 1215 bp, Heterodera glycines
aatttttttctggctatgcctgattccattgatatgtgatgtcatttcaaattctcaggaagtttaatgttgaacagggggcaaggcggcttataatccattagtcaaggggccaataattacccctcttttgttcgtccgaccggcagccagcaacagcgcttcgccaaatgccctttttatcaaagtgttgtgcacacattttctggccttccacccgccccccccccattcatacctaaccctttttgtgtgttcattttacgcctttttcgacggactatcgacccaaaagaaggcgagaagtgaatttggtgaaatgagaagaatgagaagaatggaatgaattgaaatgaaatggaattttgggcattttttgatgggtatgaggaggaggacgaggagatttattgcaataatttgacattaaatatgtaaaagaaatggtcaaattcggtaagaatttaaaaaaacaaagaaaataaatacacaaattccggctctagtgcacactttatgagtccaatcgacttttatgagccaattcttcagtttctttggccataacttttttcttacttggtcaatacatacattcttggtatcaaacgaaaacgtagtcccgggaatttataaatacaagaaaatagcaaacactgacagcaagtaaaaattacaataaaaaaacgaaatttaactcttttttttcgtttgataccaagaatttagggattgaccaagtaagaaaaaagtgttggccaaataaacttaagattggattcataaagtgcactagagcccaatttccttaaattgcactacaaattccggacttcaaaaacgggaaaatgcatgaaaaaaggacaacaaaggatgtttttgtgaaaaatatttaattttaaatttcgaaatttaatggaattacggaattacaacaacaaaaaacaacccaataaaaaagccgatgaagaaaaagagaagagagccaatggagcactaattttgtgggatttctaagacaaattcttttatacgtgcccttatcccctacactgagagagctagcagcacaattagttttgtgccgcctccaatggcaccggggggcccaattggccggcccttaagggcatgtaagatgaaggaggaagatgcccccgagagggttggaatgaggaggcggccgggatgggttcaatttggattaaatgctga

SEQ ID NO: 14616 - DNA, 3419 bp, Heterodera glycines
  unsure (1)..(3419): unsure at all n locations
ttttgggctgcgcttttcnggggaaaaattntcggtctaactatccaatttttgggttcattttatgctaaaattcattggttttttttaaattcataaaatttcgagtttttttctttgattatacgacgggttctaaatttttttttcacaaaaaaaaaatggagacttcgcgtttttgcaggtcaaggccagctgggaaatgcttgatgcggagaagctggaacatgcggtgaagatgaaggagcgtggcaccacctttttgaaccagggcaagcacaatctggcacttgccaaataccaagtgagtgactttggcagaacatatcagatgttgcgttttgatcaatattttctgacaattttttgcaatggagccaaaaaagccgaaatttcaaaaaaaaaaattcagcggcaagattttcgagtgcacccgccatattanattgtccaattttttttttgtatcattttttttcaagtcggtcatttctctattggaatacgcaaagcccaccaaatcggacgaagaaagcggcaaggagttgagggagcaatttgagcagacattcatcgcagcattggtatgtttttctgggattgtttgtttctaatagatcggacaattttcggggcaaagataaagaaagaaagaaaactgtcttacaatggcatcaggggcgtatctagaaaaaaaattttcggggggaggacccgatctgaagactttttttttgtattcacccaataaaaaaaaatttttgccgttttaaggcaaaaaaaaacttgtaaaaataatggaaaatggaggtccggcggtgccgatatgcgccgcaggaattttcgcccgaaatcctgtcctggaggtccgtctcgaaatttgttttatttatgaaaatttttctaattgtaagattttttccttgaaaaatttctgtgttgcaattttttttaaatttctccggttcgacagacattgatgacatgtccatattttcagaaaatcttatttcttaattaatcgtattatttgttttttaatttttttttttttgtagctaaactcggctttggtcagcctgcgcatgggcgagtcggtggaggccatcaaacactgtgacaaagtgttggagaagcagccgaccaatgtgaaggcgttgtaccgtaaagcgcaggtcaacaaaacgataaaaccgaggaggctctttcaggggaaaatgagagagtgtgtgtttaatgaatcaatcgaaaaaatacggaaattttttcttgatacaaacaatgtttcgaatagaaaatttaaaaaattttcattacaaataaattttgttttctttaggaaaggggatttagttgcttggtttttttaaaatataaaattttgaaaatttcagttcgaaatttcttttaaaaagtgtttgtgggggaaacgatcgggggagggggcgtgggtagaacgttttgtgcaaacgacggggtagagaaaaatatgcatttagatttcttatctcataattttttgggtttcaatttttttttttttgcaggccctgcaaaaccgcaaggattacgcggaggccattgagcagtacaagcatgtccaccagttggatccatccaaccgcgccgcggcgcaacaaattttggaatgtggccaacagctggccgcccagcgggaggcggagcgcaaaaagtaccgcggaatgttcgaacggatggccaaagggacggacagcaaaagcggtggtggaggtgacggtggagcatctgctgctactccttcagcgtccgacaacaatgcggaaggggtgaaaaaaacaattcttttgtttttcaaaaaattaaatcaattttcatagaggggggggggggtagcaaaaaaaggggtcaaagtccgtgaaaaaaatgtttatcttttgtcattaacctaatccataccattgagcgcgaggttgatgcgtgacaaacctttgagaccggaattttgcaacgaatgggactggaacttgacggtggaccggaatttccgactaactttctcccttccataccccacccccccttgtttggaaaaaatttttcttagaaaattgtagaaatagaaaatagtgtttttgtgaatgtaattattttgaaaaacaaatcttatcttaatcatttcaacaattttttttaaattttccgcggtcgggaaacgaacgaactgcttcagtatccaaatatgacggaatagattaaacattttttcacacctctgctgtcaattaatttttttgttttatttgtcagcagccgtcgagtggcgccgcctgaactgagagaggagcaagcagtacatcacgataaaacagaccggaaaagaaatgaaaatggagaatcacaaaataaaatgttgatttttttgacgcttatgatgattatgatcttaaattgtttacttattttgtttttgtttcctcatccatcatcaatcatttggttgtttcaatgttacagcattatcgttttaattttgctttttacaaaactgtgtgacatcatttgtttaagaaaaatgttataccaacaaatttggttttgtattggttaatttgtgagttttggggggctattttcaagacccgagattgagaatcgaatgccaaaagaattgtcattgatgataggatagacctgctgctattctgaattggcatgcgtaaaaaaaatatgttttgcaaagactagtgtattcagtggggtcagctcaactccagagacatgttggaattctgctgatttcgacatttttgggctccgactctcggaattttggttgaagatacggattattatttgagaaaatcaatcgtttaaggttttttggccgtaacattttggtaatatgacaatttttttgggtttttacaagctaatagaagcttttaagagctacctgaaagatatcaaaatatttaattttggagaaaagttgtgccgtgtcatttctaataatggcgccgaatgtgggcgttgaattgggcggttccccacacactcactcaaaaagttcctctgtcatgcactattttacatctcaaagtgtctggcacttactatttcttttttattcttgatctctgtcccaatcgctgtgtttaaatgaagtcatttttatttctccaattgttgtaatgtgagcagagaaagaaaaattaaaaaatagtgcaaggcagagaattttactccttaaaaatatttagacaaatacagtcatggtcataagtgttgtcccatcatgctttgaaaaaaatattgcgtataaaattgtcattttccaatttcaacagataagtagcataccattggatagcattttttatgggctttccctcgggtgggatatttgcatttgtgacataaacatttatttgatttat

SEQ ID NO: 14617 - DNA, 1828 bp, Heterodera glycines
cggattgacaagtgatcgattgacaagcagtgaacacttggttgtccaaaaaattactaaatattgcgatttttatcctatttttaagaaaattccgcctgggattgatttggaactcaactttttatacttaataaatcttaccaaattttataggcatactccccggtaaaggactaatttaacctgaaaatacttcaacgcttattggttttaagaatttttttcaaattctgagtttttgaaaaaatttttatctcacatatttttcgataagagtgatcagatgctcaccaaactttgcagagatacttaagtcaagagaattaacctatgattaatttatcttcccatttattttgcttaaaaattttataacatttttaattgtgccctattattttaggtttttttagtgaaaatgtaattcctcaaatttttcaagtagtgatcggcagaagcgtaccatattttggaatttttaattattatgcacttgaaaattatgggtgcaaattaattaaataattttattcctcataaattttatcggttgtttttgcaattgcaaatcaaaatttctcaaggttttcggcagtgaagctcactgttgacccactcgcgcatccattcaaatttggatttgattttagagcctttagaattagcaaaaatgcaggaacaagttgacttttcgcgcgaaaaatggattaatgaattaatgatttctgttgatcaagcattcaataggcacaatgatttgtcatgtgccaaaaaatgcacgaaaaatgggaactctatctaaaagaaaactttttctttatgaatgataagtgatggctttcttatagtgatggtaaaataataataacaatatacgcttataaaaatataataaattaaaaataaataaacaaaaattttggtttggctaaaagatattattttaatatgctccatttatttatttatatcaaataatgtccaattttccattaatgtctaatttttagtgtccaatttccgtccaaatgtgcgggaattttttcttttaaatttaaaaatataaataaaaaacattacatatataatttttcctgatcatcaaaattcacatttttaatatgcaaaattggtcaaaattgattttagattttctgtcgtcatttgtattcacattaaaaatcaatttcattttcgccatttcagctgaattattgtatattttttttgaaaaaaaaaatttttcttagcaaagcataggcatttcgattttatttattttttctacaatttttaatttggcattatttaatcccacttattgtatttgttaggatcagcaactgctttttggcatgatggcctctggttaatcctttttcttttatacgtaattattagggccgcaacttttagtgacgaaaaataccgaaatagttaactaaaatagtgagtaaaaatcccaaaatagtgaagaaacagtgacaaaaagtccgaaatagtgacgaatagtgacataattttcagccaaaaattgagcaaaaataatttttattcactatttgcagttgcaaatgagtaggactgggatttttatgagcaaaaaacccaaaataattacctaaaaaagtttttaaaattaaaaatttttgccaagaaagtaaatttttgagaaaattttttttcatttcataggagtatattttgaaaaattttagctcgattcttaggggtgtattttttggttttattgcatttttgttaaggaatttttccaaaaaatgtcgaaatagtgaaaaatagtgacaaaacgccaaaatagtga

SEQ ID NO: 14618 - DNA, 2191 bp, Heterodera glycines
ttattttgttcatcctttttttttcatacatggcaaaaaactttcccgtcggtgaatcatttcttcatttccaattggccacttttggccaatccttcgtttttcattttcattgattcattttacatccgcataaattgttgcataatattaaatgacatttttccgaaccaaagtcttcaaaaatgttcaatttcttttttctgctgatcttcgcttcttctgcccaaaattcgtttcaacaaaatgtaaaataaattcgacattattttgtttaatattttattttttcgtcaaggaacatttttgccattctctccatggtaccgatgtctgtgttgaatgtggcccattggcggcggacaagcaaaaatgtaaattgaaataaacaaagaggaaaaacgtcattgtttgattcacaaaaaaattaatattttgaatcaccaggtgatcagttgcgcgtgcttttccctccgtcaccaatgcctttgaaagtgccgcattctccgcagctcccttctctggtcattaacaatccatcgggagcggaagcaaaaaaaggaatgccaattgctgtaatggtaagtcgcgaatacattatcaccgattaaaaaaaccaaaaaatttaatttctattcaatgaaaaataagaactaaatttaattggttgtaattaatcacaataaaaaggattactgttggatgagctgttcaattttgttagtttttgaatattttagaatacattattgtcaaaaaatgtcgaattagagaaaaaagaacagcagcgaccggcgacgaaattgaacaatacgcaaccaatgagccaacatgatcaagtgcagcactttaattatatattttaaaatcaattgaatatttttcagccaaaaactgttcgcgtcgccaaaaaatcaaccagtgatttttatgattaaaaatttcatatttaaaaaaattaatcatttaatagtgaataatgggaccacactaatggcaaatgccctgcagatcagcaaaaattcaactggtgagtgttttatttacattttattttaaccttatttgaaataactttatttatagaatttttattttcagattatttgatcgacgaagtgttatctttgcgaacaaaaatcaacgaaattgagaacaaaatggacaataacaatgtgagaaaaaatgtttaagggtctttttaaatatttatacttaattagcaatttttggcattaaatttacgtggcaccaacagtcaaatccatttgctgtgttgattgaactttttgctagagcttaatattccttttttggttttaataaatttttacatttacataaaggtcattcaattcaatgaattacgacagaacatcacgaaaatcgaacaactcattgtaagtattgtacaaacacaaacgtgtgaagaatatttgaaaattcaaggataattcataaatttattaatatgctctagttaatattttttacttccattagcaatttttcgctttaattttcattacccctatgggcaaagccaatcatgtttgtttggttgaaacatttaagcttaatattccttttttaaacggttggatatttttcagccaacaaatatcagcgtcgccaataattcaagcagtgattttatgtttaaaaattgcgtatttttaaaagaaatttaaatatttgtagacagcgtgaagaagaaactgtcagtgcattcttaaagcgattgactccattagtggaggttgtttatgctaatttggggaaaaagcaactacgagagcgtctggtagaagagcttcttgaccgtttgaagcctaatatttcatttttggtgagagttgcaggattggctaaggagaaggatttagaccaagtgaaagctcaggctgaagaattggagacacttctagcaactcaaggtggccaattaacccactcaatttctaagctaaataccgggacgaaattgcgcacatcggctcacatcttttggcttatgccgtcagtgctcctcacttttggacactttggatgaggagaagaaaaaagtagtggcacggtatgtgaaggcgtgccaagacacaccgaaaatggctaatgagggaaaatttacggaaatattaatgggaaaggaaaagcggcgcctcgtcttctgcacattaagcttggcgga

SEQ ID NO: 14619 - DNA, 3404 bp, Heterodera glycines
  unsure (1)..(3404): unsure at all n locations
tagggccgcgatttctagtgaaaaaacttttttttttgctcgattgatntgaagaaaggagctcaaaaacgcatttctgcgttcaaaatttttcatttgaacgttattttcgtcactagaaatcactattttcgcgttttgtcacttaaaatagtgaaaattcacttttttggcgttttgtaaccgcaagtgtcagcgccgcaacaaaaatgaatgatatattgaaacagagcagacagactttatacgaagaaaaagcacttttaaagataacaataaagcaggaaaaaaagaataacccatcacaatcattacagaaataggaaattacagcaagaaattgtctttaagaataattccaattagttaactaaataatgacgaaaaaagaaacaatggaatttatgaacagagaaaaacccaatttttttagtttttacgactaattttggaaaatttttaaaaagttagtttatattttttcaaaaaaatagttaaataaaaataactaaaaaatccgcgcccaacttaccgtcacatccattgagaaagaataagctaaatttaggggaaagaaagcatcgaatcattcaatatcatctctaatttgaagcaaaaatggaaggaagctaaagaatatggaacaagcaataaaaaccaaaataggcttttgcaacataatagcaaaaaccaataagacctcaatcactaccacaatgggcaatttacgtcggtcaaatcgtcggcgacgacgggcagaagaattctttaagacaatcaaatttttctggctatttacttgctttttggcactgtcactgttgttcaatgtcgacgacaccatgccattcagaaatttaaatgcatcatttggcgttgctaatgacccgttgattggttccaattgtttgatgacggcactctttaccggcaattcatcgggcaatcccttggccaattgcatcaattgggtgccaaaattttcgagcggcactttggtttgtttcttttctgacactttcaattggtccaaaactttttggccaagaattcgtattccttgttcgttgatgccctttttggcacaaatttgttcaacgatttgcttaatctcgttgatttcttgggcgaactctttaatttgaataacactagcattagaaattgtttggcaccccttttccaatgcccactcgaataaaacgctaaaattgaccaaaacaatgtaaataatttaaaacatttaaatttgaataaaaaactaaaaaaataataaaatttgcctgttttggtctttcttgtattcttcacttttcataactcctaaactttgattatgttttcattttttgctaaaaatgaatctcaagcacctctaatttcaccgagaagctgctcattgccattgcttgaggaaaaatagcaaagcaatgccaaagtaaaagaaaacaataagaaatgcatggtttttgttttcagaattagaaaaatgaataaatggtaaagatgggggacatatttttatatggattaatattagcaaacataatctaattatttcatcattttccacctcagaatcgatattgccaaatcatcagcattcagctttaggcaccacagcgccaatttgtaagccacccttgccaaacaaacatacaaccgggggggggggggggttcgtaattggagtcgggtgagggctcatagggagaaaaggggagaaagggtcgacgaggggggggggaagagaataagagagaaacgaaagaaaaatgataattcatacagctctcttaataatttcattaaaatttctatattttttttctcgctgcgatttaatacgtaagaaatttcatgaaaatgtgtaactttcgtaattgaagctggaaagaggggaggagggggggggggctctttgtaatcaaaggcggtcagaaaattaaggagagaaattgaatgccggcgaagggagaaaagcgaaaattgttgaaaatttggaataaattcatttacaaattcattaaaattgcaaaaattttttacaactagtggaattgtaaattaggagtgatactgtatgagagaggaaaggtcatatttttgcacaacgatggtagggagcagggatggcattccgaggccccaaaaattttcgggcggaattccgaccccaaaaagtctggattccgaccccaaaaattttcgggcggaattccgaccccaaaaagtctggattccgaccccaaaaagtctggattccaaccccaaaaattttcaggcggaattccgaccccaaaaagtctggattccgaccccaaaaatttcggaagccggaactcagaaattccatgcaatcactggtagggagagaatggagaatacattaagcgaaatatcatacacggcgagtcaattttgggctcccagtgcaaataagtttattttttatttagtaatcagaacgccaaaacttttctaaattaaaaatttttgttaggattttcccttgtaaaaatggaaagagccgatctcgaattaaaaagcattttggtaaataaacaaagcattatcctataaatggagtaaaagtatgagtctatgcaaaatttcaaaaaaatctgaccctaggaaaacatttttgaccaggacaaagttttttcgttttctctcattttggcatactatttccatgtctctgacatataaaataacacatgaatcatttatttgccaataaacaatttttttaaacttttgactaacttagaaatattcttcagaattttcccttcaaaatgagcataaaatggttttatttggtctataattgacaaagttataagctaaaaaaatttcataaaatcaagggtaaaatatagtgtctactttttactgtttgtatttgttcttttggcgttctgtttttattattattttatttatttgctttaaaaaattgaaatttatacacaaacacaggaggatttgaacctgagacccccctttttttgactaactcacagaccactaagacgaaaaaaccaacttaattgtacttgcagcccaaaattgaatcgccatgtctaaaaagtcatggaaacatgtttacggggattttcagggtcgctgataacgaatctgaggcaatggtctagaattggtgtcccgacgaaaaatgttaaaaattttctaggtattttttctaggcttaaaaaaggcgctgatcacgaatctgagctcagattttgaaaatcatcgatttttatctaagattttttgtcaactacataattgatttttttaaatttatttttttaaaaaagtttagcaatgaatttggggttaaaaaatacgctggtcacgaatatgaactcaaattttaaaaatcattgactttt

SEQ ID NO: 14620 - DNA, 1560 bp, Heterodera glycines
  unsure (1)..(1560): unsure at all n locations
gaaaatcgatcatatggcaaggagccgaaaatagccaaaatatatgaatcaatcgactcttcttgcataatcattttatgtcaaaattgattaaaattcttcgtataatttaagattattaaatataaccaactgaatggaaaacgctgtttaacaaaatgaaaagcaaaaattgattaataatttttccaatttcttntagttttcgtagtttcgttttcgttcgtcaaaaaatttacttttgttttcgcatttaaaaattttaaactttcgtttcgatttcgtcagacgaaatttggacgaaaaaagacgaaaatatttctacctttaagaatgactttttttggtaaaaaaataagtcatttcatagaaatgttgtggtttacactgtgttgcattagaatagggacaccctattttttgggagtttgaccgcttcccatgaaccaatcgatctgaaattttaactgtacgtagcaattctgaaaatattaagattctaacaataagaatatgaaaggatgttggaaaaaaattttacgaatttttttccaaaattggggtgttgcattagaatagggacactttggaaaactaagaaaaatctcaacaactactaaaaagaaactgataaaacaagctaaataagaaagaacaaatcttttttcacatttctgtttattttgcgtacagaaatatgtcttttggggagagttatgttgaattttctaagttttcaggagaaattaagggccaaaaggcttaaatcgcctctaacatttgcccaaccgaatcaaactaacagcaatcagctctaagataacgtacagacatcctttaagcattttttattcattttatgccataaaaaaggcattaaacacaaaatttttgcgggtgaaaaaatacgaaaatctgagtaaattcgaaaaaaaaattctagggggttggaaaaaattttccgtagaagatgattatgacgaacagaaagagcacaaaattctctacaaaatggcctttgaatgagggaggtctctacgtcgcgtctccgcgaaggcgcgactttctgtcaatggatggtcggaaaagtgatgacaaatgcctgaaaaagcaccttatacttaatttaaaaatataagatattcatgcttgcttatctttcgatcatcatcaaaaaattattttacaccaacttgatcaaatcactccttcataggcgtaggcacaccacaaaatacgttgaaagcaaatcacgaatccaccataatccctggacgacaattttgaaatggtgatcttttcgacatactcttatttgtttttaaaattactctgtactgtcaaaatccatctctgacaaattcacacgttgtcttagacacacagcaaatagtgaagaaaagtagaaataatttactgacgaaatcgctcactgaccaagtcacataatcccttcatattacaccgcggaggacgaatcatcccgcttcgaagacaaaccatggctgtggttgtcaaggctctttttaatgaatttcgtacactatacggtttaaattt

SEQ ID NO: 14621 - DNA, 2830 bp, Heterodera glycines
atgtaggaatttggtggatggcggaggtgtaaaaggtcagcctgtggtgggaattgaacccacgaccccagctttccgtgctgtgctctaaccactgagctacacagggcaccctttacacccttctattgccctttttcatcagtgcaatgagaaactctctgcctcccaggcactttgagagagcccgcactacaataatatttttttttaatttttcatattttttgcatttataaattacgtaattgtaaaatagctcaacaataaaaaatggctattgtgaaataactcgacaataaaaatggctaaagatttaaaaataatggaatgaaaagaattgcgaaactaatgagaaacgaatgtactaaggaaaaattgaattgtttaattaaacacgaataaaaaactaatattaaaaatgatgtgttcattagcagctacttcttttcttctaataaattattcttctaaaaaatctttctttggttctatttttaatatattagacgcataatccatctatgaaaatcatcgaatttcgaatacaaaatgacgtgatgcttgtcatcatttatttgattggttctcaaccatcaaacaccctctagtgcattttcctccgcttttccaaacaattttttcaaatatttttcaaaattttgacggattatcccttcaacgttttcatttgttgggcgcccattcgctgtttctgttgccaatttcaaaatcagtttattaattgtgattagtggttgattatgataattaaatctttcctcattcaataattttggctcaaattccaattcgaacaatttgtttaattcatattcatatttcaaactgatcggttcattaaaataaaactgcgaaattctgaccaaacaattcaacacataaattaatggcccgtcaattccaatttgtttctttttaataacaaaatttggttttgctgtgggaattgcggcatattctctgtacaaatattcgtacaaaatgtccaaataatttcgatatttttggcattccgttcgttcatattgttcagatttcgccccaattttgtcacattgccaattctttcgcataaaatacacaatgccaaggtaagctgcttgttttttcaatgtatattcactaatcatttgaatttcttgctcattttttataaaagcaattaataggtcgtcgtatatctgttaaattgggggtcaaccaaaaacaccaccagccaaaacgccgcccaaaataccaccaattcaaaatgacacccccaccactccaatagatcaccgacccaaaaggtcacaaaattaaaatgaggttccggaaaaatggacaccgccgaaatattggacatcaaaaaattggacattatagggtacaaaaaaaatcatataaacttgataataaaatcaaaatcaaattataataaaattattttataccgcatcgataactcaaaaaatcagaattttctggactcggtacagctttttctcaagcatccatgtgcatttgatttctctaaattttattggcttacaaatgaccctttattaaataaaccatgtattcggaatcgaattagattattaatccaatatttctaattaatttttttttcaaattttatttcttttttttaaataaataatatttggtgcccaatcttccggtgtccaaatttccgcttggtgcccaatcttccggtgtccaaatttccgcttggtgtccaattttctgaagtccaaatttcaagtgtccaattttccggtccccattaaaaattcgcttgacttaattgtgacacgagcatttttgaaaactcatttcttcattttgattatattcagtaagaaatatttttagctggtcaaattttgggcggagacacttggagggtgacgttttgggtaggtaggaggcccattaagttgtttgaaaaaattatttaaaaagtgaaactcaccgatagattcgcacctgaaaatggaactacaataataatgagcaataaaattatagctgcaggaataaacatgttttcagttttcgtgtaattaaaaaaacaatttgcacgactttttataggggtttatgaatatttagaatcgatttctctaatattttcattttatacatttccgatttttttttttgaatatcatttataattgatttttgatttttgcactattttcattttaataaacatttcctttttgcatttttcatttgaataaatatttccgttaaaagtatgaattttgattttcattttttgttagttttataagaaatcgaataaatataaaaaattaatgactaaaagcataaaggaaataaatactccgaatcctgaaacgtattttcagattgaaaatgtgtaacattatgtatttaattttatgcattcctttcaacatgaaaagacaattttattaaacggaaaacagaaaaacctttcttctaattattatttaatttaaaaataatttttcttctaattcattagtataaaaattcgctaattattaggaaatattttttccatattataaatcatatttttccttccaatattgaacattttttctactaatgttaagcttctcttcaatttttcgatcactcacatttgggttttgggctttgtatttctcaaatttttgcaccatttcaattttttcggcatcattgaatttttgataacctttaaagatttttttaaatgtagaatttttaaaatatttaccttttttgcataggtcaaattttttcttccatttataaattgtactcaatctaacaccaattt

SEQ ID NO: 14622 - DNA, 1195 bp, Heterodera glycines
agcctcagaagaattgccgattttcaagcttttaacgattaaaacagagaacaaatggccaaattgatggaccattttatggctggacttcgctcactttggcacatcataaaaagtagggaatgataaaatggtggacattatgacggattataatgataagttataacgtcttaatgctcaaaatttgcattatgtcataaataatcaagacttataaaattatctctctttaatctcaaaatttatttatttcattaaaataattttaaacattctaaatatttagacaagcatttgcttcctaaagatggcaaacaccaaaaaaggctgacgcgaagaaaaaagcgaatgtatgctgacgattacaaccccaactacgaaaggccaacagcaaattttttcggtgccaccagctcaaaattcatcgtgtgctttggcagtctgatccttttttcattttttggcggttttggcattttttttgcccttaagctggcccaacatttacagaatgagcacaatgatatgacttgggtggacggtggtttgatttccattctcatcttttgtgtccttgttttgatgcttagtggcttggcgttttatcgctcgtgcattagtgctaattaatggggctaaataattttttttaaatatttatttatgtacacgttcatcgaaactcttcattcagtcatggcaaactttgttatattgtcataacagtaaagaaaatttataatttggcaccatttgttagagctttccatgtgcctaatgttttcagtaaataaacatttcattcatttaaaagggaagcaattagtaatcaaaaatatgccaataaatttcattcggctcattaagcataaattgtccctctcttatggcacgcaaaaaaataacaataatattttaaaagaaaatcaggcttattataggttaaataataaaaaataataattttagacaaaattttatttattagaaatacatatttaacgcgaaagtttaaatggacaaaaaataaaaaaataaatttcgaacaaaaattttacttaattaattaaaaatttaagacttttatatttttcattaacactcaaatgttggctgtgattttcaacctttcccaatgattgaaagaaaaaaatccaatcctttaaataatatgcttaaaatcgaaaatatt

SEQ ID NO: 14623 - DNA, 4065 bp, Heterodera glycines
  unsure (1)..(4065): unsure at all n locations
tgctaattaatgggggctaaataattttttttaaatatttatttatgtacacgttcatcgaaactcttcattcagtcatggcaaactttgttatattgtcataacagtaaagaaaatttataatttggcaccatttgttagagcttttcatgtgtctaatgttttcagtaaataaacatttctttcatttaaaagggaagcaattagtaatcaaaaatatgccaataaatttcattcggctcattaagcataaattgtccctctcttatggcacgcaaaaaaataacaataatattttaaaagaaaatcaggcttattataggttaaataataaaaaataataattttagacaaaattttatttattagaaatacatatttaacgcgaaagtttaaatggacaaaaaataaaaaaataaatttcaaacaaaaatttgacttaattaattaaaaatttaagacttttatatttttcattaatactcaaatgttggctgtgattttcaacctttcccaatgattgaaagaaaaaaatccaatcctttaaataatatgtttaaaattgaaaatattgtttcgtttttcaaagagtcccccacagtgatggccattttcgacccgtcccctctgatcgccattttggcattttccctttacacgcccctcgccctcgccactcttttgctgaatctttttgccattgtcgtgttggcacatggccatcgctatttctcacaacgcttcttcttcattgttggacgtcatctgttggccgctgaccttatgtccaccgctgcgcaactgtccatcgccgtgcccgtttcagcaatgtcaacggagagtgccaaaagtgggaaaagcagaaaatactccatacccagagtcaaaatctcaaatcgttggccaaaaaaccgagacccaattttttgctcttgagcgttcggtatatntggtaaatacaattcctgccttgtttatgaggaggtctcccaaccgaactgattttgttgcaaaatgcctctcattaaggccaaaagcctcagattattgtttttccaaaagattaaataccctaaaattccataaaagcaataaaaaacccttaaattcccttttcaaaaaattcttattgacaaatacattgttgaaagacatcacatcttggagctctgttaagattgccttacttctgatgatcagagggggcttctctttttatttaaattcctaatatgatttttattgccatattttagcttatctcgaatcaacgtttgcccagtttatgttgaccttggaggcattggcccatttggacacttttcattttgtcaccctccaggcatgctcatttctgggctgttttcaacaagagcaaatggcattccgattaaatgcatttgggtccatcatcggtctcgttgtgtggatgctaattgcaggtaattagctactaatcattgtgctattgtatcttagggtaatattgaatagggaataaataataatatttttgctcaacacatagcgtcactccttgcttaggccaactacttctgttcggtttcgtcccatgtgccaaacggttcgacccggtcactttgcacttcttcgacagttgcaattggccaaatccgaatgcgcgtggctctggatttgccttgctgaacatttggcttaccgtactgctctgtagcgcattttccatttacgcaattgcactgtctcatgtgcgccgtcgaattcagtaatctttttttaatattttcccatctttcaattcaatagctttggcacaaacttcgaattgaaataaatcaggttatttgagtttaaatggcaagcaacacaatttatttcttgcttattgatggaaaaaagcataaaacctttgtacttgatttcttccattgactccattacggaaatttgtttttggaaaatttaaggtcaaccctacccatttaaatttgttttgagcaaaaacttattagctggcacaggcacatcctcattctctatctaaaattggctctctgctctaagagagtctcggctcggtgccaaataggaccagcacggtaattttacagtaagagcacgggaattttcgccggaaagtttccctcaagtttttcggtcaactagatcccgccggcaaattcccggtaaaattttcacactatttttgaagaactttttatattttacaatttgttctcgcttaatttaaccagaacaatttcttcctgataattttttttacttgttttccaaattttgtatttatgagcaggattttgcgcttctggcgtgagagaaagtttagaattttatcgtgtatctgtgcaatcgaaaactctttagatatttttccattggaaaaggggcaataattattgaaaatgaaaaaaatattttcaagagcgtaaattctcgagaaattttgagtcgctctaatgccgttaagcaacccttcgttttcagagcatttcaactttatttaattaattttcatttttttgacatctttgcaaacacgatgtgctacgaggtcgccctgaaagcatcagcatcagtgtgataatgccatcccaaactttgatgccatccgctctcggcagcgtgccatccacatcgccaagcggctcactttcgccaaaaagcagagagcttaaagaacgaaaacagatcaaagagttggcccggttgcgggaaatgatcatgcaagtgcgttttttatcaaaaaaattaatggaggaatccatttgtgtaatttttatttatactatgataaagaattttttaatgggggcgataatttagatttaccacaaaaaattaaaattgttaaagaaatttaaagtgccaaaatctgcatataatggattaattagggtgaactcaaaagctgaaactattttataatggcttcttatgaaaaagtcaattctgaataatggcttcattagggtgaagtcaaagcttaaatttttttttactgtgttgccaaagccaccctaaaaatgcttcggcaattgtaattcagcaaattcataaattttgtcaaaataacaaaacttattctgtttagggttttttgatcatgcaatcgctgcttttgcgctttgtcggcttcttcgttttgccttggttggcattcgctgccggtgccaatggcattgaccaacgagcgcttctctgtgtgctggccaacactttaattttggtaggcttgatttttgaaaatttatttatatttaaaaagaacttttttagctgagcttgatcagtcattcattgatttattggtggtggaactcgaaaattcgtgaactgtgcaaagaagttgttgaaactctgcacaaaaagctccttaaatcgcgctaaattaacttcgggaataaaaattgtccaatcattctcgagagtgtcgataaaccttcattgatatttaagcgctaattcggaatttaatgataaaatcctatcttcattaaatactttttaatataaataaatattttaagcaacaaagaaatctttaaaatctatccatttagatgttaattaaaatcacatgtccatagatctctaatttcaaattttggcattttattttgcctttaccaactttagtccatgtgcatgtgtgtgagattcacatgcttttccactggcatggtccgccgcccattccacgcaccattatatccccggcaaaaaaataaaaataaaaatcgccaacaagcataggagttaatatattgttaatatatttaactcgtgtaagcttacgttaatcacattgattttgtttaaatcataagcacatttattgcataaaaatgaaaatatgaggaaaacatatttttattattaagcattattattattattacttattaaattaaacattacaaaagagcccgatagaaaaaaattgcgagagtcagaaattttggaagcgggaatcccgaaaaaaaatcgcgggaatctcgctccaaacgagctctaatttatatagaaaaaagaaaaaattaagataaacaaatgcttaataat

SEQ ID NO: 14624 - DNA, 2659 bp, Heterodera glycines
ctacatgatgtaaaattttcaaaaattttcgagctaggccccctagaaattttcaaaaatttttttggggtcgaaaaagggtgtgaaaaatatttttctgggctattttgaggtgctgagcacgaatatgatgtttatttttcgtttcaaaatttttggaattttttaaaaattctttattttttggcaattttttggcccttggaaatttgggctaatattggaaaattcataactcggtgatggtttcatcgatttaactataataaagctttaaaaatagagaaaaataaggagaattttttgggatttatttgggttttctaacttcaatatgaaagaagttattccagaaattctggaaattttagatttttcagaaaaaaattcagaactcgcttctgaaaagtcattctgtaaaagtaatatactacaaaaatccgcaatttttttctctataatataaattttattttacatttttatctcttttttgcgaattgttataaaaataaaagtgatttttggtttcgggaccaaaggggggtgaccaggatttttgggtggaaaaattttttcaccgaaaatattccaaaaacatgtctttaggggtagtttatgacgctgatcacgaaaacgtgatcagattttacttttgacatcgttaagacctcagaatccctgtgtgattggggattctgaggcatcattttgaggggggggggggaagttcgaatccgggcggtgtacattctttttgctatgcatttttggttatttttaatgtttttaattcatttaaaagagtgtttgttttttttaattaattttttaatttaaattaaattatttttttgtgaaaaattttttaaaattaattttttgtttgaatttatttaatttcattatttattttttgaatttataaaaatgaatttcatttcaaaataaatattcaattattaattttcaaaattatatttaatgaataaaaagagtattttattataaaaaaaattttaaattaaaatgcattcgatttttataaaaacttttcattatttatttaattttaaaccatgttgtacctcttctgatcactgttggactcatctaatcactgttggacctcttctaatcacggttgaacatcttcttatcagttgtacctcatctaatcattgttgtacctcttctaatcacttttgtaccacctcttttaatcatttttgtaactcttctaatcacttttgtacctcttttaatcatttttgtaactcttctaatcacagtttgtacctcttctaatcacttttgtacctcttctgatcactgttgtacatcttttaatcacagttgtacctcttctcatcactgttgtacctcttctaatcactgttgtgcctcttctaatcaaattcccaattattctctcgctatcccaacaaatttagaaacgggcgcgaagcgcccgtctgaggccgcaaagcggccgaatgatcctataaaaattggggattctgaggcatcatttttggggggtggggtgcaaagttcgaatccggacggtgtaacattatttttctgtgcatttttgggttattttgactgtttttaattaatttgaagatttcttttaaattatttaaatttatttttttaaattaaagaatttcattatttttttttgaatttgtaatcgtccaaggacaacaaaatttgaaaaacgggcgcgaagcgcccgactgaggccgcaaaacggcctgataagctaataaacgggcgcgaagcgcccgtcgtgagcctcgatgtggactaaaaactcctaataattttttaaaaattcaaaaaaacctctccaaccaacttcgatcaatttgaatcgcttcacagtctaggtagcgaagctcccaaagcgcgaagcgctttttcccagcgaaatagccgacggttcacgcacccgctagttaatatatacgttatattgacaaggagtttcgtttgcaaaaacaaaatctcccggccgaaggccgggagcgccctgaaagtggtggaagggtcttacaactttttgaggagaatccgggaaaactatagaaaaaaatttagcgcggacgactgagtcccagggacggatttctcattttttcgtgcatttgggggcccgtaactttttttctaaaacccaaatcaaaaaatgtctgctgtgagggggctaagttgaagtgttttctaaaaaacaaaaaaaattccaagcctctatctgcaataggaaaggctgtaggttcgtggactttttcagtaccaactttgtccagttcagtcccggttgaataactcattagggtttgatctgggcggggagttaccagcagacttattgtagagttcaatgagctggatttttccagtttttaaaatttcgaaaattttcaaaatttttcgagctaggcctaaaaaacggttttcgggtttttgaattttaggaatttttaacgaattttcccagagaaacggagaccacttccaaaacatagtttttcgagctctatcgactggtatttttttcggaaaaatttcgattttttcccggaaatagaaaaattttttggcctcagcgggacatttgagtcccgggcccataaatcgtcaggagttg

SEQ ID NO: 14625 - DNA, 925 bp, Heterodera glycines
ccttcaacattggcggagggctccatattttccttcaattgagtaaaagctaagattctatcaatgtgatttatttacagaaaatatttaaattgactttaaagttaagaaccaaagtagaaattaaaaaaagcaaagtgatgaggcaaaaacgcgcaattgtacaaataatcacggcgattcaattttgggctccaagtacaattaagttggttttttcgtcttagtggtctgtgagttagtcaacaaaaagggggtctcaagttcaattcctccttgtgtttgtgtatttaaagcaaattaataaaataataataaatacagaacgccaaaagaacaaatacaaacagtaaaaggtacacactatattttacccttgattttatgaaatttttttagcttataactttttcaataatagaccaaataaaaccattttatgctcattttgaagggaaaattctgaagaatatttcttaattagtcaaaagtttaaaaaaattgtttattggcaaataaatgattctttttttgaaattttgtataggcccatattttgaccccctctagcgattccaagtttattttgtgaaagttaagtttttaactcgagatcggctcttccatttttacaagggaaaatccccggaaaattttaagttttgcaaagttttggcgttctgattactaaataaattaactatactaatttgatgtgtgactatgtatgtcacactttgaatggacaatttttcgaagcgaaagtctttgaaaaaaagaaagcaaaaaatgaggatttatgtaaacaaaaaaacacaggagatagtgttgagaaaaagataaacaaaacgagaaaaagaaagagaactaaaggaaaaaagaaagggagggaagtgggggggaaaggaaggaagcgagagaattt

SEQ ID NO: 14626 - DNA, 2924 bp, Heterodera glycines
  unsure (1)..(2924): unsure at all n locations
gggacgagacaaaatctcgccgctcgaagtctcggcaagacaaaatctcaatttctgtttgaaaattgtggtaaaaaaatttcgggcggcgagattttggggtgcatcagaatttcacatcaaaattcgttaacaaaaagtaaatttctctatagagtaaacaattatattttatccattttttggattaaaaagcgagtaaaaattacaataaaatctgagattctcgtttcacgaaaactaatggaataaatggattaaactgtccaactgactggagcgtgtttggtctccgcgcattgtgcacaacaacgccaactttgtgctggttgtgttgccggtactcccccaaattccgtcgccattcccttcaatatcagtagtggcgtcacttttgctgcacattggcaccatcgccgccgtgtcaacgcaatgccacactttcaccgtgcaatcctcgccgcaggaggccaacagtttgccgttgtggtgccaacacaatgcccagcaacggtcctgcagcgcgcgcagtcgctcctccgtgtgcagtgcggtggcgacagactgaaaatttgggaaatcggggcgaaggtgacgaatcaattaaaaaaaaaattttttttataatttttaactgcagagaaaagatggcataattttcttgaaattcacaaaaatccacaaatgacttcctacaatttaaatagacaaaaatttgcttaacaatacccatgtcttggaaacaaagaattttctcaccttcaaacaattggcggagggctccatattttgcttaaattgagtaaaagctaagattctatcaatgtgatttatttacagaaaatatttaaattgactttaaagttaagaaccaaagtagaaattaaaaaaagcaaagtgatgaggcaaaaacgcgcaattgtacaaataatggcaaaacaaatttctgaattgatcgcaaaaaaattgttctagtgaaatgccgcattttgtcgaacttttctctcctcatcattttcattggtaaaccgtcgctcgagtagaaaagcatccgccgattcgccgtcaattgccctgcactgataatggccatgaatttgctgaacgacctcaaaaccatgggcccgatatagacaaagtgccgcttcatttgtcgtctgacagtgcaaaaagatattctgaaaatccattttaaagaatttattanattgggtattaaatgaataagtacttcgacgttagcccatttttcacattggtttatcagcgaatttcacagacgagtggcaacgccatgacgacgaaaagtgggcaaacactgcaaaaggggcaaataacagttcataaaatgaaaatcgttataatcgcacgcccatgtctgaatttggacagaaaacatttgtttttgtggctggacgaccccatcggtttatatggaactgcaacaggaacagttgctgtttcggttggacacggtgatggcacccacaagcatgggggcgtcttcctcacaatcagtgccattttgatcattgaaatggtgacgataggccatcatggtccaaaagctcgtgtctgaattcgtttttatgggggcaataaataatttttttaaaaattttaatatatgaatgtacgtcatcaacccaaaactaggtaaattcggggacagtgtgagataataaaacgaaaaaaatcaaaaatcccttaactaccgcattcgtccccattgtcagggcctttttccgctagtcgatttcgtgtcacccttttgtaatgagtcgagcgcggattggtcccataactgaacagaaaatcaaattaacattaacagaccgaaaaagatttgcgttttttttgatcgaaaatgggtagtcttttgaaattttggacgaaaaataaaatacaaatttgaaagagctcatcgactccgaaacacacggaggcttatttgatcctgaaaaatcaaataccagtattttgcggcggaacccaattcaggattaccagaaatcaagaaattgcttcagattgttgtatttatgccccaaaatagggcgcacactaaaatgccttcaggcaattcttaaaattttgagctgtaggaccaaaagcgaaaagtaccaaatatcctagctcaataatacaacttgattggaagacaggagatgttgagcaacataagttgacgcactgactgttcgccatcgggtgggcgtaagaccaacattgaatcaaaaaatcttaatgctcgtgcgacatgaatttctcaaattcaatttgaaaacgcggattagtcgaccactttaacaacaaaatcacaattttttaaactcaataatttattcaaaaaacaacataaatcaaattttatacataatacgctaattaaatgtcacaatgtttttcttgtccatcttgcgcaccccggtcgcctcattttccaagtgtttgacaaatttttcatttccgctcaactctctccacgccgttcgagaaaacatgaaaatggccaacgcataggtgccgatgcgaatcaccgcattgttgatgcaaaaatcgagcatagacataatcaagaatgaatgaagctaaaaataaaaatgggacgaaatttatgcgattattgtaattttaacgagttcaaaaatgaatgaacttttaaaaaattaatttgatattaaagcagggtatccctctaaaaaatctcgcaggattcccgtttcattctcagcttaactaattccagttttttccaacaaaatttttgaaaatttaggttagttttttcaattcatcaaatttcaggcaaatttgaaaaaggcaaaaggcaatatgcatttttgatcttcaaatttaaaaaatataatgaccagggctgcaaaaaatatgcacgaaaaatgaccaaaatatgcacataaata

SEQ ID NO: 14627 - DNA, 1124 bp, Heterodera glycines
gcaaagacagtccatcatggatctaatttctttttgtcggtttgaacttccgttttggggtgcacttctctataaatgtatagccaagtcactcgccgctcactgtcgcatttgccattgcgctttcattgcgtcttctgccgtgtcaattactcatcaacaaatcccccgggcaacgtgcgccactccgtcacacttcgagtgccgtcgccggtgggtgccatctgtcggccgtccgtcgccttcccttcgcttttccttcttcaattagcctcccttcccttccctttttataatagttatttctcctcatttccctctcttttctgctgctcttttatcatttgcatttccatctttcccttcctttttcccttctttttcctttccttttttccctcctttcgttccttcggttctattctttcattgagttttttcttaccatttttggtgtgagtttcactttaaaggctttggtccattgccttaaattgctcaataaatgcaatcgacgaaagtgccgcaatgagtgacgacgaaacgaatggttaatttgggggagacaatgggcaaatactcaatttgttgcttatattagcataatccacaaaacgatttcacatttaacaccgattcaatttggcctcccattcaaaaaatatgcaattacaaattaagagacaataaaataaaaaaataaaattgaataaagaacaaaattgtgagtatccgaatgaattatgtaacagacataaagaaatagtacgcctaaagaagtgttccatttagtgccgtgccgtctccccagccgcgtgttcgtcctgctactgctcgccatccctcccgcttccccccgtccttcaaatgtttcctcctcctccgaactttgctccgctcgtttccctcccgccatttttcccaatgtctttttggactgtccttctctgaaggcttttctccgttccgaagatggacaatatcacaatgtctcatcacttcggttggactgtgaaggaaaagacgaagcgcagctgaaagtgttggacagactgacagaaggggacacttttcgttggcttaagtcagtgccaaagtgccgtgtttgtcccactcccgctgca

SEQ ID NO: 14628 - DNA, 2023 bp, Heterodera glycines
  unsure (1)..(2023): unsure at all n locations
agtcggtaatgagttgatctctcccccctcccctatagggtgtcaatttaatgccttttgtaccaatggtgttgactttggctgctttttagtcccatctttccccaacttcccgaacacatcgctttcactgctccgctccctacgaattgctcttttgcccattgtcccaacgaaagtgtgaactttgcggaaaaagttgtccgctcccgccttggcgcttctcttcgacttcgctgccattttcaaactcaaaatgtattagccaaagaccgattcgagtcgaattcaacattagccaatgatcataaaatatttgtgtggccattttccaatttcgaaaatgagaggcgatgggaggaaaagccgataaacgggggcgacgtagatttggtggtaggctctctgaacagacatcaccttgggctcgtcgcgtgccgatgttggcattgcaattcgccacgctttgatgttaccgaagtgggttcttttttccatttcctcccatcactttggacttaaagcttcgtttttggactcctctctcaataagcgttaatgtcgcagtttatggcgaaagaacggttgagcaaagtctgctggtgcacggatatcccctcgaaagccttcggcttgaaattcgtttccttcaacacaattcgacagaatggcacgaattcagtgccaaagagaacgaaatgtgagtttcttttgcggcacattctgaaggcctttgatcacaaggcacattttcttcaacggctctctgctggtccgttctgaattggcccattcccactttttccttcgctatttctccattggcattcacgagtgcactgattgccgtcactcacaagtcggcggtgcctttgaatttgaggtgtgccgagaggtgacgacagaaaatgaaaagccaaaggacagcgaatggacaccactcagcgaatgcgccgagtctgtcgtgatccaactccaaccgaccaaacacccgaaatcgaacggcaccggcgccatcgggagcgtaagagcggtgccaattcaaacgccgtcgccgcttttcatttcacagaattcgggcgcaaaattaaacccattcattctgtggattgtcatcattttgtttctcattttgttacttttggcaatcggtgcattaacacgaacagtggtaaaagagaagaaaatgaaggggaggagagggtggaggacgaggggccattcccaaagcacggcagagacgtaagtgacgggcaaatgcaaaacggggcggggaaggggggaattggcgaaacgaaccggggtaccatgagggaggggcattggcgaagcggaccctcaaaatggcacagaccagggacagaccgggtaccatggggggggggggggtgtaccnccccactacnccggggaccattccggccaatgctcaaaatgggttttggtcgcaaccatttgattttctgaaggagcgtccctttgtacactctgtcgcactgtccgtccctccctcagcagcgacacaatttgcgagtgatcgactcacgaaagttgcagctcaatcagtgcataggcaatgtaaaaacacaaagcgataataaattgtcattattatttttcggttttttccttagggcgcttttggcgctgtttacgaagcgatttggacggaaagtgaggaaaaagcggacggggaattggggacgagcaaaaggacggaattagcggaacattcggagggaattgagcagcgcgacgcacggaaggtgggaattgtgcccccaactcaatgccattccaacaggtggcgattaaatttctgaccaacgtcaatttcggcgccgtggagaaggaagcggtgcgtttccatccgaattcgcgttaaatgccgtcttttcaggctttactctcccgacttgacccccccgaatgtgttgcgaatgttcggaatttcctattggaaaggagaaatcgcgttggttctcgagctgatgaacagcggcgacctgccggtggttttaac

SEQ ID NO: 14629 - DNA, 4225 bp, Heterodera glycines
  unsure (1)..(4225): unsure at all n locations
ataattatanctagggtagcaacttttagtgacgaaaaatcccgaaatagttaactaaaatagtgagtaaaatgccaaaatagtgaagaaatagtgacaaaaagtccgaaatagtgacataattttcagccaaaaattaagcaaaaataatttttattcactgattgcattgcaaatgagtagggctgggatttttaagggcaaaaaaacaaaataggtacataaaaaaataatttttaaaattaaaattcttgccacgaaaatacctttttgagaaatttttttttcatttcataggagtatattttgaaaaattttagctcgattcttagggggtgtattttttgaaaaaatttttaggtcgattcttaggggtgtattttttggttttattgcatttttgttaaagaattttccaaaaaatgtcgaaatagtgaaaaaatagtgacaaaacgccaaaatagtgatttttaactattttagtgacgaagtcgccaaaatagtgatttctagtgacgaaaagtgacgtccaaatgaaaaaattttaacgcagaaatgcgttttttgagctcctttcttcaaaacaattgagcaaaaaaaaagttttttcactaaaagtatgtccctatttggtggtttttaatccatataatttataaccctagtaatgagtcctcctcccttccccgtcaaatgcattcattaatcaaatgaatgctttgcaattatttacctgctttatgccaaagcgctgctgcccatccctttcttcaattgtgctgtccaccatataatccttaaatcacatggcaaatttattgataattcttttaattataaaatatttttattatttaataaaatatttcaatgaccgatcgtgtcaaaaacaaagtgtacggctgccgttggccttctcgatgaatttccttcatcatttcgatcattcgaccatacaaattattcgacttgaccattccttctgtcgctttcaccaaaaagtcgaagtcacaagaaacgagaaagtacaatttttgcatcccctaaaaaaattggtgcatcatcgtagagttagcattccatggcattgaattacaatagaaaacgtatggttttaaaaaatcatagttagatagaaacaataataggctaaccaaaaataattttgaataaaaaacttttggaaaagttaatgaaaatccaaaatgtgcacaaaattttttctcattccctcacaaaaatgcaattcttagggttgtacgactcggggtgacgggtcgaggtcgggctagtcgggggtgcagagagtcacggtttcgtttgggtcagggccccatcctggattcggctaataggaattttcaggacgaatcccagaccctaaattttacttgtacccgattttgaaaaacgacaaattttgaatgctttgcaaattattggtgaaaaaagcgtacggtgtgcacatccatcgcctgttggtaagccgaacgtgggaatggggacgggaagagactgaacggctgaatggaaaccacatcgctgttccttcttaaacagatttgacttggagtttgcatcaatcaaattaagcgcccaaagtggcatcgatttcgttaaaatgggcaaaaatgttcggcactgagtgggaagcgaacccacgccctaaacagctgtccttgcgccgttctatcacttgcgcaccgtttccgcgagtcgtcgtccgacaagcgtttgatcagtccaaattcgtgggccacatcgacggcggcttgcaccagcgtggccaattggtcgctgctcctcaccgcttcaaccgctggattgctgattgctactgcaaattggtgggaaattttagagtttcacataattagaggtgccaattgtaagaaaatcataaaatatgtaaaaaaattccgaataatttttttcattatgatttatttttataaaaaattccctaaaaatctcaaaatatgaaataaaaaagaaaagaagtataaaaaagaaaaatttaaaaaagccagaaagaatccatcggtttttaggtttttacacatttttgaattgcgacaaaacctagttaacaccctaagtagaaaaatatgtacatttgttttatgtaaaaaaaaacttagactacctatacaatgtatttaatgtgttctttttcaaaattttaaaacactccgtcagatttgaaaatattttaacgaaatattaattaagaaagaaaattcattaataattttgggtcccaggccgagttccaatttttttattgatgtaagcataaataagaccatttggatttgcgtttgaatgaaattgaagtgccgaaacaaaaaaggcgaaaagtaaatgcatagaaataaacattaaaattctaaaaattaaatttttatttttatattattttattgtaattcataaacaaaaaaaaaatggagaaagaaagaaagtgaagactgaatgaatgaatgcatcaaatgaaaacaacaaccatttattactcctaagccaatattttttgatttccgcataggaaatccggggggaattaatcaatttcacaataaatcactaaacatttgcgtagcaatttataaattatataatattttatatgtttaagtctctgagaaaataatttggaaaaacaatcaaaaattttagcaatgagaatgtcctggattgtcggatggtccttttgtatccctttattccccaaaaatacagtttgcaacagtacgcctgaatgtcataagttttgttgactttgtgtgtaaacagcagcgacgttcgaattagcagcgtataatcacttaatatgtgatttgatcatgataaaaaaaaagaagcatggattaatgtatataactgttttgaaaaattcagcaattcgattaaagaaatgagaatttgacgcgaattcaatgaaattgcaatttttataaatatgacaaggaataatttttttctatgggtaaatgaactataaaatcattttatacaattttgtaaatattagaaaataaaatatttggctaaaaattttagtacaattttgtagtggttgaaaaaattttgagggaaatgattgagccctttttgcgaacaggggatcgtttttttagcccatccctgagatatcaaaagaacttaactcactttccttccaccgttctacgaattattcatccattccaaaaaattttgctcaaatagtggccaaaagtatatgctcaaaaatttcaaaattttagagctaggctatgcgaaaattctgaaacaattactgctagcttagcttttaattctgaacaaaaaagtcacttgaacaagttttgatcagatcactccgtcatggtggtttgaaaaccccaaaatggtttgaaatggggaaaatttataaaatttcaagaaaaaattttcaagggggctggaagaaattttctggaaaaactcaataggcttataaagcacaaaatcccctacaaaataacttttgagcgctgcatctacctactgatttcgggctttttagtccatattttatgtacatatttgtcgttttttagtccatataatttataaaaatcctaatagtcggcgtcgcatttcttgtccgtccaaattccgtttttatcaaaactgcatcattttaaaaaactgttaacaaattttttgcaagttttaagcaaattggctgctcaatcttttagcaattctgagaatggtaaagtaaaaagctcagtaatttgagcaacttcgaaaattttcggcaatctttgcttttttctacagtctcagtctttgagcaatctgtggtattgtctagagttgtacgggactgggaattttgagaaaaaaccgggaccgggacttttctggttgaaaaaccgggactttttggctgggaaaaccggtaaaaaaccgggactagtcacggttcaggacaaaacctggacttaggtactcagatgtaccttttatttatgtaagaaaaataccaaaatatgtttaaaaatatatatattttaaaatggttattttttgaaaaaaaaattcttcgtaaaggatgaattaagcacaaaatgccataaatgccataaatgacttaaataggcttagaatcactttttaatatttttaaaattactttttagtatttttcaagggtacattttcaaaattattttttcactataagttttcaaaa

SEQ ID NO: 14630 - DNA, 3609 bp, Heterodera glycines
  unsure (1)..(3609): unsure at all n locations
agataatgtcagacgactttaggtttttggagattttgtttattatttaattctaaatttttattgaaatttccaaaatcccgcaaattttaaatgcgggattaatctcgcgggatcccgccccgcaaaaaaataggtttcaatccggcagcggaatatggaaatttgaaatttctggggtctaattggttccacacattttgttggctttgtaacaaacatccaatttggcattctgtttccatttgaaattcccccaacccatcaaaatccaaccacatacagacacacctcattggtgccgcccatttgcgtctgcgcattgagcgcggcaagccaacccgaaaattgggacagttcaccgctggcactgtaaatggagcacagcatgtcaatggggacctctgaaattggggaaaaattttttcacggctttttttgtgccaaaatgacaccgtgggggatcaattttcgcaacatttcctccgtcttctccggcaccacccggtcaatggcactcttggccttctgcacccggttgatcagctccgagcgcgccttcaccantttgagcggcctcggcggccgctgaaaattgcaaaaaaagcatttaaaagttgttgattccttgcccaacttgttgctgatgaggaaatgccgacaatggtggagcgcaactgctgaagcagttcatcgttttggccccggtcggcatcactgaaacacaaaatttgattaaattagggccatattgaattataataatttataatgaataatggggacacatttaggtaatttatttttattgggaaaaaattgtaatagttttttaaaatggaatttttatttgaatttgaattaagaatttaatttaattccagttttaaaaaatcagtctcaaatcaggtttaaaaaaggtttaagtttccaactttctgtgtattttcttttttttaatttaattttccagtttttggaataaattttcgggatgaaaaacggagggggtgagggccgtgtccaaaaatgccgaaaattggcgcgtccacccaccggcgaagtaccaacgcctcgtggtcagtttggccgacaatgtccgcacgacggagcgcgtccatgaagaagcggaacatgttgtccgactttttggcgtccaattcgtccaacagcgacgcgctagcacacaaatggcccaacgcggcggtgaccgacgcgcggggcaccccacgggacaacattttgctgcaaaaaggggggggattggaataaagcggaaatgccaatgccgacgaaggtggcggggaggatggcaccaagatacaggacaattaaaaatgaatgggatattttttgtgcaatttggttgcaaaatgccaagatttaatactccaaatgcatactccacatgtttggcataagtcgccccataagaaatttaacaaaaaagtctattaaattcgaaaaaatatatttaaaaaatgagaaatcttttttgaaaaatttgtaatttcaaattcggatttaaaatttttttttcaaataacttgtcgacagtgttcgcgcacctcaaaactttgggcaatttgaagaaaacgaaaacgtcggccaacgcctcgcgctcgcggcggtcgccgtcaacggaggaggaaactgtttcaagctgagaacgggaaaaaattagaataggtattatttgaaaaaaggtctaactaatacaagaaagttgacctcttttgtacaggttttcggttttcacagggaattgtcgaaattccgtctataataatttatgtcagatatatcgttgaaatccgcaaaaaattttcaattattattagagagcacatcttgaaaagcccggacttcccccgtccgtttgccatgacccaatatatttttttcggtcacaatatcctagaaatccatgccaaattttttggatgatccaaattgatgtgcttctcctcgttcacctggatgagaaagccggcccgtagcaaatccttcaccatttgttcatggcttatgcccagcacttggcttagggtcagaaatgcgtctgcaacctgtgacaaaatggggaggaaaatgtgcctcaaattttattttttttaaatgccatttttgtacttcatcggcggatttgagcacacgataaatggcgtagacggaggccaacgtcagaatggcgggccgatgccgtcgatggatgaaattttcacggaatggaagccaacaattagtgggcggaggggtggcaaagctgaaaaaaatttgggggaatggcacaaaagccacaaaattatggcacaaaaacccccaaaatatagcacaaaagcccataactatggcaaaaaaccccccttgtgtttagttcttactctgcaaatgtgtccacgagttggccaagttcacgaacgcaatcagccaacgaagggcctaaaatgaaagtataataagaatggcacaaaaatgccgattcgcacgcgggggaaattggcaccaaaaattggccaaatgacagagagagtgtgacaaaaatactatcccattttgtaatttaaaaatatatttcggatttctacacccaacccaatttttttttgatttaagggcctttcccggttgccaaaatatttgaaaaataaaaaaataattctcaaattattgcatttttgctgccacaccgtcttcgtcgtgctgttccttttgttgttgtggtggcgttcgcttcggcgctttctcttcggcgtcttcgtcgggctgtttttgttgctgctcctcctcatcccccctcatttccatggcggttgtcccatcgtcggcagcagtttgaccttctccactttttgtgtcaatgccctaaaaaaattaatacaaattttcattaatggcatctcaaaaaataaaaaaagggatcgttaagacagaaaaaagcaaattttttaaatgttttttggaaattttatgatgaataatttcaaaatttttccaaaaaatcgctaaaaattttgaaattttataataaaaaaaataaaatttatacttgttatattcttaaaaaattccaaagttttttttggaaaaatttcttttgattttttaaaattttggccgcgattttgtctcgtccacttaaaataacaattttctcattttatttaaaaccttttcttcccctccgttggcctcctttttcagttgtccaacacattcattcagacggtccaaaaggcgcgccatttggtcatcggccgccggcgctttgtctgtggcaaaaatttttataaaaaaagaaaaaaataaaacaaattaaatgaatggaccaaaattaaataatttaaaatgaatgcattactagaaatttgtgagaagaacacaaaaaggagcagtgcagagaatggcacggtgcgaaggcgacaaatggcaccaatcaaactgaggaaaaggcgacgcaatggcacgtcgaagggctaaaaatgggggcaaatgtacaaaaaatgtagggaaattttaaaaaatgaaaccaaaacccaacaaaaatttctcgtcaaagtaactagtcttagaactttaaaataaattgttcagtgcctgcgagaccaa

SEQ ID NO: 14631 - DNA, 1750 bp, Heterodera glycines
cggggtttgaaataggtcgcaatgggtgtcatatttgtgaccagcgcccccgaaaacccccgagtactactcagaagcgcataaaacccttaatttttttcttttttttagggaccaataaagtacatgattaccgtagcctttactaacaaaggtctaatgatggtccgttttatcgatgtcaaagtgtcgaacaattatgtactaaaatgagattggattcacgactttttcgaattgtttgaggctccgaataagtccaaatcagactctttaatgcgataggcaactcaaaagaaaattttatgatcagacattgaagaataattttcaattttttagttcctttcgataaattcactcaacgaacgcaagcaatcgaaggcttattgggtatgcattgatttgttggagttattgtttgaatttaaaaaaataaaaacacattaaattctttgttgtttattttcaggcgaaatttcaccaaaagaggacgagaagggaaaatatggtaacgaaaataagagatataaatcgaaaataattcaaaaaaactttttttttaagtttctgctgagcaattcacacaattgcaaaatgatcagaagaaacttttggaacgcgtcaacgaattggaaaaacaagggccgactatcggtagcattatgataaaataatattgatcattttttaccatgttttagcaatgatcaatgaacaattcgaacagttgcaaaatgatcagaagaaacttttggaacggatcaataaagtggcaaattcccaacagcaggaaaaatacggtaggtttacgatgaataatttacaatcatattgttttgaaattaacttttctctttttaagtttccgttgaacaattcgaacagtttcaaagtgatcagaagaaggcaatttttgaacggatcagtgaattggaaaagcagatgaaagaacggatgcagaaacaggctgatgaggaaacggggccattggcaaagaaaggtaagtgggttcagagagcccgatacgccacttaatccgccggggtgggattttgagggattcccaaaattgcgggattaatcctgcgggattcagtcccacacggctcgcgccgtaaaacgattttgagataataatttgtgctcattgtcatgatttaatttgttaatcaatctttggctttttgtgaattctttaattgtttaagcattattggtcgatgaacaattcgtgcaactgcaaaatgatcagaaggcaattttggaacggatcaacgaaatagaaaacaaacgatacggtaggtttacgataagtgcttttgaattttgaagaatcaaagtttacgcaatgtcaatttctttcatttttcagctgcagctgattacgtaattggtgtgaagaatgacttaaacaaagaagcaaaagaattgaaagaaaaacaaaagcagtttgcgcgagaaaccattggtgagttgatttgaacaatgtaattttatgcatttaaataaacatttggttatttcagcgaatttcgaacggttgtcgaaaaaatacggtaaggatatacaaataaaatttaattgcaaatataaatatatgaatacaaacaattcgaataagcttttccaataacatataacgaagtcagaagttattcagattatttaaatgtgtaaatttagtcaaatttgtgccatcaatttgattttttaaacgggaccaaaaattgacagtatcaaccgtagt

SEQ ID NO: 14632 - DNA, 2848 bp, Heterodera glycines
  unsure (1)..(2848): unsure at all n locations
aatgattgaatattattataataatatnttgcttttcacatcacattttttcggcgtgcttttcaaaacatttttgggaaagaagggggtccggcggtgccgataggcgccgccgggggaaattttgaaatttgggtgtaatttgttaacagattttcaacaaaaaaaagttggttttagggattattaagctcaatttgtatggattttctttaaaaaatgataaaaatgtgttaattaaaaaaaaactatgaagaatcataggtgctgggacgttagtcaaaaaccattaaatgaatcatttttgacagaaaattattcataatttcgtctaaaagggatcaaattttataatattgatttttttcaaagccctaagtgttttctattatcctgcaaaatttaaaaaaaattctttaagtttaaaaaaagttatgacttgagaagctcagaaaaccaagtttttttgaacatttttagtcatactttcttaaaattaacgaaactatttggaattttgtaggctaatagaaaacactgagtgctatttaatgctatcaagaattaaaaatttagatgctcttgaacaaagttatatcaaaaaatattttcatttgatggttttttgactaacgcccattatgatggtttttgactaatgtcatagcaccgaccggacgggatcccgcggaattttttcaggatcccgcgggattaaattcggtataaaaaagtgcgcaaaaaatctttttaacgcaaaaaaattccgttatttaatgttgaaactcttacgcaaaaatccgtttgacctaccccattttattattccttgttctgatttaagaattttcacatcacaacttataatatttttctattttgatttaatacaacaattttaaaaacttttatataaatgatatttattttcaactacatcaaaacagattaaatgttcttacattttccattacttattctcaacgtttttcatgatgataaatgaatggaccaaagaagaatgacaagaaattacaaataaaaaattccattaatataatagcaaattattaaaaatcttttaagcaatggaaagttttatcatttttatataattgaataaaatacttttaatatttctttgtaaatttctttttgatattttgttaacaatttatattcttatcaaaaaattaaaaacaattgtacaactacaagaaatacaaagtagcaaaaaataaataatatccacgttctattaaatattatttataattttagattaaatgggtgtatttgagcgtagttaattttaattacatttaattttgtaaaacaaaaaaaaatatgaattaaaaaagatcttttaaatacatttggtaataataaaaattgataaaagtatttatttaaattatttactgtagaataatttaatgaaaacgggggcattaaaagaatacattaaaggaaattaaacaaggaaataactaacttttcgtaaaaactgctaattctacagatttttcgagaaaaatcgtcataacttttcataaaaaataattcaaataaaatttcaaaagaataggaattattctaaataaatcaatctaattttgctaaaatacccatattggtattctaaattatacttttattttacttaaacaaaattagatgactaataaggggcgataaaaagagctatgattctcgaaattttattattaagaaaactctttttttaattgcttaaaactcaagttaaatatttaaactattaattgaattgaattgaaattgattttataaaatagcatataaatgaaaaaagagaattgacgtaaatggaagctaattgaaaaagaacgaaaacattaaaaaaaaattaataacaatataaaaaaaagaagaaaaaaaactcggactaaagacggaacaacgaatgtgcattcacgatcgagaaggagagaatattaatttgttattatattttaattcaataaaattaattacaaatacattaaaaatcgacattattatttatcataagattaattatttaacgtttaattttatttaaagtagataatatctgtaattaaaatttttaattcaatttttacatgttatattattaaaaaagttgttttccttgctgaaaagttttttacaaaatgatgacaattaaaaactaaaatttttttcttaattgaattgaaaataaaattaacaaataaaataaataatatttaatatatatgaattaaagaaaaataaagtattaaaagggttaaaacaaataaaattattatacacgtcatcatcctgcttaaatttgtttaagatcactttattaattttacaaaattcaaaaaaaataaaattataattataattaatatttattttaaaatcttccctcaattagcatttgaaataattagaatagtttaatatttaaatctttagtgtaatttttttataatatttttagtgaaattaattgaaataaaaatttttatttgttaaaaattgcttttattaagtcatgatgatgtacagtaaaaccattttcaatgaattcaataagtaataattttttttatatttaattcacttttttatatttaaaactttctttttttgtttttaatttccgctatttctttataaaatataaattttttcttttgcataaaatgccgagaatgcttatttatgatatttaatttatattatttttaattttaagtttttctcgttgtgttacaagaacatgaggtcgaattttatccttcccttatgttattaagtaggtatttaattaaatgaattatattttata

SEQ ID NO: 14633 - DNA, 3667 bp, Heterodera glycines
tccatcttttatttttgagtttttaattttagtttattttaacactttttctcgccaattagcctttgctaaatgcactttttcgctccttttgcgatgactttggccacttttttggccatatcactcgtcctctcctcaattttcccttgccaatcagccgaagaatcaatttttcgctcatttctttttcatcgtcgggaaatgtgaaaacggagggcgggggaatttccgattcattctttcgttgccttttcggcgagtgttgcataagaatgtgaaaagacgaagaaaaagacaaaatcttacgatgattcatgcttttcctgctcttttgcttaaaatttaaaaaagtaattattgaattatatttttgaataaatatttaatttttttttaattaccaagcttaaatggacatttcagcaaaaggtgcaacagttccgcataattttctgctgctaccgattgaccaaattattatattatttctgatgattctctggcgccctttttctttgataatccattcccaaaaacccattaatttggcccattaaagtgactttggccatgaccaatttatttattatgaaagcgtcttaagtgtcgactatgtcctgtaatccttgctgctgtttgaagcttaaggatgccgctattagcatcggaatttggtcaacggtgggtaatttcggttaaatatcggaggaaaaaataagacaaaactcagtgatttcttttgctgatattccctcactttgtcaattttgattaattttgttactccaatcactaagtgatgcagccaatttcaatagttttggccgtaatttccgtgctcagttttcaaatgcgacggtcggcttctctgtccccaatttcacacccatttgataattacagattaatttttattttaattatcaaatttaaaaatgatgagtgaagtgcattatgcatgattagaagaaatcgctgccctttgtgcgatggtttcacattataatttgcatttgacattttgtcgagactatcagcagaatactgtaatttcgcattcgttctgtttgtttcatcccaattaaagatttactctctcgcccaaattgccgttttcggatggcaattcagcgtcctcgcccagtgccaacatgttataatggcacagtccaacctccaatgtgactattactgtccctgtgttggcgcttcaaccgcgcgaacttccgcaataattgagggtattttgtggaaaatgtaaaatattaaaatgcatttttacgataatttgtttacacattgcattttttgcactttaatttcagtatttattcctttttaattatttattttttattctttgtttctctctcaacttctgctgctgatcattttcattattattttttgtgttccaacttttgtgttgatttttttatgtattttaaagtgagggaatgtttcggtgttttaaattttttcgcattttaaatttccaattttttgtcccattttctttcattgatcaatcaatccaacaactccaacagatatacagcataatgcaattggccattttcggttggcaaatggccgccataaaatacgaaaaggaccgcgcagcgaacactcttctgcccaattacaacacttatggtcgctacgacattccgacttattacgaaagctattggcaatcaccggaagaacgctattacagctgtaaaagcattgtttaagtgaaaagagtgtgaaaaatgcaatgtttaaacaaaatgaaaattgtcattaattacttttttaatcattttgttttgcccggcccaaattacccaaaatttcagggcttttcgtaatccaaatcctttgtctgatcgccgccttctttcttctgttcgcttccattatgatgatttatggggtgcacacggtaaatgaggtgtcattcaaccaaaatgaaattccgtccccgttgacagtggtcgcgcttccttctcgtgccgtggatggtaacaatgtgcgcttccatcctcacttcgttcgcctattgtgcccatttgcttctggtccccaaaaatgcttttctcctcctccccattaaggtttaatttggtgggctggcgatgtgagggattattggcttctgctaaccatcgtcgaaatgttcggcgttttgctcaatgtgtgccattggctaattctctttcctcatttgggcattcgcttaaggtgtactgtttcctcgttattgttatgttccatcggcgaatgctggtcgaacttgagtattatgcgagaagacgaaagtacgaccgattcagccaattgccaagtgaaacggcacaccagcaaagaacagaacgaggcaagaaatgatgagcaagaagagcatggctaattgggtaaaacattcagcagaaatggacagaaccgacccgaggcccagcaaagagacggcacttacgtgccaacgccccggcgcggaaagccaatggccctaccaatcgcctcatcatccattggccggtgctcaattggcgggtgattttgatgcaacaacaaaccaacggccgaatgaaatggcagacgaaattcacacggcacgacaattggaacaacggcaccaaaaaaggggtaaaagagagggggggggggtggcatggcaaaatgtgaattcaaatatatgctagtttaaagagtcagtctccctaattgtttaccaaagtgttatccttctcggcattagattcaccgatcattttgtctcatcttcaccaaattcggtccctctcggcgatggaacgtccgctacaaaagcctcaatttgatgaatacggcgaaatgccaaggagagatagacggaggaggccaacttcgcacaggaaaaagtgggtgacatcgaattcagttgattacttgtccctcatcgtcgtcatttcggctttcagaagcactccctgcggaatgtgccacagggaccaatcccaccgccggtgccattgttgccacgcgtctaagcattgtcattggcacggtcattccgctgaaaggcatcacaaagggtcgttctcatcgtcaagttcgaattctgcacttggcgaatattcggcagaggaattgccggcctttggacgaagaacaagcagaaaaggacgacggagtaggagaaaaaggagcagagaaagagcacgtgaaaacaccgcatggtcggacagagagagcgaattgtaaaagaggggggggggggcagagaaagagagggcggcgcatttcgggccaattaagcagcgaattgggccatacggtgcgaagtgaacgcgagtacggtaatgtgggctcattggaaaggcgatggacaagaccggcaccccacaagcaattcccaactttcgaggagaggcggagacagcagcagcaacaaagcatccgcaaggggtgggaaggggggcggggaagagaaaccatttttggagtttgggtcaatttgtagccatagggagccgatgccccgggcggactcggccagcggcactttgccgcttcagccccagcccatttcggcacccccaccaccggctggcattgctatcccacagcatattgtgatccctcccgcacaaatgggtgcgcgaaggagcgaaacatggactcgcgggtaattaat

SEQ ID NO: 14634 - DNA, 2511 bp, Heterodera glycines
  unsure (1)..(2511): unsure at all n locations
ctaatcgttttaggtatggaattggtggaaggctgtattttaaaaaaaaccctttggtgaaatatttttgacacttctcaattttttgtatatttttttgaagagacggattccaaacctcaggagcataatccaataaaggcctaatgtaagttttgtataaaataatacagatttttgacgattttgattttattattctaaccaaggatcgcatacgtgaatatgcatttcttgttatttgtaaaatgtgatcagaaaatctgttacttaagaattcttttatccattttaaaagcttgcccctaataccaattttttctaatttatataatagtaaattgtgagggacagaatcaaaagctttttgaaagtcaatataaatacaatcaacattttttccttctatgattgcttcgtaccaatcttcaacaactgatattaatttacttgttgtagacctatttctaacaaaaccaaattggaactctgaaattttattattttttaatagaaaattataaatatttttgctgagaattctttccataaccctgcaaagtgagcaggttaaggaaataggtctataattttctggattaaatttatccccctttttaaaaagtggaaagacgattgattccttctaaatgtttggaagagaaccactgtctaaagataatcgaaacaagtcagaataacagttggcaatgaagagtggcagttttttagttttataggaaatattatccggagaagtaccatttttatttggcagttttcttaagtatttgtgtctcaatgatgttaaaatttatatctgattttttgttttgttttgtttgtggtattcaaaatgaaaatttctcgttcgtctagaacgactcgaaaaattgctccaggggtctgggaatcctacccttatcccaatcatcgaacggcttgaaaaattggaaaaattggtggaacggctcgtagagggtgagaatcgatatggacatcgatttggtgacccccaccacacccctacttcggcccccacccctaagaacggcaatgttcaatggggtcaaccaccgcctttctctggctcgggcgccgtttctcagatgatcaccgaggcgatcatcaactccgaacagctgaaggaaaagtccactcgggcagtcatcgaaaaaatgccggaggcgatggacggacgggcattggtggaacaaattgcagaagaatgtggcatcaaagacaaactttcgccggacattcaccgccatccaaggacaccacctgagagcggggcaaaaagggaccgaattttgaaggtgccgtttttggataaattatcacgtgacaaattcctttacaattttcgtaatgcactgaaaaaatttcctaattttccacaattcatcaaagttcgcagggatatgacccaaagcgaactcaaaattttgtactccctgcggcaacaagcctatcaggccaatattgccgcaggtgagtacaaatattttgtggtcgatttggagatcaaatctctgaaaaacccccgcccgctcagaactcgctagggatacgcgagcaaaccaaacaaaaaaattaggaataagggagaaaaaaatccctgggtttcctgcctattaataaatgcccgatcaatttcaaataaaatatctgatttagaacatatagcacaaaagtatgatccatcaatattcatcatcaatgagacctggttaaaccccagaaatacaattgaaaatgaactatctataaatggtagatatagagtaattcttgcgaaccgaaatgagaaaaagggcggtggatcagcaattctaactaaaacaaatattccttatcagacactattctctgggacaaaattccaaagcgaaattttacacattaaattactttttaaaaaaccaatccaaatcataaatatatatcgtccaccgaattgtacagttcagaatactaaaaagctactcaaattcatttcggaccagagtaattctgaaaatatcatatattgtggggattttaacatcccaaatattttatgggacgacaataaggtacttcaaagaaatgagcctgtgtcaaatttattgattgagtttattgaccaaaaacaattgaaacagcatgtcaaacaaccaacaagagaaaaagctattttagatttagtaattactagtgaatcagaaataattaatgatttaacagtacttgaaaatttttcaacttccgatcacaaaatggtcggattcaaaataaagggaaaatttagtcgtaataatcacagagtttatagaagagatttaaaaatattaatttttcgaaattaagtcaggcgatacttgaaaatcgaaatgatttagcaataaactcagtatacaccgttgaacaaaaatataaagaatttttaaataaagttctgaaattatatgatatttttatacccnataggcctctaaaatcgataataaaacaatcatatcctaaaaa

SEQ ID NO: 14635 - DNA, 2531 bp, Heterodera glycines
accatggcttcattggattgggccgcccattaatatttttaatttttggggaaaaatcatttgggaaaaataagaaagaaaggcaaaagaaatggtttggaggaaatttctccgccatcaaaaacatagttgggtttaacattctttcaggtattggtcatttagggttaatccataaattatgcaaaaacaataatgcaaaaaacccaaatatttattattcatggtaaataaagtgatccgcggatcaggtcgatttagaggaaaggaaaatagcgttggatttgatgagaactactgaggaaaagaaaaggaatacaatccacggatcgagatccatgggatacccaatccgatctttatgcatacggattttgatccacggatttttcgatcctcgaatcagtgattcgtggatcacgatccggggatccgatcctgatctttatgcatacgggtactgaagcatatattttttttgctccacaaatatgtatacagtatacttatcctcctcctgtaatgaagttgcgttttctttttttttgttttcatgataatcgcatgtacgacgtacatgtacacgtttactgtcatattcagtttctctcacaaacgaatgaatgttttagtaccaggcaacacttcccacttctcatccctcttccactgctgattgtgaattaccccttccttccatttaccaatgttttcctcccctcaccacttctctcctcctccttccactgccttccaccattcttcgattaccgctccacccccccccccccgccataattttgcttccttttctttccacatacagctagctctttacatctctgcatttctctgttcttttattttcgctctgtctctctcttttcacaatcatcatccacacatactacattcggcttgttccccgtgacatttaattatttccacttctgggtctttccatttcatcatttattctttccatttcatcatttattcttttctaatttgtacattccgtcatttggtcatatgacagctaattgaatttaactcaacgcatttatatttgtcccattttttatttaactcaatcatttatctattttgttccttctaattttttagcgaatactctttattcattataatgcaaatctttgtcaagaccctcaccggcaagacgatcaccctcgaagttgaggcgagcgacaccatcgagaatgtgaaggcgaagatccaggacaaggagggcatcccaccggaccaacagcgtctcatcttcgctggtaaaactccctttgctagacattctcgtaaacaattactgttcaggaaagcagctggaggatggccgaaccctcgcggactacaacatccagaaggagtctactctccatcttgtcctgcgtcttcgtggaggaatgcagatctttgtgaagactctcaccggcaagacgatcaccctcgaagttgaggcgagcgacaccatcgagaatgtgaaggcgaagatccaggacaaggagggcatcccaccggaccaacagcgtctcatcttcgctggtaaaactccctttgctagacattctcgtaaacaattactgttcaggaaagcagctggaggacggtcgaaccctcgcggactacaacatccagaaggagtctactctccatcttgtcctgcgtcttcgtggaggaatgcagatctttgtgaagactctcaccggcaagacgatcactctcgaagttgaggcgagcgacaccatcgagaatgtgaaggcgaagatccaggacaaggagggcatcccaccggaccaacagcgtctcatcttcgctggtaaaattccctttgctagacattctcgtaaacaattactgttcaggaaagcagctggaggacggtcgaaccctcgcggactacaacatccagaaggagtctactctccatcttgtcctgcgtcttcgtggaggaaagaactgtattgatgaatgacacgatggacatatattgttttgtgcttaagcactggacgctcctgtcaccattatgttccgttttataatcttcatcatgaatgtatttcagtgatcacggaacgataaatcttttccctcagtttcagacttggtaaattgttagaattatatgcattggggtgctatgtaactgaaattatttcttatattttgtatcgattagaagtggtccttggcagaaatcttaacgctcattttttgacaagatttcttaacccgactatttgttgctgaataccttcgtttagctcatcataatcacctcataatattatattgaatgcttatattgcaagaattggatccgccgacagaggcggtaatcgaaacggagggtcaagtggtcgctcattgggaaaatcattgccttggccagggaactttatatttgatagagaggtatgacaagattctgcccattttgtcatatcataaacaaatacaaacgaaatcacaatttagcgctttggtttggataagccacggcactaaaa

SEQ ID NO: 14636 - DNA, 1528 bp, Heterodera glycines
tttagacattgaatacgttcccgcggaggtcgacgacctttactaagagaccgaggaggaccctgaggtcaaaactgtggcagttcgtctcgtcccgacaaatgcaatgcgaagtagtaaatattcatttgggcttgttttcttccccctaagtttccatttaccatcccattcgaacatcccatttagtttctgaactgttttctacattgagcaaatgtcaggaactgaatcccgagattgatgaacagatgtcaggttgtcgtccatttttaattcaaatttgagtctccacattctgacggggatatttctaccccccccccccctcgtccgtcataagggggcggcagtaaaagaggtggggtgtgggcaccgacgaagggggaaaaggaaaaatcttaaaatttgaacaaattttctaaaccaaattcattaaagtcgcaaacttcacccggcggcgcctaaaatcactatttcttctttttttaattggttcaaaaatcataaaatttggtgcgaaaagcaaaaaaaaaggtcgccgctgggaaaattttggaccttcgtgtcgaaatttggccctggcgcaccccttgcgcgtatattattgcattcgggagctattttataagtagtattaatggtcagataatgacagccttctcggtgacgacgagtgcgatgacgacggcgaattggcgcagaatggaaattccgaccatttcgacgaaccttcggctgctgctttgcacgaatggtgagtcatcaaatagcggaaaacgaaatccatgaattgcaagatgggttcttttccgttatgctgcatctccctcccctaataattttctgggctagtcaggcactaatgctggagtcaagtctaaaaactatgtttcgtcatgaatttgtcattgattttcgtagtgaataaatttatcggagccttacgggttttttctggattttttcgaaaaatgggaggggagggggcggggcatgcggcgtggcaaacagatactcaatattgaattataatcgtaattaacaatgtctctaatataaaaaatggtgtacttttcataggtttacgttggacagtcgatcggatgagtaagttcctttttttatattttaaatcaattttcgtttactttgtttaaacgtcatccgtaatcgaagggaggaaacccctcttccccgtgcgaaattaaatttttctatcattggtttagaaaatggacgtgcctacaattattttgtagttatttcatttttattttagggtacggcttagcgcagaagggcgagcaaatttggtaacaatatgaaattatttgtttatacattttaatttcttttccaggaaagaattgttggctccttgaatgacgctccgggcaaaaaacaaatgcatataaattcgaatttaaattattaactctgttcagatgaaaatgtttctgatgatcggccgaagtcgcggaatgaacaggaacagatggacgacaattgattggaagtgatcgat

SEQ ID NO: 14637 - DNA, 1703 bp, Heterodera glycines
  unsure (1)..(1703): unsure at all n locations
ataaggaaaaaatttgatgggttgtgggtggctttattaatattatttataattacgacnccataaacgcacaaattaacactttttattaaaaaataaattataaatgattacgatattttatgatatatttatacaatagaattacttagaaatttaaaattttaatgtttttatttaaacaaatgcaaaaattcattttcttataataaaatgaattttattaactattttacttttaaaatgatatattgatttttattttttcataatttggtcgaaccctattagaatagttgctttatttatgtaagcttaatttaatagattcataacaaatctgacttttatgagtccaatcagactatatgagtccaataaaatatttatgattcccatgacaatttatgagtcaaatcattttttgaatccaatgatttttatataaagttttgagtcgaatttttatttttcaaactgtcagcctgaaattgcaaatacacaaagtaagacaaaataatagtggatattggtatcgaatttcttcaagaatattttagaaaatttttgaatttacatggaaccaacacaacatatactgataaaggtaggtgcgtaacatgttagagttagttacgtgcaagtgtcgcaatccatttttgagtcaaattttcagaattttcacaggcaacgcctttcgacatcgtcggacccattactgaaaagaaatttttgtaaaagtctaggtctcgagtcttgtctcgggtttttggttctcggtatcgagtctcggggtcaagtctcggaatcggtttcgagtctcggggtcaagtctcggaatcggtctcgagtctcggggtcaagtctcggtctcgagtctcgactcgagaaaagtctcgggttttttggttctcggtatcgagtctcggggtcaagtctcggaatcggtctcgagtctcggggtcaagtctcggtctcgactcgagaaaagtctcgggttttttggttctcggtatcgagtctcggggtcaagtctcggaatcggtctcgagtctcggggtcaagtctcggtctcgagtctcgactcgagaaaagtctcgagttttttgggtctcggtatcgagtctcgggtcaagtctcggaatcggtctcgagtctcggggtcaagtttcggtctcgagtctcgggaaatttttggtctcgagcatcactactatcggcaccgctggccctgctcccaatgccacgccaagacattgtgccattttttgaccattctgattagtctaatttctcaattactgtactgcaaaatgaaaataaaaaatatttaaatttattttattaattttaaattttattaaaaaaatgtcaaaattgcattgcatatttctgtgcaaaaaacagaaagtgtcacaagcacaacagttgtgacccgactacgaatatggattatcgacacaataaaaccaacggaaaaggtgaaaaatgcggtgatgcgacatttatagaaagtatgacattttttggcgacatgttcaaaaagatttcaaattttccactaaataaatcagccgaaaaataatctcccagtctccattagtctaccagtctccaattatctccccctttctgcggaggttgaaaaataatataccatggcatataaaaagagcaaatacggtatgtatgtcccgggacat

SEQ ID NO: 14638 - DNA, 1538 bp, Heterodera glycines
  unsure (1)..(1538): unsure at all n locations
tttaagcaattttctgaacaaattttcattaaatactcaaaaaattttcctggcggcgcctatcggcaccgccgggaccccccattttaccatattattgaaaaatggaggccaaaaatggaaaaaacaataattttttggcgaaaaattttgtaaaaatacactccctaattcgagttttcaaaaaagcaaaaatacacccataaaaatcgattttttcaaaaccgtagcgggacctgccgggacctgagaagccgggaccgggacctcgatttttcttcgggaccgggaaccgggaccaaccgggaaattttaaaaattttaaaaaattcaaattttaattatttttttaaagtgaaaataatataaaattatttttttattttatttttattttataaaacccaaaagttaaagctaattaaattaatgaaaattttcaaatcaaattttcttcatttatttcaaacaattaatcatttttggaccaaatggtcgaatattattagaaattcacatttgcttttcacataaatttttcggcgcgcttttccaaaaaatttttgaggaagaaaggggtccggcagtgccgataggcgcggccggtggaaattttgaaaatttgagtgtaatttgttaacagattttcaacaaaaaaggctggttttcgggattaataggcgcaacagtttgtacggattttgtgtcaattaaaataaaactatgagtaatcatattttgtcgataggaaagccatgagtatacaaaaaaaaattctaaacatgttagtttctgtagagggattgaaccaggggaacgaagaaggaaggagactagacactaggccttttgcacaattgcaatcgtcccttttaaagaatatattaatatatttttaaaattttttccttttaactccaattttcttcactaatttttcactcagacccccattcttgccagtgtttgtttttcnccggttgccctaccgggatcgggacctgagcttttcaaaatctgggaccgggaaccgggacctcggatgaccgggaatttccagcccggtcccggtcccgtggcactctatactaaactgacccagcccataattttttataaagttggcacaagaaaaggcagcacattttaaactttatctcaacaaatttccgcttcaattgacaaattccaatggatttataataatttaaaacttcgaattacgttgtgaaatcaatcaaattgaattattttgggaatctctcctttaactgaggcacccgatcatatcacgggtccaattcttgcaattgttgttgatgaaatcgtagttcttccacatgccatcaaacactcgctgaatgccatcaaattccgtggtgcgaatgccaaagatgggctcgtccccgtaagttttcatgtaacggccccatctgtcactcgttacgtctttacacacaatttcgtaagttttgtatgcaatttgaccacaaattccgcattcgtagcgcacttccaaagcggtgtgagtaatgtct

SEQ ID NO: 14639 - DNA, 1401 bp, Heterodera glycines
  unsure (1)..(1401): unsure at all n locations
atatacctaaaagccaacatacgatctgcatacattggaggcggaatcggtccaaacgtttcctaaaattataaataatttgatttattttcaaattaaaattatttttcgattaatttacccaaattctccccgtcttcacatatgccatcaaatccttagcatcctttgtttccacattaatataatttttaagaccaccaatatatttttgtttccgagttccactgaatggcgtgaaaaagtccacaatgccaatgtaaaggcgcaactcttggttctccaaatatgtctctgagttcggatggtttttgcattgattacaggtggcatggaaaaatggcatttcatcactaaattttaagggatttaacgccagcagaagaagcattgttatccgccattttttaatttctcaagcaatccatcacccacaaattttccggtggctggtaatttcgacactgggtaaattcgacactgagtattttcgacactaagtaatttcgacactacgttttcgacatagagaaatttcgacactgaactatttcaaaaactttcactgttttccagcattttcgacactggaccatttcgacagtgagtaaattcgacactattgagaatttttaaaaattaataagaaattttggtgttagtattaggtatgataaattttcctatttcattttctaattcgtactttttaaaaggttaggttggtataactagagttggtcgggaccgggaaatttgacaaaaaccgggaccggtacttaccaggaccagaaaagtcgggaccgggaccaacttttttgaccgggaccgggatcgggaccgcgagaaaagccgggaccaaccgggaattttttcaagagaaaattttttttgaaaaaattttgaaaatttgagtgcactttgttacgaaaattgccaatattcaaaaatgttcccataaatattgtagtttcgttttgggggacgaattcgaagaaaatttttaaaaattttcatttcgggggggggggggggggaatcttgagtcccaaaattctggatttttataaattaattaaaaaattttgcgaaaatggccctcacgcgaaaatggccacgcgaaaatggccctcacgcgaaaatggccacacgaaaacggccctcacgcgaaaacggccacgcgaaaacgaccccgaccgtggaatgggtcgaagcgggtcagttccgtctggccagttccgtcttcaaaagtcatgaaaacatgttttagggtgattttcggttttcgggccctagaagccctacaaagcgctttgaacaattaaaaattgcaatgatcagtgatcactgactgatcaggtttttttgaattatcgcccanaaatatcgctattggcatta

SEQ ID NO: 14640 - DNA, 1948 bp, Heterodera glycines
ggcacaaggggcggttcgccaccaaaataattgtaccatttgagcacgacgtcgtttaaacgctgttttgggtcaacttcgaccaatttgggctgacgggagaagacgcccttcacatcaaagttcaaaagtggcaaatccttggcatttttgaacacattttccatcagcagaaagagtgttggagtgttctgggaaaggatttttatcagcaaaaattgtttaaaaaccatatgaacatatatgtaaaattcgaaaatttgttaaaacttattttattaatttataaaacacatttatacgcatctgaaattgtatgttaaaagtatcccctaaacaaaataagtaccacaaaaaaaggaaacgaaaatttgtttacaataaaaaaatgaaataataaaaaatacacatttgatttaatggtgtttttatttaatttgaaattttaattaccttaatttgcactcgaaacaccataaagattttgttgataaatgatttgtctcccattttcatcatatgttcaaaataattttctaaagttttttcaattattttcgcttcgtcgtcctttggaatttgctttaacaaaaaaatctcgtctttcgtacgatagaatccgtttgagcttttccctttgacaccaaggtcagttaagtcatccgatagaaaagaatcctaaaaagttttaatttttagtctattaattgttcaaaatttaaattgacttttatcgtaaataaataggttttccatgtttttatgaatacaaatgcttggtgttagattaggcaataaaaatccacttgaagaatattcttttttcgtcaagaatctcttaaaatcgtaggtaaaagtctaagaattattttacgacaaattttaggtatactaaaattagcgaaatgaatcttatacattgccttgacctaatttaagaaaatgataatgttattattaaatattattaaatctatattttgctaatccacattcgttcgatacaattcattttttgtgcaaatgtctcgcctctataggcttctacctaaggcgcgagattacataatcctaatgaatttacttaactccttgaaaccgttaattttgatccgttttcttatttgatatttttatttgttgttcaccactttttatttgcggcgtacgcacttgcgtataaattaatattattattataagttttaccgctaatttcttgtaagtaattccaaatttcacccgcatttcgcccattgcttcttccgcataaaattgaacatcgtccaccgttgtccaatcaaagtcgtaatttagctttttgggatttttttgcttgtttttttcattttctttcatgtttttgcaaatatatttgcccaattttgcttgaattcgttctttatcgtccattttaaagtgcgcatcgtctttcatttcatcagcatcagccaatgccaaaaattcaatgcaaatgttgtcattttcatctttcaaatggcaaaatttaattatatttaatttaattttaaatcatatagtgaattaaataataaattaatattttcgttattcacctgtcatatcaatttctcttggcatcagttcaatttcttgcccttcgaatttgtgccatttcccaattggcactttttcatctggcactttctcaattgccaatttctcatctggcactttctcatctggcattttctcaattgccaatttctcatctggccctttatcaattggttgcactttttcatctttttctttgtataatattccggcagcataaaaatttaatttgccgaccattttttctgcatcaatttcaacaccaacaaatgcacctccgtcaagtgcgacttcttttcgtgccttacttgtttcacctgcgatttttggccgtttgccaacgtcatttggatatctgagtatttcgcat

SEQ ID NO: 14641 - DNA, 1824 bp, Heterodera glycines
aaagacgaagagcagcaacagaatgtaataaatggcgaggcgaatgatggcaaatcggacggtacggcaaaattttatttgataaatgggagtgagaggggggcaggggacagtttcaacaatttctaacagtacccaggacaaaaccaatgttgaaggacgtcgtagagggcttaaaggaaatctgaaaatgcgacataaataaacgttttttagtggcaaaagagttgctgatttgccattcttcctctcccactgcatcgcctcaaccgagcggatgtttcttaacgtccgccaatgtcgtagcggaattggacagaattcgaagggaacagaacagaagcggggccggagaagcggacggacaaagcaccgccgcaacgacaccgaacgcatcgcgaaggccgagcaattcatccgctgccgcggtgattagctaataaatcattattagtgaatgactcatttaaatttcaattttgtaggtcagtggaagcgttgaagacgaattggccaaaatcaaagtggtcttacgacagcacgagaggaggatccgattgcttgaggtgaatggcatttatacggaaaaactaaaaaaacaattcaggaccaattggcggatgccaacatggccaatgcttatggattatgaaaattaatacggacagaaatattgtgattgaagaaatgacgaaaggaaaatatttgaaaatttatagcaaacaaatgcaatttgttcatcacaaaaaatggaatatccgccagctttttgtaaatgagcttcaaatgtttggtggttgtatttataaaagtcgctaataaactcatctaaaaatgaagggcaaatattgccaattgtgcagaatggtggtcccttttccttttttttattttgggataaaaattctggagttaaaagcctgctgcttattgttatgtaacgaccggggcgggaattcccggtcccggcttctcaggtcccggttttgcccaaaattcccggtaacgaccaactctagttataggatttaccaaaattaccaattttgcaatttcgggtcaatttttttaagaaaaataggaattattggggtccggcggcgctgataggcgccgtattgtttcaaacgaaaaatatgacagttaactgactttgttcgcaattttatgatgttttaaaaatgaggatttctcatgccaaatgaggatttttttgaggtattttagtggcaaatgaggattttttatggctgaaatgaggattttcaaaattttgagatagaagtcctggcataatgtcaacaagaatttcgcatcgtattttcgaaaatttatgaattctaagattcggacttattaagccaattcattctaccccgattcgtactaaattttcccaaacatgtaaaatgtgttgagtgttcatccaaatttttcaaccaaaattccccatttctcgcttctttacaattttatttctataccattattcgacttcaaacagagtttattaacgacatggtaattttaaacaaaataaaagacaaaattctccgcttttagccaggcaatgaaacaattcgaggccatttggaaaaacggaaggattggatccgacggacgagggaccatcaggaaaagtcggcggatatcaaaaagttgaagagaagcgcacgggaacggaaccccgacgaattccattttcatatgttgcggagtcaaatcggagtgagttggccattaaaaaaatgccaaaggatttggaaattgaatttccattttggcatcccttttttgttagtttgttatgttaataatagggtt

SEQ ID NO: 14642 - DNA, 2407 bp, Heterodera glycines
  unsure (1)..(2407): unsure at all n locations
tttttcggtaagagaatggcaattggacatcctgttcttctgaccattatgaaaccatttaggaattgatggacccgaccttaggcttttacaacagagaagaggacaaagtgacactggccattgacgtcactgtgaaagaagcaaaaacggacaattcgtaaatattgtgggcaatgtttaattgtttagcattttatgttcaattttgacattttttgnttgttacaaaaacatttggatttatttatttattctgcaataaattattgtttttagtgatttttaagataattcaaaaaatattttcaaaaaattgccaagcacttaaaaagggttttgggtgtactatagtcaacccccggaaaaaaatgatttaactgtggtgcaatgctgtccaggaaacggagaatgagcgacgccgtccttactccgaactttgcaaacgcataggaaagggaacgcgaactgacggtaggtgttgcaaaagttgagaagctgaagagagatttgtgactgtcaaaaaagtctgagttaaagccgaaactgatcaaaaaaggagacgcacggagggcagccatttacaaatggcagtacgaaaggaagaaatgagttgataaggaggaaggcaaagtgtactgggattgaaaaattattgtttatttgaacacgttgtttttgtctatggaatatatttatgcactcttttggaacggacaatgacttgggttggttttaagttggggatggtccttcgtctattttgcttcctctttctctctctccatgtcatcctctaaggtctgcgttcgttactcggaaatggtaaaagtccatcgcggtgatcgaaacgttccaaccggcgcttgtggcggcaacgaagaaaatgaaaaggaaagtgattgggtagaggaagaattgcgtgtttttcagcgtgggaagtgctgaaaacaaacattgttaaatatatttcaattgatcattaaaatacaaccggtatagccgaggaaagtaatgtaattataataaatggtggcaatgcaccaaatggaattgccaaaaaagcgggcgagaaaattttggtaatcaaccaatcctaaaaaatattttgttcaaaaaaagaaaaaaagagggaccgtagaaaagcaaaggtaaaatgacgtggagaagaatgagcaacgggaaaaaagcattcaaatggacatcgaagcaataggcccactcgaccacgtcgcaatccctcgtccgacgcaaaaagcgatttgaaatgaacctaaaaagggagggacacaaaaatatgtgaaatcggagagtaaatatcgcaaaatagcgaccaaagtgcggttgcaatggcaatgccaattccgatgcaatcgatgaacacaacccaaaggaaaaaggcgcaaaacgaagaaaaggacaaattgagcgctaatgcaaacagaacactcgagccgagcagagaaagtgccaaaaggaggagaaaggcggggtcatcgcgggcccattgatctttggcttctgaacgaaattagaaattaatgaattaattgagagggacaacaaactttttctgtacatgaaattcctgtacaccttttgcggattgaccagcaggtaaagcatttgccaagcagcgaattcaaagtccatctgtcggacgtgcaccaaacggcggaagaaacggctgagttttgccgctgcggtcattttaacggcggaaaaacaaccgacgtttgaggacgaactgcgaaaggagagaatgatttaacatgaaataaataacacattgaaagcaaaaagcttattgtaattaacataaaactaaagcgacgcaaccgaaaaatatgccaaaacgaacgcacaatctgctggtgcctgaagtgattgagccgggggtggaacatccgcttctgttccaataataatccttcctcaaacctcccgaaaacgaagtggacggagactgatagccggctgaatggttaaaatatgttttagtttaattaccaatttctttcttttttctacctcttggaacaaagcttttcttatggctatcggcgaagctcattcaaatttcatcaaacgtggaataaaaggataataattaaatgaaaggaacaaagtcatataaaagaaaaggaagtgaacgaattattaccagccaaacaaaagccaaatattgaacaatactctcctaaaagttttagcctcagctaatgttactaagaaaactcatcgacagaatcatatgatgaaatcatagataaaatcgtaagattttatattttgaagctagttcttgatcagcgcctagattaatctagaaaagttaaaaaagttcaaccaaatataaccaatcaactaatgtatgcaaagtattcatgtaggaatgcatcaaaga

SEQ ID NO: 14643 - DNA, 2986 bp, Heterodera glycines
tcaagtatttcaagactgacgaactaataaagtaatcactttttattgtggcctacaaagaattcaattttccaaaataaagaagtcatcaaattttatgaaaaatcaaaataataaaaaagccgaataaaaagtttacaaaaaaattaaaatatattattttaaaataggcaaaatttatacctttcgccaatttaaatgaataccttaacaaaatgacaaatctcggaccaaaatgtcaggatcagggtcttatatcaacttgccgagatcaggattgacattaggaatccagctaggatatgattaccgtagttcaaatcccggtcaaaaaacttcttctttttagctaatcgaggcaaattacgaaaaagcaaatctccagcactattaggcgctgaagcattctcagacagagaacagaggacgttagaaaaatttcatgagagattcgaaagggaaagaaaaatagcacgggaagagagaaaaagacggagtaatgaacgacggctagagagtgaaacagaagaagagagtgatgaagaaatggtattggacaaagaaaacacagacagtgaagagatggaaaaaacagacataagaaagggtggagaaagcgatgagaaaggaagaaataacaatggcaaagaaaaagtggaacggaatgataaaagaaaaagccacagcggagacagagaagaaaagaaagcacagaaaggaagaaaagaatattgaaaatgaacggagagtaatgagtagggatgggaattttaaaaaaaaattttgaaaatgttaaactaaaaaatcgggttttttcaaaaaataaaaaattaatttttcaaatactaaaaagtgcttcaaggcctatttaggtcatttttatggccttttttgcatctttcaccctttacgaagcatcatttacatatttcgtacatatttcatatattttcgtgtttttttcacatattttattttatattttgcaaattttcttaaataaaattcccatcattaataatgagagaaaaaggccccgccacttggactaacatgcaaaatttaccgtatatttattgattttttaacaaaattttccaatcagtccgaccaatttaatctttgattagtttagcattttctgatgaattaatgaacccacgataagtagccgatttgggtaagtggatcagatcgattaaagaacgatcggtgctgagacaaatatctttttttcaaaattgctcatttctttcttgttgaggtttattaacctctcaaatcccaagtctttatcttgaattcttctatgtttttttcaacataaaaatggcatccaggaataatgccaacgtcgaattgattcccattgtgccaacatcacatccgaattggtgccatttgcggtgccgttgcaaccagacgaccagaagcagtcatcggccgtgaaaaattgcctgcggcaattaggtgctcattgttcatgtttccaatgccattagcgttgtcatgttgtcctggcgctattttgcgaatttgaaatttgcggccaatggacggtataaggaggaggaaaagcgcgaaaaacatctccaggaaggggcggatcaaagcagcccattgttgaatgcttaaatttattatgaatttttaacgttaaatttttcgaattttaattcaatctttttctattataatcagggatgcaaaaaatatgcaaatgcatagtttttttcctagcttctccatgctataaatagtaggaaaaacactcttttttgtgtttgcgtataaaagtcgagacttttatttgcatatttttgcatattttgtggtttttctgcatatttcatgcatattttgccattttttttgtacatattttcagattttttgcaaattttgccatttttcgtcaaatattttccgatttgaatttcccttggagaaaaataattgattatgcataaaattaaatccaaatctgaatgggtgtgcgaatgggtcaaagtgagcttcactgccgaaaaccttgagaaatttttgatttgaaattgcaaaaataacggataaaatttatgaagaataaattttttgattaatttgaacccctaattttcaagtttttgtgcatatttggtgcatattttgcgatttttgtgcatatttatgcgcatattttggccatttttcgtgcatattttttgcatccctgattataattgatttttggtactgttttttaaaattaattgtaattatattgatcgcattgtttagtgttaaaaaaaaaattaaattttaataactttttggttagatgttttttaatatatattaacagggattccttttttatgtaaatacatattttttcttggattctccatgctctgaatagtaggaaaaacactttcttttttgtttttgcgaacaaaaatagggacttttatttacatatttcggggtttttctacatattacatatgtacatatttttatacatattttggacttttcgccattttttcctacatattttgcaatttttgaggattttttaaggaaatttttatcaaatgccccaaaaaatccaaaatttagcaatttttcgtacatattttcatttttttcatattttgagaatttatagaaatttcttgtgaaatttagatttttttttgagaaatatacctctaaaaaatcaattttttttttcaaaaacagataccaaaaattaatttttaaagtactaaaatgtgattttaggcctattttggtcatttttattgcattttatgcctatttcaccctttacgaagaatttttccaaaaaaagtaaccgttaaaaaaatttttatttacatattttcgtacatatttgggagtttttgtacatatttcatacatattttggcattttttatacatattttatttacatatttcgcgatttttcttacataaaaaaggaatccctgtaaat

SEQ ID NO: 14644 - DNA, 2314 bp, Heterodera glycines
  unsure (1)..(2314): unsure at all n locations
atcggcgctgaagcttctctatcgggcgcgacatcttttgcttttggcccatggcgagcagcatccgtatatgggtcaaattgatgtaatattctacagataatatttcaagaagcaattacaataattggcaggccaatatcggcatcattctgtacgccttgcaagaatttgacacgtcgctaaagttcctcaacaatgctttaaccctctaccaaaagtacggcgtccctgtcaagacggcccttctccaccacgtgatcgcccgtgcccattcgtgccgtggcgatttccgcacggctctgaattttgagaaggaaacattcaacatttactcacgtgtattcggcaaagaacacgagaagacgttggtcagcaacgaatgtttgcgtcacctcaccaaacaggcggtcaatttccaaaagcatatgaacgacgcatcgcaaggcctcaaaacgtccaagagtctcgtgccaaacgtaattgattcagttaccattccctgtcattttcgttctctttttagtttcaagtacattctccttctcttcccaacattgtcgagctgctcaacgcatttaacaactttttgtaagtcttactttttgagacttactttccgattttaaatatttcgtttcaggttttggaagttgcaaattcacacggaatgaagcagccttcgtcatttcttccctaagacaaaatatattgacatttgttgttgcgtttctcttcaccattttcttattcttggcacttattgcagttgttatttgttgtttttgttttcgcgctgatatattctaattaacttagatttaccatttgcctcaaaagttcaatccatataattttgtttgtttatcttttgtttttttataaagcacaccaccattgctcatctgcgcagctttattaaatgatacacttgtaattcgaatggtattcaatttcatttcatgggtactgtagataatgcttccttcctttaacatttttaagctcggaaaccgttccgaatactgctcagaaatctgactccatttaattgcatttttgttaatatttttgggaaaaaactaaaataggatctaaaaactcgaaaaatagcttaacaacaacaacagaaaagatgtttttcgtgctttttaggtcctggaaactttttggcataaatatttttctcgctaagattgacttatttttcggaatttctccgataaaattctaattttgccttaaaagaaaaaaattcattaggggtcggggtcacttcgccgcggngccaactcgccgcgccttgtttttttttttgttaaaaagtagtcatctctcagtattttaattataaaattcagatgtttattaacaaaaccacggtccataacacaattatttaaaattcccctgagaaacaataatattttgggcatcaaaattttcgataacattcaaaaattcgcttttccgccttccaaacttctttttcttcatcggtggttcttcgccgttcacgatgttcacataatcggcgtcgcgcgcacgctgatccattcgaagaacttcgatgaagcgcgaaattgtagggaacactgaaggaacttattttataagcaaattgtggtccagttcttgccccacgatgtcgttcagcgcagtttgcagcagttaaatgctgatttggcaaaaatgagcgcggtgatcatacgcgccgtttctacgaaaacggggtcacttcggtagcgttaaacgggagacaattttttttgagaaggagacaatttctttttctgataacaggaaattaccttttgaagtccttcggaaattaggcgcttgtgcaggttttgcagtgcaatggaaatgttccatctgcgaacacttctgtcattgcttgcgcccaatttgcgtaagaattcttggcaaaaatcagaaccctgaatttaagggacttcaaaatttttacatactaaattagtaccggtattgagaaggcaattccatgcattccgccacacgcctcttgatcactgtgatgacttttgtttttttgtgggaccaataatcttcacaattgccgaggaatccatcgttctgcaatttttctttcctgcgttagctttcaatttgaatcatcttagtttggagagaaaatttgatgaaatgtattatattgagacatagttttaatgttttaaatgtattttttaacgaaaaaatctggcggcgagatagtcaaaaacaaggcgcggcgagttggccgcggcgagttggacggcggcgagatagcgccgcggcgagttggccccgc

SEQ ID NO: 14645 - DNA, 1650 bp, Heterodera glycines
  unsure (1)..(1650): unsure at all n locations
tcgaataaattaataattaaaaatattacaaaattccatttatagattttcatttcctaaaaaatataaaaataatactattaatgaagtggtgacataaaaaaatttataaattctacaattatatgaaaatatgatttaaacacaatattacgtggaaaatttttattatatgattataattatttaacattggtaaaatattggttttaaaaaattgtgtaatatagaaaaaataaaataaaatttttggggtcggatttccgatttccgattaaatttcctaaattttccttatttaaatttgagtgaagagaaaaaatcagtgtaaaataaaagattttgggctcgcccccgccgagcaaaaaattggattgaacagaacagattagcgcaatactcgatattcaatgctaaacgattttcgtgcattatataagaaaactttttttttagtactgaagtgtccagtttcactgggactcagttgtcccacactaagattgcgttggttcgacttaattctttgttttttagacttagctcatcaagagctttcgaatggtaccaaatttgtggggattcgatcgtttagaaaaagttagagtgcgaaatctctcaatttttcgagttttgaaccggttcaaaacccggttttttggcatttccgcaactcgagacatatttttccatgcttagctccttgaggcgaatcgattggtatatcatttgacccattttttcacggggcgttcactatagtttacccgagttgagttcaaaattgccgttatattccatcacattactaacttttttagcctcttatttcccaaaaatggataatgaatgcgcacagcttaaatttgaaaaagccgaaaaagagaagcacattaagtacctcgaggtagagggcgcaaagaaagacgaacaattggataaaaaggatgaccaaatcaaaaatatgcaaaatgatgccacaaaaaaggtggaaatctgataggggagggaggagggggtagggggttaacggccaatttacaaagagtgtatatacaagccccgtaaattgaatttttgattttttctgttacttaaatgtttgttcaatttttgcgagataaagcaaaaattcaaaaaataattagttattaccgaaaggtgttgctctgcttgtagtgtgtcgacttcgcttgaacattgaagcatgcctcgggcattttgcccaatttttcaaatttcttactctcggaatattcccaaaggggaaaaccctccatttatccattttcctctgtgtctctcccgcccattgcttcttcttctccaatgtcctttcctccacgtggcagaccattgattgtttttgtcttcactgccatttgcttctttctctctccggtttattgctcttcttatttttgttggttgtataccagggatggcacggaattccgacttccgagttccgacttccgacatttttggggtcggaattccgacttccgacttccgaaaatttttggggcctcggaatcccgacttccgacttccgaaatttttgatgaaaagtcggaatttttcggaatttttttgagttttttttcaaaaattagcattntttgtacaatttatgttaataaattgcat

SEQ ID NO: 14646 - DNA, 3773 bp, Heterodera glycines
cgtagcctaatgcaatagaaatatttgttgtcttaaattttttttacctttcttcaatttttgcatctgttttgtaagagacgtatggcttcagctcgaaatttgctaggtccggcacgaccaattcgggcaccatttcgggaacatgaacaaaatcgtcagttttggggtcattaaatcctgtgggcgccactccggtgtatcctaaagataatctccactcataggttagcttccaattccggttcgcttactccatagctgtttaaagtttgctcctagaaattttggcgagagctcggggaattccttttgttgaccgggccatttgtgcgattcaataacaaccggcccattcttccgccatccagttgagccctttttttcaaaaggccatggcgcacgaaagcaggaggcagtcacatgacgaaccatcaaggaatgctgtgaaaacaaatatgtaagaaaaaatgtagaataatttgataaatcagagaacaaaaacgttaaacaaaaacttattttacgtttaaaacatgcaaagaaattatttttacatttaaaatatttatttataaataaatgatgtttaaatacatacaaaagagatctaaacatatgtccacgttaattagctctttacaattaaccattcataaatcaatcagaggggctgaggtgaaccgggtggaagaaaattgtcgaggaaccattgctcgtttggcacgaaaaggagcggaacacaaagcaaaagaacgacgaaggcggcgacgaaggcgtacagctccaagcggaggtcggcttttaggtacagttcgaatttggcctcatgggtccaatccgaggcgacccacgtagaatactgaccactggtgaagttgtagtctgaacagtccctcaattcaataaaacattatgaattgcattacctccaatttcgaatgcgggtgacctggccacggtttggtaagtgctcgtccggtagcaactcccattcccatttcggtcgttcatccacacaaaattgtacacctttttccaaattttaaacacttccagcaattgaaatcgctcacattttcttggtagcccctgtcacggcattggctttgtgtccgaacattttgtgccggttctttgctaccagttgaatgagtgagcaaaaagaataacaaatgccgaattattgggcgcctgtttctgccagtggcatcaccaattgaaaaggaatttgctaaattaaggaaaagcggtcaaaaacgtttaaagagtgatgcctgtgtcgttgagataggcatcgatttgtcggtcattagtggcatttgttagcgtgcggaaaagcggacatgaccaattggcaacgaaaaaacactcgcccaattctttcgcctgtaacgtaccaaaagataaccgaaaaataataaatctgtacataattctcgtcgattttgaattggtccacttcagttgcattattattagcaaataaataagaaagtgctgccctcaaagcaatgtttgatgcgtcaataatcttgcggagaaactcgtccaactgtttggggtgagtacgaatttggtcatccaagaatgagttcaaatacctcaaacaatggttatgctgataaaaagatcaagatagaaaatacggatattcgtagtcggcggatccaaatgagctcagaattagaccggggactttatcagatgccttcataatggagtggtaactggacggaggagcggcaccaaaaggcactgaggaaggatcgacgaaatggaaatgttcaccgcttccttttgcattatgaagaaccgtatcaatctgaacagtgtgataagaaatgctaaaatcgtcttttaattaagttaacaaaccaggcttttgttttgcttgtagatttgtgcgtcggtgtgtgcgtaaagtttgggggacgcgccgatttgttgaagttccatgaaaaaggacagttcgtccacgccaatctgtcggacattcttcgactcttcggagaagttctttgccacggcagggaaatgccctcgtcccatgtcccacacccatcgactgctgccaatgtaaccgagcgactcgccgtgcaaaaaggcgaacaacaactgacgacgggacagactggcgagccgattgaatatgtccattttttggccaacagaatgggcaacgagcagaagggaaacgagcgaactgagcactgacaaatcgccacctttggcaccacggaaggtggagaaagagtccatctaacaaaatgacagaaaacattgctatatttgaaaaaattaacgacaattttgataattaatttgaaaaggaaattgagtcgccataattaagtgtgaaaaagggaactgacccgggcagctaacacaaattggtcggcactgtgattctgcttactcagtggaggcaacatcagaaaaacattcatatcttcaagtacttcacataaagaacttaagagcaaaattgaagaaattaaatttaaaaaccccacctttcgccaaagtcagccgtccgttccaaacaaattttggtattcccagcagcggacataaattgtgtcatgcgccccacacaacgcaatccctcggccatcagttttttgttaaatggctcaatgcactgaagcaaaagattagtaaatgcaaattgtgctggtaaaaccttatcaaagattaagtcgatctcttcgttgctggtgacaagacgaagaggtttgttgaagtcgataaacttaagcccatccgagtgaatcgcgttcttttggttccatccatggcaactttcgatagttttctcattggaataaaatgctaaaaaactcagcttattgagatgtgattgttagcggtcacaacttcaaaactcactgaactgacgatttggacatgagccatcctcagaaaactctttaggcttatctttcccacgatgtatcaacagaatcccaacaacttgcgcgtgtgaacgaaggattccgattaaagcactaaaatttattatttacctttcgttaattcagaactttatcttttcgtcacttactcattaatatttgtgagttgaataacagcgattatgttggatagccccaatggtaaaatgccaatcgcattttgtacgtcttttgcatggacaatttcagtcaggacgccaacattcccattgcgactcgcttaatatgtaatcgagaattctaataaatccaaattaagttaaaaagtgtgaatacttacactgacatccaattgaatgtgtaccattcaacattcgaacacattggacatcggtgttattgagtctgataaaaatttgatcttctacgccatcataagcaaagactaaaacgcaattataatagcaaattattgccactggatgaataatgatctttcttatttacttacctcttaacacaaaacaattgaagagcaataaaatgagaaattgtgatttttttaaagagagcattattttaccggtcacctaaaaacccttaaaggtaattgtttcaagaacaacggaatttcttgtacatgtaaaaatttagacaccctgtacctaggtacatatataggtaataatagttcagtttgtcccaccccctttttcgaaatttttttatgttttcaaaagtcataaaaacactttttatggggttttcgggatcgctgatcacgaatccggcgcccatttagaccaattcttaatcccggacccgaattcgaacaaaaagtcggaaatttaaatt

SEQ ID NO: 14647 - DNA, 2400 bp, Heterodera glycines
cccatagtgaacgcgccgactcaacaacgagagatgaaccaatatacagagagtactgagacatatgcgcctctcaattaggcgcactattaagcacttgcctagggaacaatcttctcatctaagaccaagaaaaggaaattgtgtaaaaataggtaagacattgttatacaacgcactcattcgagaaaagattaatgaaacaagaaatgatagattcgtcgagtttgggtcggcgttgaaattggacaggcttttttaggttcgtttttattttgttcgtgtatcattgtcgatagatcaatccagcgttgcccagccctctgactaataatgccagattaacgcgaccctctgactaaaacggccagactaaaccgaccctctgactaaaacggccagactaaaccgaccctctgactaaaacggccagactaaactgacccggtccgaataaattaaacgcaaatctcaaatttggatatgtataaaaacaaatcccctttttattgctcacccaatgcaattaccgtatttgctctaattatcccccaatctccattaatcccccaatctccaattatcccccagtctaggaagggtttgaaaaataatcccccagtctccatttatcccccatggggataaatagaattttcagaaaattatatgccgtcaatttttttcaaaaaaacaaacaaaatcgacattgaaagtgctaacaaatgaaaaattcatcgtcatctccgactccatccagctctacatcaccatcatcatcagataagccggcttcttcgtgatcgtttcgtccatctttcaccgtttcattttctctaaactcgcgcaaaaattttgtccctatcggtccaattgctccttccggcttgaagcaagcaattttttcgtctcctgttccgtccaatggcgtagtcaacccacagacttaaaagtttcggcgtctttcgtaggcatttttattttttaaactgaccctcgaatgatttgatgatcacggctttggaaatttcctgccacgatcggtggatccagtcaagtaccatgtgaagcgctggtgccttcgggttgcctgccggtgtgaactctttttctgcatcattggacatccaagtgttgtagaaatgccgaattcgctccttgagcggcttgttccacgagacatcgggagcctagagaaggaaataaactttactgagaaagatgacactccacctgaatgaatttggtgcaaccgccagggacaaaaaccgtttccactcccaattctttcaccaccttcgtcgttctctcgctcttgtggctgccaaacgcatcccaaaccaagaggcgttcgccaacgaacagctttgccccgattattttgtgcaggtagtcctccgttgtgtcatcgttcatccatatcggcccagcgaaattgataaccaattttccagcaaattgtttgacaatttgcggcaccggtcgctttctgttgaccagcacgtacggcttgagtttttgtccgttattccgtgctgtaagacacaccgtcacccgcattttgtcatgtcctgtggtcacaactgttatctaaaaaaaacttacatcctttttactgtttggcaaccgtcaacgcaaattgtgccatttgaattagcgaacgaacagaccaaggaaaagcggacactgatcaaagcaagcgcaaatgtttgggaagaccgctgggtaatgaaacggtgccaatattgggagacggcggcggttcaatgggcagcccaaaatttggacggatttagcactgtcgagtttcattattacgtcgaagctggcattgggtgagcaacaaaaaagcatttgattttgtttaaaaaattgtgccgaatttttaggcctttgtctccacgtcgcaaatggtgtccaattatttgaagatgatttaatgcatttgagaaatgttcgatcattttgaattatggcgatgaataagaggtgatctgaccattttttatgctcgtttttactctctgatttgttgttgttttccgttaaaatataaattttctctctcgtctcgatgcatcccatgggtatgtaccagggatggcacggaattccgacatttttggggtcggaattccgattttcgaaaatttttagggcctcggaatgccatccctggtatgtatcaattaaaaagaaaaattcagggtgtgaagtttttcatacgcaatttatagttcccataacagtaccagtgcttgtcattaaaatcaagacacaccccatttttcagaatttaaccgtttcccgtgaactggtcaaattgattattaattcataaagttatttgtaaacacgattaaaaggggaccaaaaaaatcccgaaaaaaggacttttta

SEQ ID NO: 14648 - DNA, 2896 bp, Heterodera glycines
tctgatagacaacacttaatgctattgaataataccaataattattaatttggatgaaattgggccaagatacgaatttatatgtcttacattttttattttactacaacttggcagtatttaagaaacgcccacttggcagtatttaagaaacgcccacttggcagtatttaagaaacgcccatagtggcagtttttaagaaacgacccagcaccccccgcgtaccccccccccctgggaccgtccctgtgtggtacaaaccgaacaagtaccgaaacactgatgcaatttcaaaaatttcgatttttgtcgacttagctttagggttcgaatttgatacaaaaagtcggtcaaaaattggaggggcggctgggggagtagcagcactatttccacttatttgttagtaaattaaattcctttttatacaaataaaactcatgaaaataatattcataatgatgcacatatgtacaacatatacataggtataataatggcggtatttacattatgaacaaacatatagaaaatagcatcggattgatcgatcactttcgcccgattttcttctcaaatcctttcgcgccaccaccgccgttggctcgtcaattgtccaattgtatgatttcgagctcggcgaacaattcggtgagtttgttgatgaaccacagatgttttttggtgcacttgctcgccacgtagtcgaagttgtccagcttggcgtgcagttggcgcatctgttccacgctgagtgccattttggactgatcgatgctgaaaatggcgcgatgatcaaattggggtttatcggacgggggggggccgcttggccttcgctcactcttccgggatgacaagcgtttggccggagcagcgaatgtaccacactttgggcatcagttgggccaaaaattccatgtcgcgcaactcgatcacgcacttctgcacattgaggcgtcgtacttccgtgaacagttctctgccgttgctgattgactgaaatttggaggagacaaatgaatcaaatcaatgggcgacgccaaaatcactgacacgaaacaattcgacgaagtgcgactcgcggaacgagctgaacttgctcatgtccaccctcgcggatgttctgggccgcgaacttcgcaggtgctgacgtagcgggtccatcacttccatcatgccaacgctgcgctcagtgccgtcgtcgtcttccacgtccgtgtcgggcacttcgtcagggaacagcttgcgcaacaggtcgaccgagactcgctttctgctgaacctggtcattcgttgagcctgtcaaaaaaaggaaatcgtttggacggaaaaataaacaaattctgccgattgtacgcactcggttgaactgcttggagatcgtgccgacccgcttgaagtccttgaacgggagttgtgaggcgacaatgacaagtgcgttcagtgggagctggtcaagcggaaacgaacactggttgacaaggtcggaatttgttgatgaacacggcgcatccttgttttgtcgcttctgcaaattgaaaaatcaaaaaataaaacaataaaacagataaaaaaaattattacccttttatgggccattttcgttttttggtgaatgttgtaaaataaaatgcgttgtgtgtgataattccttctcttttatagacaattctacagcaataaattgtataaatttcgagaaatttcaaaatgttgaatgaatgcgttgtataaaagggaattgatttagcatttctggccattccattccaaaacatattaataattcattcctaaatattattaccgcctctgttctccgtccgtgccgtcatcaacaaatcaaatcaacggcagctcagccagcagcagaagtgcgcacaaatcgacgacatcaaacaaaactgggcaccgcacaatcaaaaccatcatcttcatcatcatcggacgaagaagaaaaaaaggtggcgcaggaggagccgaccgttgacaaacagaaacaatcagaagcaaagcaagcggagcagcaccagcaaccgcagcaggaagagaagggacagcaagacgcaccaccgcggcgacgcatggacaacacgtgagaaagtggaaaatttcttaaattttgttttttaagctgcacttttagcgaccaaatttggctggacacattggcatggcttaaccgtggagaggtcggcacgaacattgcgctggtcaacgcccgcttcgccaaactggtggacaagcagctgcagcaaaggcactggtggttggaggagttgcacatctgtgagcagaaaccgaaagggacaggcgccgaagcgatgagcttgaacagcgacggctcctactactcgttgccattggccaccgtaccattgccggaaaatgtcgtcggcttcaacagcacattcaacatttggtggccatttcttcaactacttcccaattgaattttaattgttcccacgttttctgcaggtatttcgacgctgaagtgatcgttttcctgcaccgaatgcgccgtctcttcaccacggacatctctctgcagttcgccattcggatgacggaatatcgcgcttggaaagcaatggcacgtcacatttggcccctgctgaagaacggactcatcattctggtcaacctgaagcggaagcaactgtccatgatgcgcaaacacgtgtcgccgaccgtcctcctcgactgcccgaaccttgttcaaatcaccagctctgttttgcccgaacgtccgaccgatgacgacactttttctgctgacttatcgggccgtgacctgtacatgtggctgcacacgccgcgccccgacgatcgtctgctggtgtacaaactgaccaagtggaacatgggatgggacaaattcgtcaacga

SEQ ID NO: 14649 - DNA, 1006 bp, Heterodera glycines
cgctcttttttttcactttaaatttattggtcatttaaatttttaaaaatttttaaatttttttaccaactttttttttcaattttttattaacaaacaattaaaagggcattttaaatcattgcccacttggcccctccatatccaatccaattaaattttccaatctttttttcatttcaattttctttttctttgccgccgctgccctttcctctcgcatttttgtaccactgcttcgcttgccattcctcggtccgcctctgtttgctcgagagcgtggacgaggcgttcgattgctcgtccaatgcccgtgtctttggcattggattggcgattgtttcttccccctcctcctccccattggcattcagttgctgctgctgctcattgagctgtggtgccgcgctgtcgtcccccgcccgactttgcgcttcttccgcgttcctcctcctctctctctttctctgtcctcctcctctgttgcgcctcttttttgtgctctcaccgccctcagatcgcgctgtgtcgccatccaaaattgaatcctataattttcttttattttcttttattttttaattttttcttttaaccggcacaacatcctccactgcattggacctcccaattgtaacaaattcctctggggcgggcagcagggccccactctccagacattcaattcgggtctcaaattcgaccttttcttttgcaaaaaaagcgattaattcctttttgattctgaaattttattttttttggattttaaatttcaatttatcttacaatgtggtctgatgggtttatggctccccctttttttaattttttgatatattgagtctttggttttattttcctttttcaactcagcgagtgcatgtgaagaaccggccgcaacagcgatgcccgacaaagaaaaggaataaaaaacccccaaacgatcaccccatttcttataagtaattgtagccccaccaattttggatcgtatttaagcccc

SEQ ID NO: 14650 - DNA, 2021 bp, Heterodera glycines
agggtttcgaggcttaagcccaatttttaaaaattttaaaacaattgcgccagtaaagctggatttgttaaatcggcccctaaagttttcaaaaatatacctctaagaatgaaaaattttctcaaaaattaatctccaaaattaatctatttattttcttggtaataatttttgattttaaaataatttatctcaagtcacattgaaacaattgacaataaaaatatcgatatttgtgcagtttaggccacataaaaagtcaataaatatacatttttctcaaaccatacttcattttttttcttttaaatttttatcgaatggaatactgaatttctcagtttttctgcagcctttcctatcagacataaaggcatggattgtggctcatcaatacgtgtttgcacctttccaaccattggaatacctctcctatccgtggttgaaccgatctatgatgtaattggcacatacataaattatttttttcatttatctcatcgtaatttaaacttgctgaatcgtcataattttagatgatttttaataaaaatattgtaaatgtaataataaaatgaaagcaacatgctaaagaatgcaccttacacaaagaaaaaatataaatggtttgaatttatatagatatataaaccatctaaaaagcattatgatatagcgtatataccctctttatatgtattaaatgaaaaagaacaaaaaatttaataaatgtcccgaatgtcctattaaattttgttttgttctaagcccctgccatcaatgcgatactcatcgaatcactttttaatcatcagaagacaagtaaatcacatcatccgactcgtcgttcacagagctgccactactatcatgctgatatgaaaaacaatttgatgttgacggcatttttgtatttttctgattctgttgcccatgtcgttgacgcttcttaggacagttctttgcaaaatgccccgtagtgttgcaggacgagcagcttaaaaatgtaataaatagatcaataaagaagaaagatacaaactcacagatttttgtccaacaattgctcacgcggcaaagcaactttgtttcggcgagacggtttacgacgtggctccggacattgattcgttttgtgcgctatactcgcacaattccagcatttgtccggatcccgtgcgcttgcattctcacaaagtgctataaaatataaatgaatagttcctaattataagaagtaaatatttttctcttacggtaactatcgggatgacgatatgggcatgacaattgcgtgtggccgcccctgcccaatggccgttgcacgccacagcaaaaacaacgaattagttgctgcacatcatacttttgcaacaattcaatctcatccgctggtctcgcatttcgcggtaagcgccctagacttatagtacttgaactacgtccctgcctcaatgttggtttctttgcagtcgtgtgcacagatgatgaatgcgtatgcgtaagtaacggacaagcatctttcaaactgttaaaaaaataattaaaacatttaaaaaacacaaccgtttgatggccgctgccgacgattcaaaatgttcttcttgctgctgtttgaacacaacctcccatccttccatggtgtccaatacttaaattcttttttagataaaaaaatataattctatatcacttaccgttaatatagtccgtccaaaaattgtacttgtctccgcatgtgtatccgcatgggaccaacagcctgtcacaaagtaatccgcagcagctttccaacaatcaaataaattttgtattatttgaaaacgttcggtatccttcttcttttcctcaggaaattgactaaataaaatggttgctgctgattatagaaaaaattttaataacacttgaaaattataatttcatgcaaaaatcacttcatccgcttatccgggtgacaaagaagtgcataacgtctatatttacgaacaactgcactcgagccttctgtagtgatgttt

SEQ ID NO: 14651 - DNA, 1293 bp, Heterodera glycines
agcattttgtcagcacaaatgctatgtattttctttcctttggtcggacctttggcccatccaaacactcaaaatgccatccccggcagagcacttccaattccaagggtgggtcactcaccaattggcttttaaggcagaaaaagccaattaacggaatggggacgggcgaattgaaatgggattattttgggcaattttatcgggaaaggatttgggaacaaagtcagccaaaccaacgaaaacagaaaaaatggactccgtccgaaccaattcaaaagacattccgaggaaaggaaagaattttattttattttttattctctcattttcaaattccgaactctccgatttattagttcttcgattttgtgcacattttgtgatttttgccctttcatttcacacacggagcggaaagtcagcaccaattcactcagtgcccaccgaatggaattgttttgtgtgtctttttttgtgcaaaacagcgctgtcataaacgggggggaggggcggggattgtcgtcccgggattacgcccgcccaatgctccgagtgaccttgatcaccccccccccccccctctctttccctatttattcatccctttccgatctctttgacattttccctccttttgactgagatcacttttatgatttacacaccgccgtctcctgctcgaaggcatccggatgatcaaacagacgaccggcacaagatggacccttaaacactttcaaagggaaggcatcggccatgagaatgttgccgtggaatgcctgaaggaggaatagactgatttctggtcaagagccgaatggccaattgaatttgaaactgaggagaggtacaccaattggcggactgcctccactgtcgcacacttttcgtgtcatacggagacaaaccgcgaacataattaaggtcgaggcaattatatactaaaaagccttggccctgttacgaaagggtttcatattataaattactataattaagcaattgacacataagctcatcaatgacagatccacccttttatccattggataacattcacaatggacgcagtttgaatgaaaagaaagactatctaatgaaatggaaaaaaacaagcaaaggaaaacttaggaaaggaaagacagaatctaagagcactcaatcgatgatcggccggtcagtcgatcgatactgatcagacattgctcatgattagctgatcagtactcattggtcagatcggccgggttggtcaactccgatgccttctccggacttgcggtgactgcc

SEQ ID NO: 14652 - DNA, 1942 bp, Heterodera glycines
gatattagaatttatgaaagacagtagatgttacacagtcaatacataatgtaataagcaatcagctacaattctcaccggccacatatcatatgagaaaaattgagatcagaagtcttttcataccgcgtggcacttctgatctgcgactacaatgtttgtacaagcattgttacgagacgtatgatcgtcgggtgtgtatcaaccggtgcgtatagcggaaatcctaaagagtcaccgttcgttgttgagcatgcaacaatacgctgtatcggtgtcgaagcgaatggcaaacacccccccccccccccccgggggcaaagggagggaaaggcacggggaacattgacaaaacaaaatgccaacaatttgagaatgaggcaatgaccggcacgcacacgcaggtcgacgaacatttctaaaaaaatatctcgaaaatattatttgaattgtcagaatcccgtctattctcggcttacattggcactaatggaggacagcggatggtaccgggctaattacaggtcaattaaccgatggagtcttcttttggcccaacttattcatgtgattagcattgccgagcagctccactggggacacgggttgggctgttcgtttgccatggaaagttgcgggaaatggatttgggagaagttggaaaggtgggccaagaaaaggcatttgggggagggggagaaactggcacttttaagcaatcagtcgacggcaccgttttgtgccaatataaaacacgatggaagccgatcattggccaccacacgctgcacagatcagagggtagggaggaaaacagacagatgaaagtgccattgcgttgataatcaaccaaaacacagaaatataaaagagcaaattattacagaaaacaaaaactttacaggagaagcacaaaaaacatattttctccactcaattttcgaattttagcgaacttttagcaaataaaaaatattggagtttagcaaatagatatctttgcttgtgtccaaaaagtttgctaagaaaaaggcattaaaatataaaaaaatttctctcgaaaatttaaataatattttttataaaacaaatattataaatatattacatcataaaatactttataaaaatttaaaaaactcttttttgtggatattttgaagcacaatttaaacatttcgagaaaatggcctgttttgaacaattttttgaatttttctcgagtttatcacaaattttgagtcttttttggcacataaatcccatccctggccattagtcaattttaacacaccataaataagtgaatccccaggattcgttggcattgtgcaatttggtgccttataaaaagccgctgcccgttgactatcgcaactttgcacatttgcatggagttcgtcacgaaggcaccaaatattatggaggttctgtggaattggcagacttttgcccatacaatcaggtggatgtgtctccggagggcgggggaggaggggggacagtacggtcgggatgatgtgcagtgccacaaaggggtgaggacagtgccaccgagggggggggggggaatgccgcaggggcgggcactgccacaaagggaggaggtgataatgtcgttgtgggctgtgcctccgggggagggaggacagtgcagtcgggtcaattgcgattcgctcaatcaaaaggtgctgggacgttagtcaaaaaccatcaaatgaataatttttgacagaaaattattcataatttcgtctaaaatggatcaaattttataatattgatatttttcgatagccctaagtgttttctattatcctgcaaatttttaaaaaaattctttaagtttaaaaaaagttatgacctgagaagctcaaaaaaccaagtttttttgaacatttttagtcataactttcttgaaacttaacgaaatttttgaaat

SEQ ID NO: 14653 - DNA, 1418 bp, Heterodera glycines
  unsure (1)..(1418): unsure at all n locations
tttgagggttcattaatatttnttgacaaaatttcacattgaagcgcgttattttgttgctgactccgtgcacaataatcgccgcttcgtccccactcggcgccgcgccctgcgcccgtccgccggtgctgccgtccggtcccaaatcaccgcgttccaactgatggacgacggaaatgccgtagcttaaatggcgaattgcagcatttacttcgtttatgtgtcaggaaatttcataaagctatctcatcattctatctgataatcaaaaggtctctgatcacttttttggatttacaatcaatgtgccctctctgatcgatgatctgattatatgtctgacccattcttttgtgtttccctcttgatttgtgctgatacggtggcttgaggaccttacgaaattcggattatattcaggcagaaatatgcatatgaaaatttttatctgttggaaaaacccgtaaaccttataaagaattacatatacgaataagagtaaggattatgtttggctgggtacttatacggggtacggattagccggctaacccgtaaaatccgtagcccgtaaaaacccgtataagtcgaaaaaaataggggttgcaagttaagtgtccgtaagaacccatgtacgagtccggcccgtatttgatctctttattgattagtcaattttgtcttcatctgatctatttatcagttagtgttaatttttcaaatcacttttgtttaccgattgtgaatgaacacgcgaaagtcggcgctgaactcggcatttacagcgcataaaaatggggacagaagttggagcagtacgactttgacgtgcatctgctgaacagaacaacaaacaaaccaataataattgttggggaaagagaaattaattttgcatttatttacatacatccaatttggaagaagcggacggcttttcaatcggctgctgctggacgatgttcccccccaacaataaactttcagaaattgataaaaatttagtgaaatgcaatgcaataatattcaaaaggagaaaaaatttaaatccctttcaaattggatgacttttaaaaaattatttttcggtgaaattttattaaatataaagcctccttaaaaaggttaatttttgtttaattcctgaaactttttgagaacggtaaacaaatttgcaaaattacgaaaaataattaaagtcatgtaaatactaattaccccttaataaacagtcggtcgaaagaaagatatattttatttttttcatctatattaaaaatccctaattctattggaaaaatttgaaacctttaaaaatatttgttcctagattttttgataactttttgatcgaaaataattttttagggagctataaaagagttttttgaaatgaatggaattttcattcttttttt

SEQ ID NO: 14654 - DNA, 2584 bp, Heterodera glycines
gacgtgcatctggtgagcagaacaacaaacataacaataataattgttggggaaagagatattaattttgcttttatttacatacatccaattttgaagaaacggacggcttttcaatcggctgctgctggacgatgttacccccccccttccccccccccccccgactttctcccatctttttcacacaattatcccaccccccgtgtgtgtttcggattgatgggaggcactgaaaaccggcttaattccgctaatcccgccttgtccgcgcacatcctcagccaaccatttctcggacaaaaattgtaataaaaacgaatttaaatggaaaaataaataaataaatacaaaaagcaaattaaatggacagttagggacaaatactgaacagcggaagacattttcaatttaatggtacaaattttttcattcgcacaatgccgtaaatggtcgatcatttatttgtattttgactttcggcaaggctaacgaagagacaaatgaaatgaaagcagccaattgccagcagatcacattgaatattgacagacactctttattttattcatttcaatccgataaattattcttttttttcttcttttttttgttttttatttttcctgaatttcacttcccctccctttccctttgctttcccccgcgtgcttttggctcatttctcgcgatcgttccacttcccacacataataaaagaacaataaaatgcgaaagaatgagcaacaaattgggaaaccaaattgttttattgagaataatgaatgaaagacggacgaatggccaaatgattggaggaagagaaaaaagaaagaaatgaacgaaacggataaagaggagggaaaagcacaaagggggggggggcgagaaggaaaaacagagagaaaagaaagggcaaaaggaagagagaaggaggaaaaaggaaaagaagaagaggaggatgaagagagcggaggtgtggtggtctgcccactcacaactcaccgatcagtcattgtcacttgtgacatttgcgtaggccgcgcaaaaatgatcaaggggaaagtgacggagtgtggccaagtgggaggtgcagacgaacagcgaattggaaaatgggcgagaaagcaagacaatgtcagagggcagcagacacaacgaggaaacaatgcaatgccggaggcaaaaaaggtgatcagaaaatgatgggacaatggaggttcccgaggggagggcgcaaaagacaaaaactaatcgggccaaagagtgaggaggggcgagaggggaggggccaatggagggggacgaaagaggggtccaaagggagggggaatagaaaaaagggagagagagaggaaacagaggaggaaagtgccaaggggggagagaaaggggaaaggtgcggagggggacagaagaaaaggggaggagagatagggccaagaggggaaaagggaggggacagacgacgaccgaccgaatgtcaaatcattcagttgcgcacgagttttgtgcagcaccgcccaaaaccaagcagaagggacgggacacatcaatcagtggcagaaaaagagcaaaattagtggaaaaggggaaaaggtcggaccgttcgtcggctcattttgtgcatttgcaattacaacggccgccggggaatggccggacattttgctgatgatgggcaatgggttaattaaaggcgtccctccccctatccgccgcgattgtttcgactaaacgaaatttatagaaaaaaaatatgaacagatgggattttttggattcaaattttaatcttcgatttccgattattacccaattcaaaaagcattgattgttcagtaattgagacgataatttgtgagtcccttctaatgattccttagctccgatcagtgccaaatgatcggtcattaattaacttcttcaattttcagtccaattctttctctttgtctcgtccaatcatctttgccaatgtttgtccgttgtttcattttgcctttcatttctttggcattttttgtgtccttttgcacggcaatgagaagaaatccatcgggtaaattgccattttaaaatgaatgtatttggagttaattaagattatgatcagtcacgggtgccgcccaatctgaggataatttcatggtcaatttattttctattaattgtatttaaataattaagattcattaaaatattttcgcattgaatatttttaataattgttttcttccaaaataatttatttaaatatctaagttttttaaagaaatctttaagtaattctgcacataaataaaattaattatatttatttaaaaattatttaagtttaaaatattcagaaaaaatgcaaaattaaatatttttgtgaaaattgctgtataattcttttgtggggttgaattctgtccgattattaattttaaggcttctcggcgtttggcgttcagagcatgacggcaaagcggtgaaaaattcacgctaattaattttatttttttgatatttttttaagatgtttcccaccatcccaaaattcacttacggcgaagaaatttcaattgcactttcggac

SEQ ID NO: 14655 - DNA, 1251 bp, Heterodera glycines
ggaaccgctcagttgggccgtcacgtttggaccggcacggttgggccccagcatgcttttccacccactatagcttttttctttgttatccaaatccaacaatcttggtatcattcgaaagctcttaacatgcttattagccttactaaaaaacaaaaaaagttttaagcctggaaaaaatttattaagaaaaaatttaaaaatttcgactttttgcaattttcataatataactttttttggtaattgtctaatcgctaagcaatagcttagaaaaaactttaaaacatgttaagctttcgaatgataccaagtttattggatttgatgacaaagaaaaagctcaccaatccctcacgtacattcgttccaaaaaatctttctgaattttttttcaatttttcggggatttattgaccacggatttcaactcttccccctacgatttctcgggagagatttctcgatctctcgtttcttcagtttgtatcgtatattgatcccaaaaaaaaactaataaatttatttgtaaattttatgcgatttggtggccacggatttcacctcatcctcccatcacctgtgggtctcagttctcgtggttcaattctaggcctaaattccaatactattattgttcgaatttttgttagtgatagtcaaatgagcattccctacccacttctaacgcctataaaaagcccaccaatttgtcgtatatcatccaaaaataataaatataatttgtaaattttacgaggatttgatggccacggatttcatctcatcttcccatcacccatttgtcggtctcagttctcgaggttcaaatataggcctaagttctcgggaactttctcattagtctcagttttcgaatctatagtagatttactattgtaaattctcggctaaaaattttcgaagaagcagctaattttgaaattcttctggtggcgtctatcagcacccaccatcgttaaatgcttcctctaaaaatcttggaaatagcgtgctataaaaaactgctgcaatgagtagaaaaaattcacgccgagccaaaagataaaaaaaaacatgaaactttttgttaattttcctaaaaatcttggggtgatctgggaattgaacccaggacctctcgcacccaaagcgagaatcataccactagaccaatcaccctaatgcttttcctcacgagaataagcaatttgtgatcaaaagggcgcacatttacagcaaataatggaa

SEQ ID NO: 14656 - DNA, 2529 bp, Heterodera glycines
  unsure (1)..(2529): unsure at all n locations
aaatntaatcacaattatcagcagcaatttatcggcatcaaaaataacatttgataatttgatgatgaatgctttacaaattctctgtgttttactaattcattttaataaattttagctcattcaacagatggaaactgccgtagggggcttaaaataaaaattcaaatttaaaacattaatttaattctgtatacaattttgttatgttcatgcttcttttggcttgtcctcttgcaatgattgaacatattcttccaattcagtttctttttcatccaacgactttcctttttgacggagtatttgctttatgtgatttttcacctaaataatttatataatttaatttatgaggtaaataatttaaaattaaatgtataaagggtaataacttataatgtgagaatttaaatttttatcaactcgtaaaccagttcggcccggcaattcaaaatcccggtttgactggctttgaagatgtcgggaccgggaatcggtttcttttggaattaacacccctgcccgactaggcggatttgcaaaattgtgttttgtctctatttataactaattttctgatggaaaaacgaacatatggcggattttatattacagagttagcttaaagcattaattaacacaaataaatgaaaacaatcactcacattcattggaagcagggatgtgcgaaaatcacaaaaaaaaattttcgtatacgaaaacgaaacgaaaaagggcattcgacacgaaaacgaaacacgaaacgaaaaaagaaattttgaaaaccgaaaacgaaacacgaaacgaaaaaattttgacggacgaaaacgaaacacgaaaacgaaaaaataaccattttcgtacgaaacgaaacgaaaaaaccgaaaattttaaaatatattcaattttaattaagaactttaaaattgtatcctctaactgagggaattaagacctagtaggtggaaaagcggatgtggctctaggacaggggtatgaccgaaaaattttcaaaataagaacatcaaggacaaaaaattattgaaaaattttacgaaattggaaaaaaatgttttttgtgataaaaactcaaaatttttacgattttgaatagcatttcgttcaattttttatgaaattctatttaatttccaattcgtaaatttcatttgaaatgaatttcgttttaaatttcttaacttttttacgatggatttgtaaatttttcaaaattatagatacctaatttttgtgaaaaatcgttagcaaaattatataatcggttaaaaagcgcaaatttgttcgataaatctgttaacaatttgcaatcaaattaaaaaaaatttcccgccggcgcctatcggcaccgccggactccaaaaactcttgtttaatgttcgtaataaaatttagaacgaatctatattagtattttagtaaaaaaaaatatggtttttattgattaaaaaacttttcaaaaaaccctgatccgtatacgggtccgtatttttcctgcatacggacttatacggagtaagggttttccgggtttttagtccgtaagtctgtagtccgtatggatgcctagtccgtagtcctgatcctgatccgtattttcgccaaatgtcgctctctaaaaaaaatatcaacgtttcaaactttacatacaatttcctggcagatttaatataatacttcaagaaatatcttattttttcttaccaaaaaagtcattcttaagggtgtaaatattttcgtctttttcgtccaattttgctctgacgaaaacgaaacacgaaacgaaaatccaaaatttaaaaaccgaaaacgaaacacgaaacgaaaaaactttggtagacgaaaacgaaacacgaaaacgaaactcaaaaagtgccgaaaatgtaggacgaaacgaaaacgaaacgaaatttcgtccatccctggttcaaaacagcgaacagtaaagtaattaatgaactgcgaaaaaactaatttagctggagaaattatgaaatcttcaattacagcttttgtccttttttaaaaaaagcatacttgtaaaaacctataaagcacatatttcttatcagagctcgtaagtttttatcaaaataacgaaaagaattcgacccaaacattttgattccaaaaaaaaatcattaaaaaattacttttaaacattatatcgataaaataggtaaaaaggtttgcattgttatgtaaataaattacaaacaatttttcaggaaaacagtaaatttttcttaaaatgaagggtttttgttaattaaaataaaaacagtaaatgcaatttaggcgagagaattcattcgcttttcaattccattgcaattttagcagaagagatgggaaggatcgaatttgaaattcgggccaaagtttgcctccaccaaatcgccagcacagaacagggaaacgcacgggaacaaaagaacgccggaggcggggtaacggaagtgaatgcccaaggcggaggagcatggcaaatcaattaaatttaattaa

SEQ ID NO: 14657 - DNA, 697 bp, Heterodera glycines
ggtcttgtcttggcatttttcttaattagccttaccttatgacttgtgcgcacttttcattaaatgccatttgttaaccgtttttccaaacaaacattacaattgtttttagcgctattcaaaatgtaatgccaaattttagttgaaataatttctaataaaaattaattaactttcattttttatttgaaaatatttatttcattaaaaagttaagaagaaaaatcattttgacttttctaggagaaaaaattctcttacattttgtgacttttgtgaaatcccggcatttccaatcacatcccatcgacaacaaattttttctgaaattttgctcccgaaccccgacatttctgtccccgaaatgttcgggggtggggggcggcaactctattttatattgttttaaaatgtgtacttagtgatgctcgagaccgaaagcttgaaaaccctaggcccgagacagagattagccgggcccgaaaatccgagactcgagactgaactcgagactagaccgcaaaaacttcaggctttttttgagtctaaactcgaaactgagacagactcccgagcatttctggcgtagagctttcaaattaagtgcccaccaagttaccactaatctaatttcgatgatggcaacgcccggcggggcactaccccctcccccccacaccccctcgggggggggggg

SEQ ID NO: 14658 - DNA, 2142 bp, Heterodera glycines
  unsure (1)..(2142): unsure at all n locations
ctttntggagccggacttgattttctatgcttgacaccctttatttaaatttttgtactttcggcacagtgaacacactttaatatctttcgattttgggtttaattttttttgaacagtggattaatttttcatatttttggcacctactggatttgtatttatacttttggcattatgtatgtcaatttttggcatcttttgcatcgtagtgaattcaaattattttttgcttttggtattttgttcgttagctttttttttcccctcgcccgcgtgccgattactgtgtggttgccctttacaaaagcttgtttttcaatttcccatgccgagatttgcttgcgcaataagccggtgtgccattcattagtggcagtcgcctcgggggatgccattaaacaataaacgaaacttaaaaatttttgtttttgcaaaatgaatgcctccccctcctccgcccaattctgcacaggccataaaacccatgcctgcccaacccaccaccccttgggggaggcattaaaattgtttttgttggaattggcaccacagtgccgtgccacacacaaaagcgccctaaagctgcttttgctttgcagctgctgctgctgatgatgttgatgttgatgggggatggatggctcattacacttactcatgttgatgccctcccccataccaatgctttatccccctaatttctctcctcccaagcaggcggccgcacccttagggacaaatgatggcatttttctgcccatcccccccccccctataccaatgttttatctccctaatttcccccatatcccaaagaaagcaggcgtagcacccttgggggcaaatgatggcattttgccaacatttgaataatgtgccaacatcgatcaattattggtttttatttgaaaatagcggcgctttttccattgcactcttaacattttcattctttggcactcgtccgtctgttttggcatattccccccccaaaaaaaaacataattgatttgatggatggcacactttcaatcaatgaatgtctgactgatcgagacaaaaaaattgcaatcctcctaaagccattttctggacagttcagccctaactagggcgaaaaaattgcaaaatttactgtacttcgggctaatgacactgatacaaaatttgcgaaaaaatacaaaaaattttcccgttaaattcatcccaggaaaaactcatgtccccaagtacatacatacaaaagtaatgtgccaacacaccagtacgagtccccaggtccaaggtcctggcctaaaatcttggtcctatgctttatcttgggtaggatataaaagatcttgggactgggtcttcaagatcttggtcagtctcaaaaattgcttatatgcactattttcacccatttccttgaaaagccaacagttcttcatgtttttagaactaactcaataatttcccggtcaaatccatcgccggacgattcagtccccaatctcaattatttttcctaatttattcaaaagccaacaatttattcatgtttttagaattaactcattaatttcccgtcaaatccatcgccggacgattcagtccccaacgaacacttggcacacacaaaaatttgtgtatgtgcccagataatatgcactttagcccacacccataaacaattttgcacacagaattatagtgcccttccctctccctcccatgcgctttttcatcatcgcgatttattatgcaccttcgccccctccccattcctctgcatcataagcatgtttttgtattcgtgctttttctttttatttctgctgtttttatttctctctctgtgtgtgtgccctctgggcgcggctatgctatgacagcgacggcaccaccgcgccgcggggcacaataaccgttgtacgacgtcctccccggcttttttgtccttccgccccattcgtttgcctcccccccccccgcttcgcttaatttcctgccctcccccccccccctcctcccagacatttgtcgtcgttgttgtttgtttttttctgtctgtgctttgtgtgccgccggccgatgccatccccgccgggaccaccgttttccccctttgtgtgtgtgtgccgtgccgcacattct

SEQ ID NO: 14659 - DNA, 783 bp, Heterodera glycines
cccccccccctcccatcggtgtgccaaagggcggattaagcggggtggtcggttcagtacggcaccagtgagtccccccccccccccaacccgtcggttcttcgtattaagacaacagaatgatgcttacttaattggagggagtgaccaaattgtgcgtcataatgcaattaaggagcatgaatgaattggcaccacaattgagtcccgaattttgttgtatttattgtttgtgtattcgtctggcacaattgtgtaccgaattctctatttaatggttttattattttgtatcagtctggcttgcgccattacttgactaattatgtaattgttgggtattaatgaggtcgtctgacaccattaagtgtcttctgaattcagcttgaatgcctgacttctgcaattagatacatatgtattaggattggactttgaattttctggtgctggcatcattaattcttaataggtaattatcgggtgcgttaatgaatctggaattgagactcgagtctaaaatactctgattaaggggatctgataatgaacaaatgtggcctaaaacattgatttccatcattaatgctaattgatttgagcccgagacctttagagttcgattttgaattttggcacattgcttatttacccgtaaaaggcatttttactcatttaacacagagagacggacaaatgagtcccatgacgttaggctctgtctgactcatgaataggcctgatctttaaaggtgctaaaaactgccaaaataggtaggtttt

SEQ ID NO: 14660 - DNA, 3668 bp, Heterodera glycines
agaaattctttccacagaagcgtccgccgttttggcattttcctatttcggctttacgacgtgtgggaatgggtccccggggtcaaactttggaaagggccactcaaacggaacagtcgacgggaattgtaatcaactgaaaaaggcaatttgtcaaatcattgccgcaggaagttttttttggcgagtgaaaagcagtgagaataatgaactgcaaattcataaaatgaatctaattaattaattttattaggacatttttaaaaagaaatggaatttcgcttttgtactttcccataaatccaatcgctctaatggcatttgccccccccccactctctcccattttccccaattttccaatttccatcaaatgaatcccccccccccaacaatggccacaaggtgaggagaaaggcatagggccaaacataaagcgtcgattatggcggcacaaagaaacggcgaataaaacaaatgatttctttcgagtgttattttgtttggtttatttattccagcatttcatttccactccctttctttatggctgtgctaataacaacgttaataatattgataataatatggtaatccaattccttccccatttcacccctttgaccccttagggaatgccatcgtccgccaatttcgccgtcgccgttaaatgcccttgcgcttctgcgccttttcatttgcgtcttcttccaattatctttttcttttcttcataatcactttcccccctttattctttatcatatcacttcttaatttcttcttcgatgttcttcacactttcgctgcttttcctcttccgctgcttttgaggcgcaattcgattggatttgccctcaaaagtgccgaaatgagtgccgtcgaatttgaatatgccaatgacgacgatgacgacaggcagcagcagcggggggaatgtgagattgggtcgttggagatgccacgctccgaatggcttttctcctccgtcgcgacctttcagcagagttacggccaagtgcacccctatttggccgctgttttatgtattgtcggtgagtaaactgagtaaataaggagcaaatgaaaggcaattaggagagacattaaggacaattaataatttttacggcttttttcgtttggctgaaaatagcagcactcatttgggctgatttgtgctgctgttggcatttcgttttgagttccctttgtcttttccgattacagaaactaattaattgtcccttgggtaattattaattgcccattggccaacttttaatggccctttgctaattgcccccccccccctccaaggcactttgatgaatgctatcactgttttggtgctcactcgcccctcaatgcgttcccccgtcaatgttttgctcagtgcggtcgccgtctgcgacatcgtcgttatgtcctcctatttggtttttgttgttcactttttgttgaccgccgcttcgcgctgcgagcccagcgacttcagttacggatgggcactgttcatggcaagtgaaaaagggcagaaaaagggaaaaaggaaatgaaaatttaaattaaatggagatataaaataaataaataataaaattcaacagaattcctaataaattgttcagattttccatgcccatgcttctgtcatttttcatgccgcttcaatttggatgacggtgagaaatgagaatcgaaatgccccccctttttcccccgaaaatgctaattactattagctaatgcacaaatgcttttccgctgaagtgcttggcatccaaattcactttcactttgcaatttgtcaaggtttccctagcccaaattcgcgtgctgaccattcgccgtgccaccgccggcccttcctctccgctggtcacagaacgttttacggtgctattagctgtgctgatgctttgtgccatgaccctcgtcaatttgccaaattttctaaccttcgaagtttgttgcctctgcccgatcaataaaaactcaatcattcgataatcgacgatcgattgccggatcaattaataaaacgatctttacagataatggaagtgccctccagctcaatgttgccctgcttacattcgcccgactccaccgaattagaaaatgacggctctttgcaaaatgtggcaaaagtcatcggcacagacttttcacaaaatgacaccgcagtgaaaaatgaatcaaatgctattttaaacggaaaaatgctcaatgacagcgaactgaacatatccaatcactcttctgataacttaacatttacaacaataacgactgcacaccggatgagaaggcacagagagacgaatatcagcatgtggggaaagaagcagaaagaaaggaatgataaggaaggatatcaaaacagagaagagagagagagagagagaatgggagaaagagaaagtagagagagagagaggaatagaaatagagtgagagggagggagagagagagaaaaggggggagaaagagagatcggaaaagaaagaagagatacagatgagtcataccgtatgacaaatggtcgatgcgatcactgatcagattaggatctgctgatgggatggggttgaaaaacaaaggcttccccatttaaaggcattcccgtggaaattcggagccctttggcaccaaagacagtttcgcctacaccgtccgagcacatgacagcgattgcatgaaattgaaagtaatttgaaaagtgccggggaatatgccaatccatttcttccgattttcccatgcctttgcctcttcagttggccttttggtctaacggaatgatcttcaaagtgatcccgtgccttttgctgactttgtccatttgggctttgctgcgcataattgcggacgtggcacacaaaaggcgcaatttggcacaggttaattaaggtagaggagggacacgtgccaatgccaatgccaacgatatttgaggtgatgcgcaagaaagtggtgccaaaggaccacacgacgccaatggtgagggaggaaacgcaatttaaattcaaattgaattcaaaatatttcgggcaaaggctccaatttgattctcttttagctcgccgctgttctgctcatttttctgctggctgagcttccccaaggccttttcctggtgctcaatggcattttctccgccgaatccttccacaaacgcgtttatttgccgttgggcgatctgatggatttgctttctctgctcaattcggccgtcggctttttcatttacgtgggaatgtcccgtaaattccgcaccgttttcctgcaattgctcttctccgtcctcagctttctcacgaggtgatcaattgttctgatcagtccataaaatttcgaccattccccttgtgccatccctttttttcaatttgtcattttttgccattatttttttcttttgtttttcgattggcttccgccgatcgttttttggcctttttgccgttttgtgtttgatcagtagggctcggatttttaggggcgaaaaagtccaaaatagggacctaaataggggcaaaaaaatcgcgaaataggtgcgaaaataggggcgaaaaagtttcaaatgtaggggtgaaatttattaaaattgctgttttctctatctaaataagttaaaattaaggcaaacaattttatcact

SEQ ID NO: 14661 - DNA, 1072 bp, Heterodera glycines
atttacaataataatttgtttttaatcatttaagcatttttgaaaacttgaaaaaaacattgtcacttgaaataataaattctaaaattttgtccaggaaatccagtttttttcttgttttgcccggacctggatttttttttctcatttgacctggatttcctggacaaaaaatccaggaaaatccaggtgcaggaaaaatctaggttgcagaaaatggcctggacctggatccaggaaaaatccaggcctggagcccggtccaggtcgagctctaattatttgaattaaaaaaataataatttattagatatcgaatggcaaatttccatcggattttgttgttcattttgctgctcagcggttgtccattttggccaatccatcagcagcacaacaaatgtacgtccaccacactgattgtatgggcagcagtgattgtggccagtgaaattgatgctggtgtccatgcgctgttgtggcgcgaggcagacgatgccaacaacagaaacttgagcggtgaaaaaagatttttttttaatttaaagctaataaatttcattttttaataatatccagaaatttgaagttattttggaaaaagcaaaaagcaaaaataaaaaattttaaattatttaattccgatgaaatttcgtaattatggtacatgctgtccttaaattagttctgtattaaaaaataaaacattttaatacaaatatcaaatcaggcaattattttgcaatgaccgatttaaaaaagctatattttatttttcaatttttattaataagttttattaaaaattaattttattccttgattcaaaaaaaagttatttttattgctttgattaaattttttatgaaaaagtttttttattattaaatttttgtttctaagaccgtgccgtgagtgctacaattctgcaaaatcttaatatctataacagcggcgacgatgatgccatgggagattatgatgaggagccggtccattacagattggaacgacatttaatgtcccgctacaataataggcaaaaaaaatattttaatttttaaatatattc

SEQ ID NO: 14662 - DNA, 1728 bp, Heterodera glycines
  unsure (1)..(1728): unsure at all n locations
gaaattttatttaatcaaagagcaaaaaaatatattcgaaaattcactcatttgaagcaatggtttgctgtgacacacaaaaccgaaaaatatcaaaaatttttaaaaaataatagaaaaagataanaattanaatttatagattaatccctcgtcgctcaacgnccaggttcaaattttgatttcatttttttttaaagcaaatttttttagaccaatccaagtccttttcaccattggcctttatcaaatcattgaagtgaacgagccgcaacaatacattcttctcaattcgtggattgttgaagtaaaacatatattagtttaaaaattttctaataattataattacttaaaaagcatttaaaataattaagattaattttaacgcatattttggaatagaaactaatgaataaatatcttacactttaagcgatgaataagtttaattatttaattaatttttaaagaattaaaaaataattttaaattatatttcaaataaaacttaattattatattttatttgtaatcacattaagtgataaatgaatttatttacttaattgaatttaaagcacttaaatagtataaaattaatttacacatttcgaatatataatttattaattatttgttaatatgtaagcgataatatattatatttacataaaaattataaaaacataaaaaatcaatgattttttcgaataaaatttaattaataatttataaattaataacttatttaaattttaaaccattaaaaatatttaaaattaattagttttttgaataaaatttatttaataattttatttattaatttaacacattaagcgatggcgcgatgatttgctgcactgggcgcccgctcaatttggtggattgcgtgaaattgtgctcccacgtgattcagtgattgatttttttaaaattttacttctattaaatgtatatttttaaataataaaacataattataggtgtggattccggacacaacattatacaattcattggtcatggatgatgagcaaagccgtcgaattttaaatgtcaaagtacggtaaaagaaaattataattggaaataatatttaattttattaaaaattatcaaattgattaattttatttataatttattaataagcttttcagttgaatacactacaaaaggagaaatcggctttagtagagtgagtttaactgacagaaatgtttaaattttcaatgtttttagaatgctttatccgacattatatcaattttcttgcatgttagaccttcggtttttcccgtacgacattcaggtaaattattgtctcaacttgtgaagccaaactttaaaatgattcatttaaaaatgaaattcattattttggtctaatgtattgcgaaattttcgtttgtgattagcagcaggctttcgccaaaatcttaccacaaaaatgtgttaaatttaaaactaaattttccaccgcacaagcattgtgtgatgatgttcggcagttggtcccatgacaacacgaacattgactactttgcctacgatgacatttccgactcggtgatgccgcccgcactggacgcggacggcaaaccgttgcacgacacaaccgcttccggtggcattagcataaagcattgtatcccgaacgaaggctggaacattctttccatagagggtctaattttgacatctgtttctaaggctaatgat

SEQ ID NO: 14663 - DNA, 2600 bp, Heterodera glycines
tttccagaaggctataaaatgcaataaacaattcgccttcttggatagaaaagaaatgggctaaaaatatttcatcacttagtcgtgaaccattacaagatttctatagcagggccatattggcaaaagaagcacacgtagagcaggctcgaaataagggcaaatgccgaaaattttaaaaattcttgttttattagacccactctgctttgactggccatatctcgccagggagtggcggtagaccctttgttgatacatttgaaagggtagagcgcgcctagctcattcgaatagcatcaaattggttgcatttgtcccgaaacaacccgcttatgacacgtctaaagaaaatccgttaaaatttgcattcacaaactccattttttcattggcaaacgtgtaaagcaaacccgaaattgataggaaatatatattgctcataataaaagtacaatttttatttgtcccacgccattttctgggaaaactttttcgcgaaaagccgaaaaattttccatcggcctcttccaacggcaacagatgcgtttcaaacaattgacaatataattatgattgaagtcaaaaagcctctttagaaaatgcttaaaaaatttttgttataaatgttcacaaaatattttttttgttactgacaattcatttccattcaatttaaaagcgataaataatgtattgagatatgaacaaacatctagaaaaattatctcaacaatctgtcagaaacagtccaggaaaaactttgcgcgagaagccgaaaaattttacaactgcatcactgttcatttgatagggtcaatcaattcaaaaacataacttaatataaaatattgataaaaaaattattttccttcatctttagaaattgcccaaaaattgttgttgtaaatatactcaaatattcctaaaacaagctttatttttactgactatctttttccagaaggctataaaatgcaataaacaattcgcatgcttggatagaaaagaaatgggctaaaaatatttcatcacttagtcgtgaaccattacaagatttctatagcagggccatattggcaaaagaagcacacgtagagcaggctcgaaataagggcaaatgccgaaaattttaaaaattcttgttttattagccccactctgctttgactggccatatctcgccagggagtggcggtagaccctttgttgatacatttgaaagggtagagcgcgcctagctcattcgaatagcatcaaattggtttgcatttgtcccgaaacaacccgcttatgacacgtctaaagaaaatccgttaaaatttgcattcacaaactccattttttcattggcaaacgtgtaaagcaaacccgaaattgataggaaatatatattgctcataataaaagtacaatttttatttgtcccacgccattttctgggaaaacttttccgcgaaaagccgaaaaatttccatcggcctcttccaacggcaacagatgcgtttcaaacaattgacaatataattatgattgaagtcaaaaagcctctatagaaaatgatcaataataagttgttataaatgttcacgaagtacctttcttgttattgacaacacatctccattcaatttacaacagatacataatgtattgggatatgagcgaacatttagaagaattatctctacactctgtcagtcacagtccaggaagcaaagacaacgagaagctagaacactgacaccacggactcgcccttccgccaggtgccgtccccccgtcctttatggccatttgtgccatgaaattcccaattgttggcccatttttcgttgttttttggtttcccattaaattcgtttgtttttctcttttaggaatcttactttttctgggccttcggtgtccatgaaccgggtctgttcaatcttttgttgttgtttttcgactcattcgatttccacagattgttttgccgcggttgacgttgaaagtggcaaatcggccattttcccgcccaaaatgagtccggacagtgcaatttgggacggaaagtccgttttttcggaatttcaattttactttttccttaattttatttttgcagaattcagcccgaaaaatggttcctggacaaatacaaagtcagtgcaaaacatttgagaagcctttattgtgaagtggcctctcttttttctcaggttgacaacgtgaactttcaaacgaatggcgccgaaattggccaatttttgcacaaacttttcaacgccaaaaaattattgcttttggtcggtctttaaaaaaattcttataataataattaagtatactgcttcagaaggcagaaaatacggacagtggaaatgttttggagcccgcaaagttcccgggaatggacaggttcgtccggaaatttattttgtagaaaatcggacaattcacactttttatttaatttattttccctgtgctcaatttttttttgtttatgtctttaaaaagcttaaattgactttttgtttcttagtttcctttttctatttttttggcattttccgacattaaataactccaaaattcgagaaaattccactatg

SEQ ID NO: 14664 - DNA, 2616 bp, Heterodera glycines
  unsure (1)..(2616): unsure at all n locations
tgcactaacttgatcagatcacttatttatggtgatctttggacaccgaaaaaataaaacgaaaatcggtaaaatttcactaaaattaacggcctataaattacaattttttaatgtactgtatgcccttgactgcgtatgcaattttaataaggtcaggacgaaagttggacgacttacgtttcctatcggagtcaattgacgacccatcgatgaacgccgtcttaaaacactcataaaattattaattaactaaataaatattcatactgtacctccgccaccatttcgacatctttgcaacaattcggcgtttccgaagcggtcaaatgcaattgacttttgtcctcctcgtcgttctccgaatttgcgttgctcagccgttggtgctgccgcgcattttccaattttagctaaaaaaatgccaaaaaattacaaatcaaaataatgaataataatttaaataattaaaaagcaaatgccaataaaaattctcaaattgtacaaaaccttcactttgaactttgcgcccaacatgttgttactgtggctgttactgtagttgttgttgttgctggtggaaccattgggctgagagtggcggttcagcggagactgaaacggcggaggggaaaaagcaacgcgtgggaaagaccgaccattttattgtagacatttttttttgatttttttacttttctatttaaataacattttttaaccgatgaaaggagagaaaacgcaaaaaaaaaattggtccatttttctgttctttttattaatgctttattgtacaaaaataaaaaatgggctaatgcttaattaagagggttaaactgttccgggtatccgacgggtccattcccggacacacggctttttcaagacctggactcttctttttttaaatctaatattcggtacccgaatcggaagatccgggcccaaaaaacgcactaagcaaatgccggtcaatttgtcgtgccaaatgtgccccaccggtagggattaaatggaatttcaattttcaaattttgggcctctgaattctttgcccatcacccacgtgttgttgtgcaattagcattttgctggccttcggtggcactgtctccaccaccgttctgttcaccgttcttctgtccctttcgcgccgaaagcgctttttggccgctcgcataattttgtagtaaatgagcataatggcaaacaacggaatgtaaaaggcggtcgaagtggagaaaaccttagcaagggaacaatttgaagggtcattagcaaattaattaattaactaattaatgaataattacttggtaggcaatgtcctgcgaaatcaaacacacttgctgctcccgaactcgtgtcacaaaattctctgttttttttattatcaatttaaaagttatttaattaattatatttatataaaattaattaattaaaattttaatttaatttaattatatttccattagttttccccactcaccatcctttaagccgaattgaggtgccaaggaaatgagcagtgaaagtacccaaatgaccattagcattgaaaaaatgcgtcgcggcgttcgattctttaaaaaatgtaaataaattatgttcgagacttggccttgcgatgaattaagttttccatttctttgattaaccctatgcaatccgttgttttgaaaaaataaatattttaaattaaaaaaacccctcggtggggtttaattttgctttaatttttaaaataccgtattaataaataaataatttaattgtacatttgagtaggatatgttggtgacggaccaatatctaaaaaaacacatttattatttattaaaaagggtaaagactaaaattaaaaatttaataataaaggaaaggcaggaattttttgaataaaaatgtgacagaaaacgggacgaaatgttcggcaaaatgccaaactaattgggaaaaaaaagtggcatcccccggcacctgtcaagtgcaatggccaccaaatggagaatggacgaagtacagacgagcactgaaagaatacggtagaagaacaaatacgaaaggggaaggattaccgtcgacacttatccaaaagtcacacaaagtgaccttaaagggggtttagaaataaatgaatgaataattccgcaagactctcgagcatggcactaattaatcggataattaattaattggcttacccccaactcccacgattgtctcaatgtgctcagagcacccagcggagtgacgatcagaccaacctgacaacaaagtgtgctttttaatgatgtaatttaatgaatgtaagtgccctttcaaattaccattaaatcggccactgctaatgagaagaccaaataatattgagggcggcagcgcaaatcgcgctcaattaggatggcagtgatcacaaatctgagatgttttagagcgaatattaccaaattaactaatgcaattgccaagaagcatggcatggcattaatggacgagaaatggccaaaaaaggggaaaagcaattttgagtattacaattaaaaaaatattagaataaatttgaattttcaaaangaaattcccanaaaatgcaagtgaaacaacacgcac

SEQ ID NO: 14665 - DNA, 1032 bp, Heterodera glycines
ggtaccggttaaaaaatttttcgtatcggaaaaaatgcgagagagacaaaataaattgaaataattgaaaaaaataattaaatttatttctcaaatttctcgctatttaataaaaaaattttgtccacctcgagcacaaaaagcactcccccaacgccgccttcgtcgcccgtccgctcggctccgccaccgccccctctgcctggtggggtgtccgtcgtgccgtttattccgctgccaatgacaccgccgtcccaatcgacggacataataataacaaagagaataacaatacaaaaagcagtgccaataatttgtgccgctgatgctgcgcttcttcttcttccgctgcttttgccgctctcatctccgcgtgccgttgccgccgcttcgcttcggtttggccattctctgtgcttttgctgctcaatcgattcgatgcgctttttcacctaaggctgcggaagatgggtcacgcacagacagaaaaatgacagagagaaaagcggatgatgttgcactttgccagactaattcccgttgaagtgctgtgccaaagcacaccacgacgactaaattggcatggatgggtgtgggagagggcactgggggaaaggggaggggagggaacggaggggggggattaatgccacatttcaaaggcataagcgcatgagtaagtgcattggcactcatcagtagcagcgcaagaataaaagaaaatgaaaaatgccaattggcagcggggaaagttgagaagctcgagagtttcggtcggtctcgagtctcgcggaaaagggtcagtctcgaaagcatcacttaagggtaatgcgcattttattcacagagagagcaaattgagactgacaggaaaaggtgaaagatcgaacttaaaaggcgaaattggcaattgaatgagaagaagcgcaaaaagggaaagcaggaagaatttgtgcatggaaatggaacgaagttcagacaaaagaacgaaaaagagaagcaatttggcacaataaaaaaggaaagattttt

SEQ ID NO: 14666 - DNA, 2973 bp, Heterodera glycines
  unsure (1)..(2973): unsure at all n locations
tgttcattcccaaaagtcaaaattattagctgcgaggcgatactgtattgatctaagatggcttataatctgttcgttaaattgctgctttgtttgaatcgcctgcggcttcttttgaccaaatttgttttatggttaataaattaaataattattaacttttttaaatttttttttgttaggtgttgatgggttgccaaaacgaattcagaaagaagaaaagcaacttgcactgttgcttttgtatgcatcacacaactttggcaaattgaaattgtttaaatgcgattactactgacttatagcgtagaatattttgatattaatcacttatatataagtatttggatatattttattttttaaacttatttggatatttttattttttaaagtcatttatttgtttcacttaaattgtagttcatattgttaaatttatttttttaattcactaaattatccgcaaatgtcggctaaccccgaaaacatgtctagccaacaaaatagtctgcataagagtgtcgaataaacaccagcagagacgggaaaattcaaaaatgagttagtttcctttgagaaatttctacttatttatgaaaataaaaaaataataaattgtttttcgataatttttaatgtccgtttttgttaatgctgtttttaaaaacaggcgagacggatgccccagtcacgtgtaaccaaaattgaaaaaaaaacaatttctgcagcatggagcaaaatgtgcagttgtttttttaaaagaaaattgaataaaaatattttcttatttgaattttgttatttaaaaaatattatatataagccaatttaaattggctatttcatcatttcccttaaactattatataaaccataaaaaattccattttcatcaaacattattaaaaaattaaaaaatttaatgcattttttcttctttgcccttgtttatttttatttgttgggaatcgaacaaataatgactatatccgataatttatttgatgatatttggaagaggagcggcattttaaatttgccaagaaaaagtgaaaatgtgccgaaaataaaagtaataaacgcggaaatttcccaaaattatttgaaatatttatttttcatttttaaggttgagccatttgacgagcattcttcggcagcagcagcagatgcaaaggcaaatacgaaatttgggaaaataaaaaaagaaaattttgaaattttcgaaaaaaatgctaaaattaaacaagaagaatttggtggcagcgaatcgcgccaatttggagcaattaaaattaaaactgagaatgcttcaaacacagaagttaaagaggagaacgaaaattatcgaaatttgtccgaaatttatgaaaaatggaacaaaaatgagcatgaaaagactgttataagccggacagatcagcaaaatccgagtttatcaagtaatgtgaaaaggaaattaattaaatatttatgggccattttagtcggcaaaaaaggattagagaaataattatttattttctaagttaaagttaaatttatttaatttgaatttgcataaaaatcaatatgtgtaatttttgagttgcaaaataaaaattaaaatatattagtttaaagtaataatttttatgaatatagatttattttatatatttttttacaaaattcttttttttataaattttttaaattatctagcttttttagtctatacgtcatcgagcactaattatggtgacagtaattacacgaatgatgattgcagtaattatggtaatgatgatgccagtattacggtaatgataatgacagtaattacgaaagcgagtacagtacagcaaatacatatgaagatgaattnggatgatatgattttgaagatcaaaatgaagtcacaaattcaaaatccccaaatttacaaagagtaattacttttttaaatttttaaatgatttttttttgtatgatttgggaatattttttttataattttttgcagttttgccattttgggaatttntaatttgtttctaattaatttaatttcacagaggaaaagcgttattacagtgaatcggaaaaggaagaatttgtgaggaaatacaaccaaattcagagggaaaagccggaaatgaaagacgaagaaactgttcaaatgttgaacataccaaggcggacaatattcagatggaggaagcaattagcagaaaaaagtaagcgccacaattaattaattaattaatttaacaaagtaattaattaagtcaaattatccgaaaatgacgaaatgcgtgaaattgtgagcgaatttgagagaagaaaggaacaattggcacaacaatgggggagagtgcccgagagaaggacgcaaaataaaattgcgaaggaattgggcgtcagcgcacgagcaattgcattttggaaaaaggaatttggaggtaattaattttaattaattagttttggcgaattcattaaatattaattatcatgaaaaagaatttgtgaaaaataacaaagttttctaagaatttgttccagaaagaaaagcataataagaacaactcttttgcgctctgtttagagcttctttggtcatttttataatgtatgtttttgcctattttggcatttttatcttggtttttggattttagaaatatcaaattcacatcctaacaatggcactaaatatttcaaaaaaaaatccctatgaatagcgagatttttcaaaaattttcccatatattagagtacccccaagcatttcgtaaagaaaatttggggtttgaaaatatttttcaatatttttgtctattttacaatttgcgtgcgaaatattgatcgaatccctgttaatttgcattttaaaaataaatttaattcaatttaattcattttgcagaagaaaagaaggacttaaaaaatgaaaagcttcgaattgttaaccgtttcaacaaaatg

SEQ ID NO: 14667 - DNA, 1009 bp, Heterodera glycines
ccccttttgtgggagtgaaaaaaaaaccccccggggggttctatgctatcaaaagtatcacaattttagttcactgactcagggacggtccctgggttttatggggcataaaaacccataattactgtgttcaaaaacgcttccataatccctgactagcccaagtgacgatcctaggctcggctggagaaactgaaaaccctgattttatattaaatgatcattttttcaaaaaagagtaattttggccacttgtaatggacgggggggggggattttgtttcgaaatagttaattttcatgattttttgtaattaaatgttccgagaatttcggagtcattaatgcgaatatcccaaaatttgtcagttaaatgttataatgacgccgagaaaaaagaattgctgaaattgtatgaaaaaattaaaaagaaacaccccgaattggacaaagaaaaaattgggaaaattctaaatgtgacgggacgaaccctaacaaattggaaaaaccaattttatgggaatgattccaagaacaaatgtgaaaatgtacagaagaaaagtaagttttttttattcaaaattaaataaatttttgaaatttaaggcaaataaaaataaagcttcaaatcccctttttaataaattataatcattataataattaatttaattaaatcattttaaataaacaaaataattattggagggaattaagtgaattattaaaaaaaaacaaaaatatctttttttctagaaatgcgaatttacacgaatttggaaaaaattgaaataatagagaaattctatagaattaaagaggaaaatccgagaataactggaaatcaaatgagcgatattttgggcatttcaaaatatacattagggcgatggaaaaagcaattcagtgaaaaaggtaaaaaaaattggcttttttatttaattcacgaaatttaaacagaaattttgtgaacacaagaaaaggaaacgtttatataaaaggaaaacaa

SEQ ID NO: 14668 - DNA, 1822 bp, Heterodera glycines
  unsure (1)..(1822): unsure at all n locations
aaatcggtgactcagagtggcgccaaacccatactgacttgcgtcagctgccacgattacgggctttttcgggtcatactgagtgagaccaaagtccgactgtaaaacctgtttggctttttcaatagcggattgctgctcttcaccccaaaaccaaggagtatcctttttatgcaacaaagcgagaggagagcgcaacttacgcatctctntaacaaaacgcccataatagttgagggcaccgagaaatgatcggagagttgggagatcatggggcggaggcatgtcgcggattgctgctgatcgttccggatcagggtgaatgccttccgttgaaacaacgtgccccaaaaatttgatctcctttttgaaaaagtgacacttctcaatttgaattcggaaaccatacgaatggattcgagaaaataatttcaaaagtgttgaaacatgctcatttgcgttccttgaagcgatgatgacatcgtcgagatatgtgaacacaccaggaattccggctgtcaactggtccatggtcttttgaaaaatcgatggagctgatttaactccaaacggaagacgctgaaattggaaaagacccctgcgagtgtttattcccacaagagttttcgatttgtcgtccaattccaactgcaaatatgcatcacggaaatccaactgagagaaaattttcgagcagcgcaatgcatggaaaatgtcatctgttcggggcaaggggtgcctatttagttctagcgcatcattaagacccgtcgaaaaatcaatgcagattcttactgctccatttttcttacgaacgtagagcacgggtgcagcccaacgagagaagtcgactggtctgatggcatccatttcgagcaaccgatccaattccttgtccactgcgtcttgaacatcatgtggcacttgacgtgctcgacagaaaatgggagatgcatcaggcttcagatgcagaatggctttcatctttgaacatctgccaattccgggggcgaaaacttggggaaaagcatttttaagctgttccgccagcccttgaggttcatcgggaattgcaattgccaaagttttcggttgaaaatgttcggaactcaacgtcgttgcgattggttgttcagttgcctgttcaaaaggagcaatccaatccaaacccattaaatttggtgcgttggtgtcggccacataacaatcgaggcacttgtgaacacctttaaactcaaccgaacatttgaattggcctagcaaacaaagcttatggcctgaaaaagatcccacaattttaccacttttaatcaattttggccctccgagacttaaccacatcggcctttgaatgattgtgagatgtgagcatgagtcggctgccaattcgattttgtgtccattgatttggatcggaaccatgatccaatctcgcgcctgaacaacactgaaggttgacgccacacaatgcgactgagacacggcggatgggcacattggtcttatatggccgagattaccacaaccataacatttgacatttgacatcctttcgataagtgcagtccttgagcatgcgggcgtttccacaacgttggcatttctgtctttgttcctgtcgtttatcattaaaatttgagttggaccctttttcggaaaatcccgatttttctttggaaaaaatcttttggaattgccatcattcagcttttggggccgattttgaatcgcatgaacctgaccaggatttccgagtgctgccaccgaatttgcagcgattggatttccgcggcactcctcgaacaagttctcccatttgatg

SEQ ID NO: 14669 - DNA, 2360 bp, Heterodera glycines
aacgttgttgcgattggttgttcagttgcctcttaccaaggagcaatccaatccaaacccattacgtttggtgctttggtgtcggccacataacaatcgaggcacttgtgaacacctttaaactcaaccaacatttgaattggcctagcaaacaaagcttatggcctgaaaaagatcccacaattttaccacttttaatcaattttggccctccgagacttaaccacatcggcctttgaatgattgtgagatgtgagcatgagtcggctgccaattcgattttgtgtccattgatttggatcggaaccatgatccaatctcgcgcctgaacaacactgaaggttgacgccacacaatgcgactgagacacggcggatgggcacattggtcttatatggccgagattgccacaaccataacatttgacatcctttcgataagtgcagtccttgagcatgtgcgcgtttgcacaacgttggcatttctgtctttgttcctgtcgtttttctccatttgtcgcaaacattcgtgcctcaaatctttgtgcgcgtcaccaaggcctgaaatgaaaatcagacattttatctcctccttggtgatgttcatgtcggctctttcgcatttggagttgacaagcgcgccaaagtcgagcacattctgagagggagcacaggagagctgaaagcactcaaatcgacgaacaaaaattaatttcgtttcaccgatcaaatttttgaggcatgtaattgtttcctgaaaatttaattcagtcggttttttggaaaacctgctgttcataaagaacataatctgtggaagacaatttaccaggactaaccgtactcgcatatcctctcccaatgccatgccatccttttcaatgaatgggccgaacctgtcgaaccatagtgcaaaggttgagtcctgctccggatcatagcggaactccggaatctgtccattaatttgggaaaagagatcggaattattggcaacgggtgccgtccgattagtgaaagcattcaacaaatccaaaaattgcttttgctgcgagtccatttgcctttgttgcatttccaaagagctttaagctcatcttttggtgccatattttcaatcgggcgtcgccagttgttgtgtccaaaggacaaacaaaaataatatttatttgacagagaaaagaaaatataattttaaagtccaaaatcagaaaattgggaaatgcgacgaatgaatgaaaaatgaggaagggttgggaaatgggatacagtatgaaatggatgatgttcattcgtgtcaatacataataaaacatttaaattcctatccaacaagcacaacccaccagaccttgcatatattaacaaaattgaataaaaatggcctaaaatttataaaaatattttaccaaaatccaatcattagggggtgtaaaaaagtctcggtctcgagtctcgtaagtctcgaaaaccgagaccgagactgaagacccgagactcgagattgagaccaaaaaaccccgagaacttttctcgagtcgagactcgagaccgagtgtctcgagcatcactactaaacacacgaaattttccccacttcgctgttgaaattttaataaactaaagtaagaacttcattttaattagtattgtactaatcgtccagtgccgaatttccataatccaataaggtcttctaatatttattttctcatttatattttgatattttttaatatgagtttaaacattttctttttgttgtttttaatggcttttttattagtaaatagatcattcattataaatatgcattatttatatgtaacatttttaaaattagtttttatttgattttttatctcgattggccatatcaattagttaaattattttttatatagttatataactatacttttttaaaatattccttacttttcatgtcttaattaatatcataacattttattttaatattttgttgtattatacttttattgtaataaattaatattattaatttgttctttgttcattactgaaattatgatttttctatataaattttaataaatcagtgctcctgtgattatgttaattttttacgactttaattgtttaaaaatctatttgctttgatttttattatttataaaatatatttaattgcatgtgttatttttcttggtaaacattgactttcattaaattattaagacgaatcaattgattttttaagtttattatttatatatttaattataagttttatatgtgataatttccttttttattttaattgtttttaaattatttaaaaaaagggcttacatgaaattaacagttttagttaatcgt

SEQ ID NO: 14670 - DNA, 1691 bp, Heterodera glycines
agaaaaaggtgagaaaggatggcaattgctactcattcaaatttggccaaatcgcagaaatgggacaacgaaagttcaccagcaacagaggcaaaaggccaacaaaaaatggctgaccgttttcggcacttaccgacactctccgtagaagcagaagagcaatggcagaatgatcacaaccattttgaacccactaccgtactcgggcgcaacacgcgcaccgtatccatgcaattggaggaaagggacttccaattttggttcgccgtccttcccgaaaaggacacagtggcgacgcgacatgcactgctccaaattctgttttcatcagctggcgacggtggcaaaatgcagcagcgaatgagaagccgaccctttgaacttttggccaaattcgcgacgaaattttggccaatgcccgaacaaaacaaaatgacaataaaaccggtgggccattagtaaaaatcaatttaaatttggccacccaattaagctaaactaatatgttttgcttttttgacagcccccacacagtgaatggctttccgttttggccgattatgcccacggattggcattggtacgcggcagtcgcgccgccgtgcgccaacgaatcggcactgttcggttgctgcagcaaaacgggcaaagtgccaacgattggttcctcgcggcactgtttctctcctccagcctttcagccgaagcgaccagcgaattctgtgaacggtttttggaatggcgacggtaattgcccaattaaaaactaaagaccctatatattttttaatttttattccttcctcattattccttttaaaattttatttaaacaaatttccccaccccaaattatctgtcccatttaagcatttcctcctcttccgccccattttcgcttaatttcgactcagtttggcccgtgtgctgctccgtctcctccccctgccgttccttctccgaactgctcgcccttcgcgtgttcccccgcgtcctttcgttggtccgtcgttgcgtcgcctttcgtcccctccgggcctttctctgttcctgccgtattccctctctgttccacctgttcctcttctacaccaaccaagcttaccttggcatccttcctttccgagcagttcaggaataccttgtcgttgctgtgctgggcggaccggaatttcaggtcataaaataaaacaatggcactgaacggaaagtaaatttaggcacttcacttttgtgcagttttggcacatatttggtaaccaaaattaattcgcttaaatccaattttattttattaaattgaatttaattcccttcaccatttaaatttagcgattcttcgactcgccaccattctcttcacttttcttcaaaattgacttcacttttcttgcgtccgattttcttggccgacttttgcttctcaaaatacgcattcatcgaaatggacgaccattaaattgtgtcccaatcatttgccattttttctaataatctcaatgtgtgtgaaaaagacgggtgatcagattttttcaatttcaaatttacaaaaacacgtgttaaaatggcctcaatttgctgcctgttttcattaaatttggtaatttctgaatgccttcgttgcggtcgattcgtacggtttccatttgtcttgcgcaaatgtccgtccatcggtcgcgcaattccgctca

SEQ ID NO: 14671 - DNA, 1632 bp, Heterodera glycines
ttggattcggtcctgaaaccactatttaacgatcttttgcgcttgttctcacctgattgccatccaaatcggccagtgccatcccttgcccactcaaaagccaacggtcgtagtgtttgcgcttcttctcatcggacagcacttcctttgcaaactttagggtagtaagttttaatccgtttaattatcattaatttttgctgtgccagccttgtaaatccctgctaattgccaaaaccacctgcagctgttggaatcgtttgttcgcttcgtcgtccctcaaattgcgcagttccgccgcccctccgctgactttgtccggatgcaatgccaacactttccgtcggtactcagccaaaatttgctctttctgttgtcaaaagtgccaatcagtcatttttcttcgctcttttcactgatcactcactgtcgcctctttcggacatccgatcacttcgtaaagatcggtgggcattggcaaaatattttaaaataaagttaaactctttatttcgatagagaaatggaccattaattaagtgatagaaattttaaaatgcataaaaagagaaaaataaatttagtttttaagaattgattaaggaggcgaaggaaatgaaggcacaacgccaacacaaaacagcacaaccacccccgggggatgacaacgcatttgtggtattatttatattgatttgagggggcggcgggggaaatgcgcccacggcgctttcggaaacacagcacaccgcgtgaattattaattccttttcccaccatcagtttctcaaatattatttatttattcaagtaataaaagtccaaaagaagggacaaaggccgcttatactttcggaagagaatgatagtccgggaaacatgatgatgtcagatctccaacttgaaattaatcttgtaaaatgttttttacttttttatgaaggtgggcagtgaatttgatattgaaatatctgaatttttgcagatttcttgtagatgttttgtggttctgttagtaaaggagttttcagttttggttattttttgtttggttaccaaaataggaaaaggtgaccttttcctatttgaaaaattataaaggttttttgggttgaggtgagtagtatttttgataattttaaaggctgttatgatattaagatattttctcctggtttcgagcttggaaagttttagatattttagcctttcgttgtatgagatatagggaagacagcattttctgaaaacattttttgtagtttttctggaatttttccaggcggtttatttcttttttggttcgaggattccaaattcggttgcgtattctaaaaggggtcgaatataacttttataaactgtaatccaagtcttggttgatttggttttaattttttttaaaagaattcgactcttgagataagctttttggagaatgattgaaatatgtccgttgaatttgagtttgttatcgattagaatgcctaaatcacgaataatttttgattcagggaaagttgaatttttaattgtgtacggtatttttttgtaatttttacctaaatataagagggaagatttttttactgaaaaatttaagccccatgtttcagcacagtaaaagactga

SEQ ID NO: 14672 - DNA, 951 bp, Heterodera glycines
  unsure (1)..(951): unsure at all n locations
cctaccaagccaaaaactttcatttcgcctactaagccaaaattagtaggcgaaatgaatgtttttggcttagtaggcgaaatgtcgagtaggcgaaatgtcatgtagccgccttatttatccaataataaaatacatttttctcttcagtgctaagcactttcgccttttgacttttcggcgtaaaccaccgcctattttcaaagcttgtcgtcgcttgagtcgtttagtggcccaattcgaagttttgttttctgcggtcggtgccattattattatggcaccaaatctgcccaaaataatctgttggtgatgctggagattttaatttagtgatgaaacaaaaatcatgaattattttcattgaatataaaacgcccgaggggaaatagaggcaaaagtgcgcaagtggctgcactggagaacattcactgggcggaaaaaggacgccaaaaaacggacggataaatcaatgagaaaatggcacaggagaaacagacagagagaagagagacgaaaatgagagaacggcaaaatgttcgtgccgagcgaaggtacagctcccgagaaattgcaattatcaattggagctgacgacttattaactgaaagcttgggccaactttggcttccatttgattgttgtaaaggcgctttatggatgagtaaaaagaagcaccaacgaatttagaaatgaacacattaaacggtcaaaatcaacaacggcaaaacattttctaatcactgacaaagaattttctgatcaccgtccctttcctctcacttcagcggtcactcaacaacttcaaaagctggttacgttctttcgaatcgcgcaggtcatcggcaaatgcgagcgcgngtctcccttttaatttgttttttattggctaattaatgccatcaagaactgacctttggcatcagtctgacttttgtcggctccgtttt

SEQ ID NO: 14673 - DNA, 3147 bp, Heterodera glycines
ggaattagcaatataatttttaataaaaatcacgcgaatggcaccgaaaaaagtgacaaattttcactaagaaaaaaagatgaactcaaactgctaatgcatgaaatgcgttttgaaatgcaattttgctatatttcggaagtcactgacggatttccatgcggccttcctgacaggcgatgaccaacggcgagcgattgtcttcggcaaacaccaaacagttcgcgttttttccggtcaacattttgacggactcgagctgccctgcaatgacagcatgcccaagggcggtcaaacctaaaatgatttatttatattatttaagcattgaaaaatatttttaataattttataagatacacacgaacaaagtgaaaaaagttaataagaaaaattcaaaattctgcacattttagcaattgaaatatctacataaaagatcttacgctgctagaattacaaattaacataattaagtactctaattgttcaaattacagctcaaagggctctgttttcactcatttgaatgaagggtgtttgctcataataatatcgctggtaatcctacttttagtgaaaaaaattttttttttttctcaaactaaagctattttggagttttcggggtctgcgaattcggtttttactcccatttcgattcaattccgtaatctgacgcaatagcgaacaaaaagtcaaaacttcaaatttttcgagtttcacattgaaatttttttcgaaaaaggggggctaccaccggtacaattaccgggtgcttgaccattctttttttaaatggaaaatttggtcccaatttttctagcaagtattgtttattctatttttccaagatctgatcataacactggcacttatattgtctggggagaatgtttggggacaaacttttctgaaaatttcatacaaccaaagaattagccatttgctttttcctaaaaaatcccccccccaaattaaaagcattgtctctccatctaaaaaagtgccagaggcctaattagcagataaatacggtaactgaccctcgtcatctttttgctcaattgtcgcgcccaactcgacaagacagtgcgcaatcccaacgttaccgaagacgcatgcccccatcaaaggggaaagaccgtcttcatcggcaaagttcacattcgccccgcgctcaattagggatttgactaaaaaggaataaaaacaaaatgatttgtcactttaaagcatattaaaaacttattttgaattgccattgccaattttaaccataaattctcaaacgtactgttttttaattccgcccctttttcgcatgcatccaacagttgggcatttgaattactggccattttacacaatgaaaatgattgaaggtatttgtcttgcttaaaaattgaagattaatactaaatgcctggggtaatcgaacagagacagtaaacgagctgaacaacggaacactacgaaattttttagaatttaatggagaatcataaacaataaaagaaacagaatacaaatattttttaatgtttacctaagttccaaattttaatgtcagtaaaattagaataaaagacggttttaattagagaacggcatttttagaaaatacggatcaggattcaggattacggataaaaatcctagtccgtaaaaatccgtatacggctccggtccgtagccgatctttagttttaataggttttagattaaccgaggaaattttttgtgtcgcaagagtgtgaaaaatgggatatgaatgcgaaaaaaggcaaataaataaaatacaactaaatttaaaaatgatttttatgtagctgtacacgagatggaaagaaaagtgttaatcggtggataattgccttttcaacgctcccattagtcacttctgtagcagattaaatcgggtgggaacaaaaaaaaaacagatcccataaatgagaatgtggaggggggggggggggatattggccaatggaatgtctggaattggaattgattgggttcgttcatacttaagcaaatcttataaacccaaatcggagttaagcgtcgtggtcgaacggtttaacactatttaaaccagagctgtgattttggaaaaagccaagttaggggcgcgattgccattttatttaaaaaatcgggtactggtgtgtccatttctgactgggactgaatcgtagtccggacaaggccgtgccgtaaaaacgattcttgaaaaaaagacatcgtcgctgggctctccattcacaaatttggccgctgcccgacactccatcaataatgggacgacgcgaaaaacatgttttgcattttgaccgaattaatttgattaatttaagcaatttggaaatttttatcaccttaaactgcagaattgattacagtacaagaaagatattgtatcatttcccttggcaacttaaaataattatttgaaaaacgaatatggcggcatttcgtcacgcccactcatccaatcgccttcaccacaccactctcctaaatgccggtgttcaacatctgatcagaaaataaaatgaaaataaattaaacaatttaattgcccgtaggaaaaatctaaaaaagtcacaaaattacagtaatcgcttaaaaatggaatcggagcattagcaaacaatcattattatctcaattgtcttcgataacgctttttttttgcctccagcacattaaaatgaatacttcaagtgacaaaaatgccgaaaagggacccgcaggagagaagccagttcgagagcggcaccttcgccattcaaatgtagaagaagccgaagttgaagcaatggatgtggaagctgaagcggaggaggaggaggacgacgacgacattcattactcgccgttttccaatgacgccaagctgctgccagccctgcataagcccgccttccaagtcaagcagttcacgctgaaggtgaaccagctgcctacatgccctaccgttgaaaatgcaacactttttgcagaccttctttgaactgcacttggaagtgatgggccgacgcgacacccgggcgagctgattgcgtaccttcaacatgacgatcggagacttcgagccgataccacctgaggaagtgccggcagcaatgcaggtcttaatca

SEQ ID NO: 14674 - DNA, 3601 bp, Heterodera glycines
  unsure (1)..(3601): unsure at all n locations
caaatggggatacactgaaaaagtggggcgaatgaaatccattagacacattttccggatcacacaaatcccactaattccgcccagtaaaaacagggaccagacgcggaccgaaaaattgacatagatgcaataaacggtttttcaattattcatttcaaatgatgctttgaaaataacgcggtatgcgcaactaacagaaaaaatgcgcatcgataaatgatcgcgtttcattctaccctgtgccacgcttctccagccctacctgatgatgagtgcggacgaccaattcgatgttgagctttttgcaaacgctggcgaaggcaccggcgtgctcgtcggcatagtcaatggccttttgtttggtactcaattttccgtaaacgaatttttctctcagattttaaactttaaaaaacaattgttttttctgcttgcagcaccccgttccgagttgggcctgcccgagactcggctggccatcatccccggctgtggcggcacccagcggttgccccgggtggtcggcgttgcaaaagccaaggagctgattttgaccggacgcaaagttcggggggacgaagcggcacaaattggactggtgagtgagccatggcagcaattggcaaattattttaaattttttaataaatggggcctctgggtatcataaaattttttggatttttttttttgctctaatatcccttcatttgattaaatttttacattaaatttcattccccccgttaagctcaaccatttgacggacgacccttatgccaaagcgttggaaattgcgcgggatgtgctcaaaactgtaattaatttatttttgagcaattttccctcattttacatttttttttgtttccgcagggccctctcgcaaatcgggtggcaaaattggccgtggagcagggctttgacttggaattgcgcagtggtcttgtggtggagcaacagtgctatgcacaggttggccccacaaagcgcaaattattattttctctctgcccaattttaaaaaaaataaataaaatgttaaaaatggacgagaatgttttttaaaacaacaaaaaaataatgtgccaatttccatttagctgatgccgacaaaggaccgtttggaagcgttggaggcgttcgcgcaaaagcggccccccaaattcaaaggggaatgaatggaggagaattgcggcgcgaatgttgtgtgtgcatattattgtatctagtcatatcagcagtctccagcaatgaaaataagaatgaagatgacaaacaacaaaaaacgcattgttttttttatacaaattttgttttaattatttccctttgtttttgccccaaatgccaaaaaccctttcaaaaagcgaaatgtgcctttgttttttattattattgcttattggaacaaacaattataataaatgaatagcgaatttgaagcaacaattaaaagaataaaatttgattaggaccaaacatcttcaattaggcgctccttttcacgcagttttttcaacaattgaatcgcttcgacaggggaaaagcctggaaaaaaaataattttcggtctgatcaagtcgaccaaatctatcctgatttccctgtcgggttaggggccgaattggggtgcggccacagggattttgagtgggcccgaccttggggttttttaacgaatggatattcgggatttgtctcaaccaaaaccatgggctcaatgccgtccctgtttaagtcagccaaataacgctcgcctttctcgcgctgcaaaatatcgctgagacatgcccacaactctctgctcatgttcttcacgtcgccacacgcgtagaacagaccgccctcccccaactcctccgcctcattgtcagtgggcatcaaaaagtccgcaacttcggccgaccgttgccgcaacgcgtcatacactcgctgcggtcgatggcactgttgctggtggtgcggttgtggcgacgtctcattgtcgccggttgtgcctgctggtggcccagcgttctccgctgacgccgccgcgtcggcgactgttggacgcgactcgcacagcaccaactcgctcagcacaccgtcagcgaccatctgctgcagttcagacatgaaatgtgtgaattaaccatttggaaaacttggcatgaatatttgtgcgtggtacctgaacaggaattcgtcgtccaaattgctggacgcatagaacagaacgcgtttcactcgtccacaatcgccgcccattcgttgcatgaaatgcctgcaaaaattttaaaaaatccaccttttgaaagaattttttcttataaaaaaaagacagggcagatagtgcgaaaagtttctagaaagaatgaagtcaatttcaagttgataaatttcaatttgctcctacagcgccacaaaaaattttatatttccaatttccggaaatttttgaggcctcaaaaaaggtgaaaaaagggggacctgattttttgaagaaatgcaatgaacggagcaacaccagtgcctgggccgaccatcatcaacggcatgttcagcaacaacagcgcatggtcgggctggtcaaccatcgtggagtcgggggacggcattgaggcgggagaggggacgaaagaagggggcaaaaagcggaatttggacggctccttttggatgatctgcaatttttcaatagaatatggaaatggatttctttagaaccaaaaagctgtcaaaaaaagtaaattggacgaaaaattttcatagcaaaaattaaaaaagggtaaaaaaaaactgaaaaaataaaattattttcgaaatttttcacaaatttttaggttgagcggaatgcaagagaaaaagcatttcgtttataattccgaattatcatttttggtaaattggaaccatttttggtcaagttcgtcagggttcttcaaaattagaaaataattgcaatcgcaccaaatattttatttatttttttaaattttacgggtgtccgtccccacctgaacagtttggccaggccgttgctgcaacagccattgagtgcatgcgccgtaccgtttttgttgtttttggccctcaaattccgcacattcgtcaattatcactgacgggggcatttggaggacggagtaaacaaagcggaagcgcaactgttgctgattgtgaggttggaccgacaaatagcagcaaagggtgtaatggcggggcaaaaggcgaggaaggcactctgaaatttggggatttttttttgggggggnnggggggagtacaatgttaatttgtatggaaaaataacatcccgaacagaccgttgaacattttttcgagcaatattcaaaaattaggcaccgtcgaaattttatttgaaaaaaaggtggatttaagggccaaatttatgtgaaaatttcatttacgagtaagtgtaattgctaattttgacccanattttatccgtttttgattctaccaattaaacattccaacggcggtgtaagtgaagagaatgtgcacagcaattccaccagggaaatgttaggctaaaaaatgaaatttccaaaaaagaaaaaaaaagtattttaattaaacctgtcgaacaaat

SEQ ID NO: 14675 - DNA, 1598 bp, Heterodera glycines
attacgatatagtattctgtcaacaaaattatatagtaataatatttatttattattatcatggacaattttttaggttcttccctatgacacgtttgttttagactcggctcaacatgtcggacaaccattttttatttatcattcttctgtgtttagtttacttgtggttagtcattagaaactatttaaatgtccacttcgaaatcaactaacaaattcattctaaatttttgatagggccaataaaaaaatgtttataataaaaaaatgccacttttttatgccttgaccaaataattaccaggaagtttcatttgcaatttgtttccatcatcgtcggtgtaagtgatcagtggttcatctgcagcggattcgatgccagtgttcaatgaaatttgtaatgtgaatacgaaaaagaactggagaacatgttgagcattcaaatgtttcatagttcttaagtaaaaatagattttaaaaatcatagaaaattaataaagttttccacaaattccgatcctcggaaacttggaatccagagcaccccataccgtcggagataaaatacaccgaagggatcaaggaagaaagaatgaaatttttttttgaaataagaattttttttactagacatagtaacaaaaagataatatttattttaacttattttgctttttaaaaaaataaacatattatataaatgtaaatttcattggctcttatatagagtgcatttcataatttttctagaaaaatttttagccaccttttgcaaggctccaaactcctgtctagggcacatttaaagaatattaataaaaaaatgacattagcaaataaatttaatgtttaataaaaaaaaggataacgattttcgcgtggataacaaacactaacaataatcatatgaaaaagggcattattttattcttcagaaaattttacaaatttgcaagaaatttttcattgtatacaattataaaatcaaaaaatcaataagcaaatatttagctttatctaaaatatatgctatttgattgtatacataaaaacgagaataaaataaaattcgaataaaataaaattcgaatttcgccagctgatggatggtattgcaactgttaggcaccagacgaaattcaaaacatgtggacaattcagattgcttccctaatttttaaattttttaaaaaaaatcccctgaaataaagctctcatttcgagggggttgaaaaataaaccacaccctcctccccccctgaaataaagcctccctttcgaaggaggttgaaaataaggctgaattaaaactcccaaaatactaattagtgcagggaaccggactccgaaaatttgtttttcggggtatacccccaactccgaccccgaagctccgcaccctgaaaggtcgaggtcctaccctattcttaatgatttcaacactaatttttgttgtttttttttgtctagattgatatttaggaaacgccgaaaattgtggcgttaatttccattatttcaaaggaaatgattgtcaaaagccatgctgagtcgatccaaaaaaaaaaaattcatgattgataaaataaaataac

SEQ ID NO: 14676 - DNA, 957 bp, Heterodera glycines
  unsure (1)..(957): unsure at all n locations
ggggtggggcgtcggggaaaactccgcctaaaatggtgcctgaggcgaaagtctttcgccgttcagcttaggggatagtggaatggaggcctataaaaatttgaagtcaatcggacaaggggtgcgcgagttttgctgcgcatgggggagggggtggggcgtcgggaaaaacttcgctcaaaatggcgctagagacgaaattctttggccgttcagcttatgggggtggtggaatggaggcctataaaattgaagtcaatcggacaaggggtgcgcgagttttgctgcgcgagtctcgggggtgcgcaagggggcggggcgtcgggaaaancttcgctcaaaatggcgctagaggcgaaattctttcgccgttcagcttagggggtggtggaatgatggcgtgtgaaatttgaagtgaatcggacaaggggtgcgcgagttttggtgcgcaagtcttggggtgcgcgagggggcggggcgttgggaatgtaccgctcaaaatgatgcctgaggcgaaattctttcgccattcagcttagggagtgctgcacagacgacccaatgcgccgtctgaacttcttcaacaattcaaatgtttcacccctccccgctcttttctcatccaccaacccatcattttcattccatttctcccctttatattgatttcttgtccgttttctttaacgaatcgtaaagacaattaatgaaacgaaaaagccatgaaaaaactttaagctaagaaaagaaaagcaggcaaaaaaaaaaaaagaaagaaaagtaaaccaaaagccaggcccttaaacgaaaaaccatgaaaaaataaattttaaagctaagaaaagaaaatcctgcgaaaagtaaaagccaacaaaaagccatgaaaaataaaaacaattttaatagctaagaaaagaaaagcctgcgaaaaagaaaagccaacaaaaagcatgaaaa

SEQ ID NO: 14677 - DNA, 848 bp, Heterodera glycines
attgttgtcgaacttccatttcaggagcctttctgtgtggacggcacgcacaaccttcaatttttgaatggttgcgtttctgcgtttgggcagccattgccgtatgtttaatttacaaatgccatttcgtaatgtgttgagtttttagcccgctgtgcctgatcgtcgtttcggttgatcaccgaccagctcagcaaacgccagcgggtccgctcgcggtctccaactgtgtcctgcgcaccggcgaagggcaccgcgttgaagcctccgggtggcagcaacatgcgggtgtgctggcttccctgtctggcggcaccacatattggttcttcaactgtgttgcgcggacccgctacaggcagctggactgctggttccgcattggggttggaggccccaatgcgcttgtggtaccacatgtggccccacaggtaagtttttttcattttaattttaaaatgattttttttttaaatttatgtttaagcttccggcaaacattccgccaacggtgcttgttcagactggtgctggtcgtgatgcgactcacgtaccgccaaacgtgaccaccgctggtgctgaacgacgcgcggacctggacaacaacaacaacaatgtgaggaattgatcttttactatgatttgtaattttgttatttaatattgaataaataattttgtctaggacaatgttggtattgagccgcgttcaagttgtagtccgagtcgtacagctggtgcgcgacgaacacaaaggcgtgttgccaaaccggtgcgtttgagggttcgattcgatttgtccccagaagtagaggaaatttggggggtggaaagacaacggccatatc

SEQ ID NO: 14678 - DNA, 3370 bp, Heterodera glycines
aatgaatgttataagaaaaataaataaataaaagcgactcactaataccaaatctttataaaaatggctagaatttcaaatataagagtccttttatgaatgaaactgcaccgccagccattgactcgaacattcaaaatcttcaacacttaatggaaaatgaaaaatcacaaatttttatttaatatttttttcacaattattgctgaatgcacatttttaaataaatattttctaatatatttatgaaataagaaagcgaataagtaaaaaaaagaattaaacgaggtcgttagtaatattactaaatctcttcctactttgaactactgatttagaacaacccaaattgcgagaaaagtaataacagtgattttgtaatcaacaaataaacataatgaaattccatattaataaccttttaaattaattaaaaatatttatttttttaaattgttagtcgcacaaagtgaagcttaaatattatgcaatctagtgacatgagcaaagaaataaaaatagaatttgcagtatatttttatcatagcaaaataaatatataaaaatcaaaagtaattctgaaaatattaaaatcgcactaaaaacaagttaatgtaaaacataaatatactttaaatactcaacttataataataatagtcgcaaaaataattatattttcaaataaaaaaacaaacataaattaatagaatatttttttgtaaaataatatagagttaaatattataataaataattgaaagaaaataatatacaaaataatatatgctttttttcttgtcatagagtattaaagttaatagaaaataaaatttctattaatgattcattaaactaagattaatattaccataaaatatatatacagctggaatccgaaaacaaatactacatttgcgcaccatttgtgcattattgcgattgtgttttttgcctttttatgaataaatgaaatttaaagaaaactaaataatttacaatgagttatcacaatttattagcaaatcaaataatattttgcatattttttgttgttctcagcacggtttgtaatttcaaattaaagatcgtggtaattatatgttgggcaataaactggcgattcagaacaatattgaaccgggtttggacattctctataggcaacaatttttaggtgttcgagaaaggaatagtcaccatccgcaatctctctctttaactgctttaattgatcagttaaagattttttcttcttcttaattttttgcttcaaatctctcatttcttttcttttcttcttttctgcctccatgcgctgtttcgtcatgggactgatccggcatcggcgttttggcagtttatatataaaagtaatggcggataaagaattaaactttcacaaaatgaatacccgacatcattcattttattacaacctccattaaatccacacacatttgtttccaaattcaaagttaaataattttaaatcgaacccatattccaaagtaaataaaatattctaaattaattttcaaatattcctatctaagcaacctcacttttacaatggaaagtaaagcaaaaccttttgtatgcttcatatgccaaaaaagcttcaatatgaaaggcaatttacatacgcacattgagactcatacaccgatgtaaaattgaaattaaaaaaaataaaaaaatattgttaagttctttacatgtgtgaaatctgcggaaaaaaatcactttccaggattaaaagcgcacaaatgccgcgaatgctctattgcatttgtgtcctctaccacacttactgtgtgtaaatataataataataataataaacaaatattaaattcaaaaaaatgattggaaataaattaagaaccattttaaacggctccaccacggacttaagccgttcgagtgttggttttgcgaccaggagtttgacaaacttgtaagtttttcaatgtgaaataatgacataattaagcattaaaaatgaagtaaattattttgctttaacgaacactaatgttcatttttatggaaaaagccgtcgaagaaaaattactgatactttctttgaataaacattttcatagactttttgtagcctctcaaatggtatcataccccctaaaatattttgacataaaaacagacttctacacgggcctcctgctaagaaactgatcaaaaaaaagagaagaattcttcaatgcaaacttgatcagatcactccctcataacggcagggggataattttcaaaaaattatttctgggttaggatttttgtccataaagtataaacagtccatcagaaatggcctcataacagcaggaacacccaacacactgaaaatcgttataattttttgtccataaaatataaacagtccatcagacagaacacagaatctgcaccccggtattgctttttgaatggcggattgatgacttatactcaaatgaatttataagtgatcaaaattgactatcaaataaatgaaaatttttcgaccaattttcccctgggaatacatcaattttatggaggccaattttaggcacttgtaaaactcattgaaaatgagccatcgatccgccattcaaaaagcaaaacacgggcgcaggttctgcgctatacggaatttccggtccggtggccaactgagtaccagcggctcaaaaaccgacttttgccgacagtctcactgttacgaaattttttgcttttgtcttcagggcttagtgtaccccaaaagtgaaatgcccaaactgtggcctacaactttgccagcaaaaatttttttttttgatcagaccaaagacctgacctgtaggttaggcaacgtaagaatcactttttggacacttcagtaccaggcgaatagctcgccagggtgatcggagcgtggggtcgccagcggactttttgtagagcttttaaagctctatctaaccatgtttaaaaatttcgaaaattttcaaaaattaacgagctagccctgaaattcggtttttcggtttttgaattttagaatttttgccgatttttccagggaaaaccgagaccacttttaagcaacagtttttcgagctctatcgactggtatttttttcgaaaaaattttggttttttcccggaaatagaaaaaatttttggccatagcgggacatttgagtcccgggcccataactcgtcaggagtcggttttagccaaagattggcttacagcaaaattgtagagcttctttattttttggggaaatttttggccctcaggattttgggttaaattttgaaaattcattactcaatgaaggtttggttaatttaactgaattaaagcaataaaaat

SEQ ID NO: 14679 - DNA, 3457 bp, Heterodera glycines
  unsure (1)..(3457): unsure at all n locations
tagagttgagcggtaatcggtaattgcaaaaaaaccggtaccggtactgcaaaaaccggtaccggtaccaactttttcaaccggtaccggtaaaaaccggtaattttagaacataaaaatttttggacaaaattttccaaatacaaaatttttattcagttttcgcgcgagtgcctgttttttagcattagaattgttcagaagtatatgtatattcaggttgaccaagttttttttttcaaattcaggacatagaacactaaaattcagatgtagacctcaaaattcagattattgcaaaacaagggatcagcggccaattttccaattttgcgaaggggtctccggccatgtaaattaatgtaaatcaatgacctttttttgctttcaacaccgctttttacgcggcacgttttttccaagacttttgggggacaaggagggccggcggtgccgataggcgccgccgggaaaaattttgtaatttttaatgcgatttgttaacagaatttgtaaaaaaaatgaccaattgattaagttttgggtttttaggatgcttaacatgaaagaaaaaagttggaatattttttaaaattaaaattttaattaaaataatggtaaagaaaatgtgaggaatattctatccaagtggggaattgaacccaggcgaaaaattatgaaagatagaaagtttaaccactacaccacatgtgcatgtgtgtactcccatgactaaatgaaataaaatttaattttttctcaaaaatttctccttcttcaccaatttcctactcttttctcgaccagacccccattcttaccagtgcaaatttttaccggcggtaccggtactagacaaaccggtaacggtaatttcatttttgaaaaaaccggtaccggtaccggtaccaaaaaaaccggtaattaccggccagtaccggtaccggtaccgctcaaccctagagaaaagaaatgtcgaacgcattgacaaaattttgttgggggcacagtgcgaaaatgcaagtgaaaaatgaaatgctgaaaaaggggcggaaaattgtcaaaaactttggatttattaacatattattagtgatttttcgcttatttttaataaaaattataggacgaatgcaaggaattgtttgcccaggaagaggaaaaccgcaaacgattggatattatgatggtggtgaacccccattggtctcgtgtataatttctgaccatatgaccatgaaatatctcttcggttttgtattttttgtatcgtttatccgctgacatacatttattctgccaatttttttgtgtgtttgtaaaatcttggtaaaagattcttgctaattgttttggtcctcataataattggctctattgcactttgaccgtcccatcagctgattttctctgttttcttggccataactttttaaaaaaactgaacacaaaagtcaatttgggagcctaaaatgcaagagcccaacagtttcatgttaattgggacatttggaaatcctgtctaatttaagagtgtgttttgcccatggcaagtgataattaattaattacataattaattgcctgttttccatatcacattttgagggatttgagtggggaggacaaacaaaagggggaaaagtgagggaaagggaggggagagacaccgccgattgaaaaaagacacccgcaaggtcaaaaagagggccaaagaacagttgcgaacaaacatttaagcaactttggacggacgaagggcaaacgatcgccgggggcaaattgggaaaagcggcaatgatcaaagggggtaattattaacgaattaattaattgactatccatgcaattttttgattgagaatagcttaaaggcatttgtaaagccgggattctgctgggtttgccttcccctcgtcctctgtggtcattcttcgtcccttttggtatatctgctgacaaatggacatggaggaaaaacactggtccatccacaaatatttgtttacttgagaattgaagggatttttcggatcattcgcccctttttccccttcgttcaactttcccccccccccccccccccaactgctgaagtgaattccattgatgacaataaacacaaatcatgcatttatttatttgactaacactaaacccaatcaaaatgaaactgatgccattttcgaaacaaacgaatgaatgaataaaccaacaaaaaacaaacagcgaaagttgtaaagccattgccatcaattaacaaattcacttataaataaaaatgggtcaacaaatgccaaagcaaagaatgcctccgaatatcagcgtctgcgaaagactatttcttctttttctgcactttttcctgctcaattggcgccggctttacaaagggaattcgttgcgaatattgcgatggcataaacggccgcaggggttccggcacgacaatgccatcctccgtctgattgttctccagaatggcacagatcactcgcgtggtgtcacacattgttgcgttcagcatgagcacataattgacctggaattgacattaataaagacctaaaagagaagaaatgcaaataagaaaccgcagaaaagctgaacccaagaacaggacaaatggtcaaggatgaagggcattatccgttttattaattgattgccggctgatcctttcgtttcaaatcactttttacctctccgtccattttcttcgtctgtccgtaccgtattcgtaaccgactcgactggtaatctgtacagttggagcatgaaaccagctcccgaaatgcaccgctgcccgggaaccacgcctcgaggtccaatttctttgccgccgcgttgttcagttcggccgaaacaatggccacaattcggtagggaaggccgagcactttgcaaaactcttcagcattgtcaatcatctgaattttaaaaagaattaaatttactggactatatttccaaaagtccactaacttcgtccatgtgcttccacgattcgttgtcaaatggggaacagatgacaaattgttcgatcttctcgaattggtgcacacggaaaatcccgcgggtgtctctcccatggcttccgaccttaaaaaagtgaaaataaaaggtaacgatgccatgggattaaagaaacaaatattggcagaatatacaaacctcctgccgaaaacaggtggacattccggcatatttgattggcaaatccgatgggttaagcaattcgtcaccttacaaatggcaaagttgaggggagcagaataaatggataaaaatgtacgatgaaaggcggcgattggctgctcagaagttgcgattagatatttctcgtcgggagagccgtcttccttggctgcgtccaaaggttttgcggtggtcccctnaaagnnncttatnctttttaatgaaagttacaagcaaaggaaagaaggtgatttgaaaa

SEQ ID NO: 14680 - DNA, 846 bp, Heterodera glycines
ataagtttgctgccaaacctttaaagttgtagcgctaacacgcagaaacacgtggtgcgctaggagcatcgcgtgcatgaccgtgcggctcgtgtgcatcaccgtttggaacgaacggcggccaagtttcatacggaaccgccggttcgtcaggagggaatgggaggagcggaaatgaaggggaatttatttatgcatacataggttatagtctgaacaatcacccaaagttaaaatatggctaaaaaaaaatttctaatgttttattaacatttttacagcaactgtgcttattcgatcagtttggagtgtagccaccgccctgcacctactgtgtggtgcgaggttggacaatgttctctgtcatcaatctggtaaaaactagcaacaacgacaacaacaaagccaccgcaaccagtaacaacggaaatggaagtggaaatgctgcgcaacaaccgcagcactcacaaccattgcatggaggcgtggactatctgttgggcattggccaaagcgttcagcgtgcgttgatgaattttggttggtgatgatttaacattgacaagagcacatcgcaattgtcttatttgccatgttaaaggtattgaatgcgatgcggaagtgcgtgacgaacgcggcattgtgcgtggcgctgtgccatttcgtctgccgacccaaaagagtgacaccaacgggacaaccaatggcaaaacgaacggtggcattgaaacgcaaccgaaaaagacgacggaaaaaacgtaaaggcatttggcaattttcaaaaggttttccaaattttcagttctgccttttgccctttcgttgtgaatcacgcgcctgttaagg

SEQ ID NO: 14681 - DNA, 3128 bp, Heterodera glycines
cccttagtcaaatagacatttaatgcttggctaccgtttcattgtttttcgtcgagggccaaacatttctgcagtattcaacatgctagtattccattttctagatatatacagccaccatttaaaaaagttttaaattcaaagacataatgtgaatatatgctctttaaagggaaatttatagcggattaactaaatttctgaaatttcaatttatgttctattttattactcattttcattgtctttttcagacttttctcggcacaagaaattaaatagttctctatttatttaaatgctaactttgcataaataatttgataaaaacaaaattttaccgaaaattttttctctcagttgaaccaatggcaaaacgaacggtggcattgaaacgcaaccgaaaaagacgacggaaaaaacgtaaaggcatttggcaattttcaaaaggttttccaaattttcagttctgccttttgccctttcgttgtgaatcaggcgcctgttaaggtcgaatgcaaatccgccaaatgtatcgtaatttcgggtgttatttagtctaattgttaactaaaatgggaggaaaacattttatttatttttttctataaggatatgtattttaagtccgcaaattcgtcgtcccccaacactccgtccgctccgttgccgcctcgtcctgcgttggaccagcagcagcagcaggcggctctgatggctgccattgcgatggcacaggacacggtgaagaagacgcttcccgtcgctctgtccggacttgaggcaacgtcggcggtgattggcgaatttttgtctggcttcgacccgtccactggacaggcggcaaaccgtgttggacaaacggtggtgagcaaagctcgacaaggcgtggaaaatgtacggcacatcttcaaatgaattgaattttacaaattaaaaaatgcatttcctgatatattttctgtcgctattcattcgcattttttaaattgtacaaccgacaagaattgaccatcaaattcttcccattttagctgaccgaaatgttgagtcccgaattcgcggccagcgttttgcagttgccaacgcccgtcgttgtgccgccgacaaaccacggacagaccaacggagaaccgaagcagcaaaccgatgagaagaaaactgcagacaaacgtatggactgacaaaaatttaatattaaaaaatgaacttttttcaaaattgtagactcacccaatgccaacccggacaacaacaccagcatcaactccgaagcagcatcggttgaccaaaatttgccgcatttgatgcatcgtatggaagaattgcagacgaaattgatgtcattgaacatgaacttggccaatcgcaatcgcgacgaaattgtaaatgatggcaaagaaaaggaggaaccgaagaaaggggacaaggcggaggacgaggccaacaaggaggaggaaattgttgtccttaacccatacctttatctgaccaacgaagcaatggaaaagacggagaaggagcacaaagaaaaggattccgctgaagccaattcggacacggtgaaccatttttgtgattaaatacagattgatacagtgcctagtactactaatttatacttttttaaagtttaactaatcgttatccgtataaatggaaacattttttatgaatttaaatatttttcgattcactttcagaccaatgccaattcgttggacaaagaaaagcagccaacggcacccatccaattgggcaacaagcgcaaattgggagacggagtgaacaaagacaacggcgaagaagaccttatgaagttgagcacgcacaactcggaggaaccagttgacaatggaaatggtaaaattcacttaaaaacaacattagctatatacctagtcttaattggttgcaaatcgttttccgtttcttcgcgttgcttgggagtcgatgatgaattgttccctttgccatccactcataattcaatagatattattttttagtatcatacgtctcttcgttctcgtcccgctcctccacgactactatgtcttccgttgaggacgaggaggacagtggcaccaacacgggtgacgacggttggatggtggtgaagaaggagtcgttcaagaagttgtgcgacttctacgagaagcgtcgtcgcgtggagtgcggcggtggcaccgtcgccgctgacccattcgcggaacaattggagcgcgaatttcgcgaggcaacgatggctgacaacaaccgcaccgatgaacgcgtggatgagaaattgacggcggagagtggtgagttgggggagggggataattttcgaagattttttaacttctaagttaggaaatttttaaaaattgggggattatgaaaagttcaatttggtctactaaaataactgaatttacggtttataataaatttattagtccaataattgagtctcttgtttaaaacttaaaagatattcacaattttagcctaatatgctcgaactttctacatgacaaagccatttagtgttttatttccctcaaatgcttcattttgattgctgtatttatttgtagaaccgaaaaaggcagacgaattcgtgaaggaagttggacaagaaccggctgccgaggtttatgtggcacaaattgtggatttgaccaccgaaaaagatggaaagtcagaaaaatcggagaaggtggtacataattcttcagtaaaagagggaaaaggaacattttttaagaccactccctgtgtccattcggttgtgatgcgcggcgtatgtgccggatgtggacaggattttcgtcaggtaaatgcaaatacggcaaaccatttattaaaacaattatttatttttattgttagccaaatgaatttatcgggaactcggctgccattttcaactttgaacaacagcagcaaaagatgaaccagaccgtgcccatttctggttccttcggtttgccacgatgttttcgcacatttctttttaatcattcatgtaacaggtgttgatgaccaccagaaaactgcaaaaaacatctatccgtctttggaactattggttagtacgatggatttagggggggggggtcaaaaagttaaaatcagacaca

SEQ ID NO: 14682 - DNA, 1773 bp, Heterodera glycines
tgcctcgtggacgacttgactgtggatgacctgccctgacccctcggggacagtaggggtccggaaaaattttgaaaatttacttcggatttgttaagagtttattcaaaaaatgaccaaaacttgtgattttagccaaagtgttttacagaatttgtatcaaaaatcgctcaaatattcaaagaatattaggttaacttctagagttgcatcggggccgggaggcgccgccggaaaaattttgagtaagatttgttaacagaatttgtcaaaaataatcaaagttttggttaaatttgcgattttaggctgtttaaaaaaagaaaaaataataatttaagttgaaataatttttattaattaaatttcaaaatataaagaaatttctgttcagttggggaattgaacccaagcgaaaaataatgaaaggcagaaggtttagccaacagaccacatttgaatcgggaggcgacactttttgcggcgcccagccaaagcgccatttggcgacgcagacacttgcggcgttacatttgcggcgcccagtcaaaacgacatttgcggcgcccagtaaaaaagacatttgcggcgccgacattttgtggcacccccatatataatgctcaaaaattaaatctcgaacacccttttgttttccttatggtcataagaaattattttcaaaattaataaagaaccactgaatgaattctttttaaaatatttttcagcggggactttaagaaatcttttgaatttttccgagttcataaattcttaaggcagggcctcgacgggatattgtaaggaaggagttagctagacgctaaagcaagtaaggcggcggttgataagaggcggatttgcctctgaacgaaatgaccgtgctgtaaaagactgtatttccaccccaaggcttaacattttgcccaattattattaaacgaaggaaatacataaaattaaaaaatttctttgttttggggtaatttaattctgcgccgcaaatgtcattttgactggtcgccccaaatgtaacgccgcaagtgtcatcgccgcaagtgtctgcgccgcaagtgtcacgccgcaaatgtcggcgccgcaagtgtcgctttgactgggcgccccaaatgtaacgccgcaagtgtctgcgccgcaagtgtcagcgccgcaaatgtcggccaatcatttgaatttgatcaaaaataaagttctctgattttaagacattatggaaattgcttggcaatggcacattctattttgattttactttctccaccaaatccttttttgtctttgtactcttgaatcatttcgtcatactttttaattatttccattttctctccgtcgtcccattctttgctttgatttgtcttttttccgctgttttctgggtttttagtatgaggttatttaaaaatccatcaaaataaaaatttttgcctataattttgttcaaaatcaaccaaagttttaaatattactatcttagatagcactaaggttttctattagcttacaaattgacaaaaaaattgaaaatttagttatccataaacagtgctatgacaaagtattaaaagtgcaaagaagctacattgtttaatggttaatttatttaaattccaaaaacagcaaataactttttccattttgcgttaattttatttataaaaaaatgaaaaactacgctttcgagacccgcttttgtagccaaaattataaatgcttcttcttcatagcctgctgaatgccagagtcatcata

SEQ ID NO: 14683 - DNA, 2099 bp, Heterodera glycines
agtacccaaaacaataagaaaattcaaattttaaactttggctcacaacgcatgaaattattataaattaattaattatctagcgaatattttaaattatgaatttaattaaaataattcgttttttcgcttttattttgatcactttgtacttttcgttcttcgctcagcacgctcataaacatatgaataattttttgtcaaaaattttctatttgatggttttttgagtaatgccttccctttttgcccagtgccgttttctgccacttatgcgaaaatgccaattgccttttccattcgtaaattttgtgccggtaagtgcccaattccatggcaatttctttctcaatttggaagcgattttcttttttgaaagcatttctaactttgtagctgttctttattttctcaaattcgttaacaattctcaacattttggcagttaactttttctataaaatttctttttacatttatggaatgtttctgagagattcgcccaattccttagcaatttaaaattcaattttattgtaatttcccactttattttcatttctgtttttgctttattttctcctttccaggaatacattaacaattcgcaccttttccattttaacttttgtttcctgcataagtttagtttaaattcatattttaatttatatattttttcgtataactaattaccaggtcattagactgatgatgctcaattgaacttgatggataatcctgctggtcaattgcttctttgctcgtattattttgctcacgaatggacatttcgaacttcagtgtccaaatcacttttacaatttgggcacggtcaaataatataagtgcaaaaggatgcgtattgtaagtgggaaataccttgaaaagcaaccaaatttcaacatcggtcgggcgaattcgaaccaatgacaaatgtaataaaatttaaacgattaaatatgtacaaattaacatactatttttgtctgatattttcatttgatcagttttttgatcatttttccgccgaagccaaaaaaacaaaaaattggcaattcaaatggacaatgctttatatgaaaagtgttttaaaagtgatttggacactgacagttccaaatgttcccttgtctcgaacttttgctttgccaccaaacccgacacactaccactctgccatgagaccacttgctagaaaaaggataattgcccactatatgctgcaaagacgatcacgtcaccactgcgaggggtactgtatcccggtgaaaaatccaataaattagccacaggcaagcggactcgaactttcggtctgtcactaaacccaacacactactttttgaaataagttgagcgaataaagcaaaaattacacggaccaagttaacaatcagactgcacggaaatattgaacatcttggcaacccatctgcaggatatgtgccgctgaattatcttttcgtcgcaggattctcatagagaagtcggtcgatgaatctgttgtccattacgaattctctctcgcaagaataaatagaatcctactgctgccgccttcctcgacatggaagcggaatatgagggcagtgattacaacgatgccgaaaacaactacatgctcggctacgatgaagagggagagaagccgcggtccgtcacgacatacgcctacgcaccagggatgggccaaattgaaaaataaaaagcgaaaagcgaaatttgcgaaactgaaaaatgcgaaatgaaaaaaaaagcgaaatgcgaaaagccaaaatatgcgaaaatgcgaaatgcgaaaagcgaaatttttctacaactttttaatagttaaaatcataaagcaaaaatcatttttttaaattttattccaaatttaaaaatcaataaaacgcttttttgaggcgcgctttttccaaaaaaactttttgggaagagggggcaggcggcgccggcaggcgccgccgggaaaatttttgaaaatttgattaaaatttgttgacagattttcactaaaaaatgatcaaattttgtgatttttatcatttttctaatgagaaataagagttttggccgcgccgtggagaaccgttttt

SEQ ID NO: 14684 - DNA, 1423 bp, Heterodera glycines
  unsure (1)..(1423): unsure at all n locations
cttccgagggtttaacccaggtattgcattttttttctctattgaatttttcattaagacatacaacaacaatgccgtgtttgctgaaaagagcaaaatgatcacctcgatggcttttcttcctgtccaccatctccgtgctggcctcaatgttttgcagacacaactccctcaacaacttattggcgtcttcgattggtgagttttttggaatgttaaatcaatttttttttatcttaaaggttcatggacaattacaccggaaggccgtggttcaatggtggtttgacagtgccacggttcgcacaggaagaatggagtgtgcatcaacggacgttggatggaggagacagaaccaacaattacgcagaagcattccatagaaaacttcaacaggcatttgattgtacccatcctagtgtcttccacttcatcaacacaattcgatgtgagcaaaagtcaattgatgctgacatctcacgatgcgtcgctggtgaatccctcctctaaagaagcccaaatatcgtgccgccgatgcgagaattcttcgacttttgcagggatacaataccatcaacaataacccggctaaccaaaatgaccacaattaccatgccaatgtcaatgttaatcccgataacatcaaccatttgctcgttggtgcttctcgaaattatgaaatgcgcccgtaatttttcaatgctttgttatttttttttgttgttaacacattgataaatattttttgataataaattaaacatttttagaaaaaaatcagaatataacccatgtggcacaaaaacagcttgccagactaaaacgaccccctgactaaaacgtcccctcagactaaaccggccagactaaaacggccagactaaaacggccagactaaactggccagactaaactgacccggtccgctacgcaaaatcatttcccagcaatccggggatttaactacactacggcaacatacgccaagtattttagaatgaaaacaaaaaatatttcatctcatcatttaaccacttaatttaaataaatttattcaaacttttttacctaaggtaatcattgaaattacaacaattttattgttaatcaaatattcaaaatatacataaaattcattttaaaataaaatattaaaatccaaaaatatagatatatataattcaaataggaaaaagtatttacagcaaaatgtataagagatgcagaagcatataaataaatatttaaaaaaatatagtttcaaaataaaatcataaaaaattattcatatcatatatatacataaatagtaaatcatttaccagataaaaaatcaagcaaaatatattaatttaaaagctagtaataccngagaacgtaaattaaatttagtctaatatattaataaattttagtcaaaagt

SEQ ID NO: 14685 - DNA, 1736 bp, Heterodera glycines
agagtcacaatccggcaattaatttcaaataaacataaatgtgaaaaagtaacttttcatgcgaaatgataaatgcacggaaattttaccacaataattatacagccatgatcatatgtgtgtgtgtgtgtatgaccgaccacttgcttaatgacacctgcattgagaaaagtatgagcaacaaattataaaatatgtaattaaaaatttgaataaattcttttcttcaatttgaaaaaatgtttttcttcaatttgaacaaaaattcttttcttcaattcgttattttctattgtaccttaattcaagatttttgtccttaattgacaaatttatcttcctcataatgacctctttgaacaacaacaatacggtggtcaaatgaatgttaaaaataatgtttttaaattttttcaaaattattttagttctatttgacattcaaagatgccaatccgagtttggcactgatctcaattgcgctgcaattgttgtaatcatcgctctgctcgtgatcgttttcaatgtttctgtcatttttgtaatagttaagacaaagtgggtaaaaaattgaaatcacaacaattttttttaccaaaatctatttaaaaaaaattttaattagggcattccgtgaccccatcaattacctcactttgctcattttttgaattgcttcatcaacaagtggtaatcttaaaaactaattaagtgtaatataaaaagttacttttccgtaaaactttcgcatttcgacagtaaaatttaaaatttaagttttgatttttgtaaaatttaaattttaataattttacaggtgggatttatccgacaatgtttttcactggaattgacagactttatgtcgtaatttttgatgaaatgtaagaaaaaaatagcttatttaattttttgattaccatttttctaatgtaatgtcaattttaatgtggatccgaaattttataaaaatttacaaaatttttaaattaatattaaatgtttaggtatgccatctgctgatcggataaattgccgggcgtttccgagcacttttttgcatcatctctgtgaatatcggtggctaaaaatgttctcgctcgtctcgaccgacttgaaaagatgttagaagggtcagggaaccccacattggtcccagtcatcgaacgacttgaaaagttagaaaagttagaaaagttggtggaacggctaattgcgggtgagaatcggtatgggaatcgatttgctgacccccagcatatctcatcctcaccatcggcacacacttccaacaacggccctcaactccaatggggtcaaccgccgcccttcgctgggaatggcgctgtttcgcgtatgataaccgacgcaatcatcaactccgagcagcttaaggagaaggcgaaccgggcagtcattgaaaaattgccggaggcaatcgacgaacgggcattggtggagcaaattgccgatgaatgcggggtcaaggacaaactgtcgtcggacattcatcgccacccaaggacgcggactgatggaggggtaaaaagggaccgaattttaaaagtgccatttacggacaaatattcgcgcgataaattcatttataatttccgtaatgctgtaaaaaaattgcccaatgtgccccaacacatcaaagttcgcagagatatgactcaaagcgagctcaaaatattatactccctccggcaacaagcctatcaggccaatattgc

SEQ ID NO: 14686 - DNA, 2635 bp, Heterodera glycines
ggtaaatataaattcccaattttgcgtgttgctaattagttccaagtttgcttaccctgaaattgtgtttgggtacaattatatatccaatttataaaatcataaaaaccttccttttttaaccaatttaactgattcattttcagatctacatgtatcaactgttccgggcattggggtacatttttttcttcatctttattttaatttcatcatcccccttcaattttttagttacattcacagcattggcatttgtcatcgggacataaaaccgcagaatttgttgctcaatccgcaaacatcagtattgaaagtggggcatttaaaaaaaaattatttttaatttttcaccactttttagctttgtgatttcgggtccgcaaaaacgttggtccagggtgagccgaacgtcgcctacatttgttcacggtcagttaacattttggcgttataagggtttttgcgtaacaaaaaaaatcaaaatagttagctatttttctgccaaatttcaggtattatcgcgcgccagaactgatttttggcgccaccgattatacgaccaaaattggtacaagcaaaccaaatattattgtagttttagcatatattttttaccaacacataaaaagggtgcaattttttcagatgtttggtccgcgggcacaggtaaaaactaaaaattaaaaaaaagtttttgtttctacggttttattaaattttcagtgcttgctgaacttttgcttggtcagcccttcttccccggcgactcgggtgtgtttgtactactactatttgaattgtttattagttttgtaaaagcattttgggttttatgggaaaaccccatattttttaatttccgagattggtctgggtcaatttcgtcccgacaaaccccgtaccagtcaagattagggcgcgacatgatcttttgctttattggaaaaccaaatccagcaaaaacctggtgtcatttgaaatttttgcatgtttgggagccaaccattaagctattatttacaattagcactagacattttaaaaagtagcttacagcatgacaaccataaaatgcagcttttgcatttgtattttttagagagtatcaaaaaacaacaaatttctatttgatttttggtattactatattatctatataaagtcttttacactaagcgctttcgacttttatatttatgttttatatattttgagcaggtgttgatcagctggtggagatcatcaaagtgttgggcacaccgtcgcgcgatgaaatccaacacatgaaccccaactacaccgaatttcgcttcccgatgattcgaccgcatccctggcaccgggttagttcaaccttcattcattttcgtgataagagaactacaaaaatatacactaaaactcgagaaaaaattacgcatcatttccagttatcaaaaaattagttttcaagaatttatccattttcccgcaactaatttttattttggagatttgtgttgtggtacagtgagcaaaaaattatttgtactgtggactggtacaaaaaaaaacaatccgatactcttcattagtctaaccaaaaaaaatatattctggtatgggtcgatccgaagattttttgcttgacatctcattggcataagttttccagaccaattttcaaaaaaaaaaatcgttggcacgaaaataataatgaatgtgtttggttctgctgtttcagccaggaaaaaaatttttactttcgagagttatggggacactcattcatttttggatttttttttaggtgttccgtgctcgtacgccccaggaagccatcgatttggtttcccatctgctcaagtacacgccgagcgttcgtccttctccgttcgaggcgttggcacacgacttctttgacgagttgcgctcgccgacctgcaaaatgccgtcaaccggtggcccgttgccgccactgttcgacttcacggagcacgagctccagattgagccccgtctgaacgaaaaattggtgccaaagtgtcagtctgcttccgcctcctcctcattgtcggcgacgatgccaaagacgtcgacggcgccggacggtggtggtgccaaacagcaggagggggtcggtggtggagtggtgaaaacggacgaatcagacagcaaacagcaggtgagcacattgggggagcatttgtggtattactaaccatatttaataataaatccccccgagagttcaatttttcaggggctttattagaggggggcgggtcactaaaacattttttattagtcattaaaaagtgacttaggtttttggttgtttttctatttataaggtatagggtccaatgaaaattgaaatatacaaaaaaaatgttttaatactaaagaaataaaaggaaattcctttgcattcccatttttatttttaaaaaatgaggcttcatttttcgtttgtttgtttactttttaaaccgtacattaatatgcatgagttttgaattacatattgcccccctccccctcttcccctctcgtgctgctcacaatcagcgcattcataagcattagtattttgaaaatcaatcattacgaaaagcattggccaccaatttgcacttcatatctatgagtc

SEQ ID NO: 14687 - DNA, 914 bp, Heterodera glycines
taggcgagtgtagcgacagcaggagcaggcaccagtgatcgtaagaaatcggacgcggcggcatcgcttactaccggcgccgtgccgcaattgtcgtcgtcgggcggcggaggcgttgcagcgcaaccatcaaaaagtagcaacaacaacagtaacaccacaacggtgactacgacagcgacgccagcagcgacgacagcaccgaatgctgcgcaaacagcttgagaaaacttcttctgttcagccccctttcccttcctcctccttttctcccccacctcccctcttcccaccacgccagcacctctctctctctctctgtcgttcgctcttttttgggttcatgtgtgtgttccctgccctctctctcaagaccggaaccggatgctgtcatctgtctgaattttttgcctggatacaaacccaaatccgttaattttttcattgtatattcgcgggtttgggtcacaacaaacaaaaaaaatttggaatttttcaatcaaaaagatggacctgtcgggtcgtttccaaaaaagaaaccctctctatcgcaaaaaaatatatttattatgtgtgtttggttttaatccagaaatccggtccttgctgttcctgctgctgctggtcgtgtgtcccccgaatccagatcatgcattgatcaaacaatgtcgcgtttgttgtccaatcattttattattattggcacacacacacacaaaaccacaatttattttctcgtcttctgtgtgattattatatgacaaaataaaagaaaaaggagaaaaaaaatgcattttgtgagtcattttgttcgcttcggaattattgaaagaatttgttaattgaggtcatacattttatttattttattttatagcgacatttttgcgtggcatttaaaatatgttaggcaa

SEQ ID NO: 14688 - DNA, 1514 bp, Heterodera glycines
atttaatcaaaataattcttgaaaattacaaagatttctcaaatttctttgatttttttttaaacttttccaaatgctcattttcaaggacgtccttgcatacaaggacattttttattttcaagaaagagggcccaatttcaaggacgtccttgccattcaaggacggatcccatccctgaaagaaaatgaagtacttgatgaaatatagacaaaatcaatgatttttcaaattctggacacacatttcagttccgcaatcagtgtattttttatcctagaaaactcgaaaagaaatttttaaatttatttttcgtcgagacactacttctctagtattaacattgataaaactgcgaaaatattttaatgtgctaaaaaaattgagcgaagcaaattcgtttttcgtaatcctctcgtaaaatatttatctgcaaaaaagcgaaaaatatataagtcccataaaattagaaatgaatggatcgcgtgtagtcatactcaatcgttggaatgacggcctaaaatatgaaaatatgagagcgtgaagaatatgacaatcactaataaattacctgtacaaatttaaggaaaataaacaggtagtcgagaacattcagttctttgccgctctcggagtattgctcgatgagatgcttcatcacagaggcatggtggcacgggtggatggtggccaggcaaaggttgaccacgtgggggtgcgactcgagcgtaattgtgcggtccttgtggtccttcaaatgaaaagtccgcatttaaaatgaacattgaaaaatacattgtcattcgacctgtgagaagtcctccttcatctgttccaccgtcaaaggcgtgccattctcatcatagccaatcaaccaaaagcgtggaacctaaagaatagttgagataatggggcgggggaggtggtccaagggtcggccgatgatgacagcgccaggggaagtttttaaactttttagttttttccgaaagatcaaagtttccaattttatggattcttgcatcattttataaaaaaagaaattgagtccggaagtgataaaggtaggcagtaaaattaactaatttttaattaaaaaaattattgagaatttaggatatttttttatataaatttcctattctcccgtgcaccgtttacagccccggacagatatttctctttttatctatgtgtgtgaactgtccaactcccgcccgacctttatgaagccccaaccatttcatttatggtgtgatgaaggcaatccttcatcccgtaccacctgatagtatttgtcgtaagtgatgtgtaagtcataggtacgagtccgtaaaatgccgatttcatccgactcattctcagcagcctctttcggcacttttgctacagtgtttgctatatacctaaagaataaaaagctgattaaaaattgcccataattttttcaatgaattaaacaagcgtggaaactgaatgaaatttgttgctcgtcttatctccacacattggc

SEQ ID NO: 14689 - DNA, 1899 bp, Heterodera glycines
tcacccgtcgtgctttttcattctcttctgtgttaatcgtgtccactttaacaaaatgagtttcgttcattcgtttttttgcgattcgcagtgcattttccgctatttatttattttttgctaaggattaagggttttgcgacaggcgccgtttgtgagaattttaaaaattagagtgattataatcggtgttgcgtaaaaacaacattgaaaaaaacttttgggacataatagccattctaaaaatgccattacatcgtccaattcttttggtgccaaattggtttgggtgtcgaaatggtgcgtgtccacccattcgtcgccctcctccttgatgatctgataaatttataagatagatgtagtgcgaattgaggctaaaaatctctcatcaatctctaactgtcttccctcttgttttttgaactctctcggtgtttgttttcaacttcccattagactgtttttgttcggggtatgcgaaaagctgatttcatcccctcaataaaaatttccaccttctccaatgaatcgttgtagttcatttctgaacatctatgatggcatggcacttttttgctgatcagaaattgcttgtcaattggtaaataatcgcgcgctcttaaaaaaagatttaaaagaataaaatgaacagtcgaaacctgcttgaatcactggcctttgaccaaagccaagtcgggcaaaggtggacaaagtgatcgccagctgaattcaccatccattgattacttttagctttttggaggtttaacctgcgataaattcctcaggagtaagcactccagtctcacggaatttggactcgcgcaaaaccggcgtcaaatattcacccacactaagtgcggcacttttaaactgatttaccaggtcattgacattcattcctgtataattattcacggaagcggagggtctattaaaaataaataaataatttacactaaataattgatttaaatttttttaaattaactaacaatcagtatttcgagcaaatttttgtttttgtgaaattaaaaattgctttaagaatttttttaggtcacatttttgctagaagagctgatcgagaataaccaatgttgttgtcagcaaatttccggcatcttcatttattgagaattttcaatcgaattgtccgattgtctcctcactgtgtctgtcagacgacggaattattctccgaacggtttatttcaacttcctttcttttgcgtatgttcattactcattttgtttaattctaattctgtttttacattcattctttcactgttccaaaacttttgttcagcggatgcttttgcaccaaaaaaagtcgtaagttcctttcccatggcttctacatgttggaactgtcccaagttagttaatgctgtcgctttcactacatttttcattctctcagctgttcctttcgaaattttgtcacccgtcgttcatgtcgtcgatgtgattattcgcggacggaagaagaaataaacaaaaacaaaacaatatggccatgttcagagtgaatccctaatatcattagtaaattcctaattgcctattattgacaggtgcaattccattaattacattgacagaaaaacgtgccacaaatgcggagtgtcaaaaccggaaaacgtcaattcgaaccgaggcgaaaccgcagcggatgggtcttggttttgcatcaagtgaagcatttctcagtgttcaattatcttaatcgatgttcagatgtgggtttgccaatcaaccgatccgggatacttgtttttgctgtgacacaatggtcactgagaaacaattgcacgaagttctcaaaaaaagcggcatttgggaatgcaggtatgacagggaaagccgtggggggaaaaactttactaatca

SEQ ID NO: 14690 - DNA, 3111 bp, Heterodera glycines
  unsure (1)..(3111): unsure at all n locations
cggggcgcacccgcgcgactccatcctgcgacctatctaatcattggcatttgtatttaatgatgaaaatgacaggaactgacagaacagtcagacccggaacggattctgcttgaaagcgaatctcaggaaatcggactccgtcagatgggccccgacacgtatgggccccggactataacttttttctttgtcaaccaaatccaacattgttggtattattcgatagcattgaatatcctctattagcctgcaaatttcgaaaattttcgttaaggttcaaaaaagttatggccaaaaatgactgaaaacttgatttctggtgtactttggccataagtttgttcaaaatttacgaatttttttgaaatttggctggctaatagagggcatttaaggctatcgaatgatatcaagattctgtttgaaagctaatctctggaaattggtctcttatcttaaccaatcactccaactctgaccgttcacatatcccgtagtcttcgtgcaccactgtccttggcacgtctccttccaattcgaattgcaatcgccggccgagtcgtagcgccagcagctcagacaagccgttgctgcacttggacagttttttgcttttttgttttgttttcacagttaacttggcatttgttgggtctgacgacaaaatgtttcggcaaaagcgccgcttccttcggccgcctctttctttggcatgaatttgttgttgcacgcgccattcacggtggagcagtagcgcacgcccacgtacagctgactgtacgtcttggcaccattggttgggtcataaatggtcacattgtgtgggtattcaccaaagtaacacctgcaaagagaaaaaagaacaaatggatgaatgacccaattaagtggaataattaagacacgttaattaggaccaattaaggatgtttgttttaagaatggactacgtgttgccaagtggtagaataccgacttgtcagtgtttgtcgacgttgtttgaccatggtaaaagtcggacatgcacccgcgcacaacaccgtactcattgcctgcaaatgccagaaacagtgaaaaaatgcctgccccatttttccgcagctgaccagcagcaacaagcatttccatgcaaacatcggcacacggtttatagtcagtgcccgtcccatcgcacgcgtggaacgcgaaacggtcgggcggcggaatttcgggaagtccagttgccttagcgggaattaattaatttaattaattgaatttattttttggacctcccattggttgtgaagtgccggcgatgcgcaagaaaaacagtcaatggcatcagaaatttggaggaattggccaatggcaatgaaaaacaaaggcataaaaaaagcagcggaaagcatttttaaaaagaaagaatttaaggaaaagtttagaaatggaaccatggaatatttccattgctttaactctttttgggatagaacgacccaattttattgcttggcaaactcacaaaatcagccaaaaagcaacagaaatatcattgcctgacttttaacattttattgtgaaaagcgagattgttgaatcatcttttgcgaagactttaacaataaaaaaaatggaaataaataatttatattaaaatgtttaaaataatttgtaaaaggaattaaattgaattatttttccaaatgtgaaaaagagtctgagcatttttcttgcaatttggccaatgattagtgaatgtaaaataaaatataaaaagctattcaaacatgaaaaaatgatgttggtaaaggaagaggaaaaatgtgattttttgagtatcacaaaatgagaaatattacgaaaaatggacattcactcgccgcaattctttcggccatttgtccgctgacaaacaaaatgaatgctttgtccctttttatgctttgtccattacatttcatgcaaaattttttgttctattttacccattcggcaaatttgccaagtcaattggaacaaaatatacagccaatggacggaggaaaaggcgacgaaatgacgacaatgggcacgaagaggagcagcataagcagaggcaaaacaactgcaacacaaccaacggaaaaagtagaggcagttgaacagctcgaaaatgggcgaatggaagagggacaccaaaacgaaaggggaggacggcacaacaaaaacaaacacagccaaaatgtgcaagaacggcacggacatgacgtgaggtaaggcaaaacgtatgggtggagaaagaacactcatggaccgtaacaagtcagccagggcatccatcatgatcaacaccatatccatgtcacgacgccgagaacgaaaattcatctgccaactgtcaaattgccaccggtgccaccggagccaaaccaggcgagaaactgcgaccaattggcacacctttgccatgtgccaatgtacagaaaagttatgcagaggtaaacagcaacgaatggcaaaaatggaatgtatctattaactccatgacagagagtgccaaaagacctgcggaacggacgaatgccaagatgacagggaagacctgtaattaatcattagcaataattactaaattctttcaaatacttcgaaattaaaataattaaatgcttcgtgtagtttctattaaacctttccaaagattctttcattaatatttcttagagttgtacgggaccgtgacttttgggttgaaaaaccgggactttttggctgggaaaagggaaaaaaccgggacttttcccggtcccggttaaaactggtcaaaatcgggacttcggtactcagttgtacgtgtttttcaataccaggtcccgccggtcccgtacaactctaatatttatttcttaattcagttgcattcaatgggaacgaagaaatttttgtacccttcgcttttacgcgacaatgcgatggaaatgcgcaaggacatgccgattatgcataccatttataacacataaataaatattgaataaaatacaataaaaagagaaattctttgtaattagttgggctaccatttttaataatctttaatttacgatagggtttttcaantaaatcgccanaaaaaattatcagtgt

SEQ ID NO: 14691 - DNA, 2574 bp, Heterodera glycines
  unsure (1)..(2574): unsure at all n locations
aaaagatgattcaatatttcaaaattaaagcaaaaaatcaaaaaattagcgacaaaaaaattgccaaaaaattggaaatttcatgtcgaattcttagaatgtggaagaagaaactccttgaaaattagataactggttattaattgttcctgtaatggattatatacataattgaaattagttttaattttgtttatttcttttttttctgtgtcacatttccttaatgtaaggatcatttccaaaaacttttttttaaatttttctgatgaaattcaataatttttcaaaatctcaaattcattaaattacttttttgtgatttaaagatgaatcagtcgggatttcttgtagaaattaagatttcagcaatctttaatctgatctcgcatttagaattgaaaatagtgataaaatagtgaaaaaagccagtaatagtgacgaatattaaaaattcttgtcaagaaaatgaatttttgagaaaatttttccatttcgtaggagtgtatttttgaaaatttttgcgtcgatttttaggggtgtatttttcttaaatttttgaggtcgatcgatacataggggtgggtttgtcgtttttattgcatttttattaggaaattttccaaaaaatgtcgaaatagtgaaaaaatagtgacaaaatgccaaatagtgaattttaactattttagtgacgaaacaccaaaatagtgatctcaagtgaccgatagtgacatcagaatccaaaaatttcaacgcagaattgcgttttttgagctcctttcttcaaaacaattgagtaaaaaaagtagttaaaacctaaaaattgcaccccttactttttatctctcgttcaataactttcttttatttctatttttttcctttctcacattctctcttctctttctctctctctctcactctctctttctttcctctatataaataaatatatatatgtatctttctctctctctctctctccctctctctcctcttttctccttctctctctttcatttctcgctctctctctctctcgctctgttcgctctctctctcgttctctctctcctctctctcgctttctctctctctctccctctccctctctctcctcttttctccttctctctctttcatttctcgctctctctctctcgttctctctctctattcattgtttctctattctcccttgtttgcatgaaaattcacagcccatgttattaagcattcgctaaatttatgcttcaatggctcgacaattataaataatatttttgtcattttgctgcctagtgtcttatcatcatcatcattttgccacacgcctcaattgatacatcatttatttcttatattcatttaatactaatcatattgttatacatttattgcccctaattagtctaattatgcttttccatattcttgttctcttcattgtccagcttcagaacgcatgcattgggcaccaattggaattgcaggaggaaagaatctatgttaaaataaatgacggattgttacgccccgtttttgtgggtaattacccacttgacccgccctatttgtatgtggacgagtcggttcaatttatcagatctgttaattatgaaagaattgtggaatttgcaaaaaataaattgggcaccaataaaacgaaatggtcgcaagaaatgaaaggcatcattcaaagagcaacaaagagcatccaaaaagtgccttcaactagtgctacttcattattaaggcaataaatttatacgtaaaggtcctcctgaaccggaggcttaaaaattctgaaatttttaagccttttctgagaatcctaaattcaattagcagcctcgcctgaccaactgggtgtaggaaagggatattcttctgatttcatcatactaagagttatattctttgtataaaatagtcaattaaatattcaattccacttacagtttcttgcattaccttcgattcaacagaatcttcgagtactgtaatgaacatgaacatcttggtaaggaatgccattatttttacattgacataattggcgaagacaacgatgacggcaaagtcagcacggagtgttttaagcttttgtttcacaacccttcaccggctcaacgggttcaagaaaatctcgccaatgaatttgtcatcaaagaactgaatttgggcattttgttggaacagcacttaaaattggctaaagagaaaataaaatgcgtaacggtggagcagggaattggcaaaatgggtgagaaagttgaggcagaaattggcaaaaaatgccaacaatggggcaaaaaaggcattgacgaaaagcggcctaaagacaggaagcgatgggagaacgagaaaaaagtggtcaatgggggttgaccattttatgcaaatgtaattattatttgaattgataaatatgtcaaggtccgaacatttaaacatataaagaatttaaaaatttgatgtgattattttttatttcgaatttttgcttgtnaacaaattttggcatgaaaattatgttcataattgggtttttcattggcattccgttgagct

SEQ ID NO: 14692 - DNA, 933 bp, Heterodera glycines
tgaattttgttcataatttgcctcattacaatatctccttctctgttatctttaatgtaagagaaatttattttaaaatatattatgtccttgtaaatcagaccagtttacccgtccttggaaaatgagtttttccaatgggagcccgggtgtaatcagatctaccaacgtcggcagaataaatgttatgagcagcttcacgttgtcgatcaccaatgtcatcttcaaaaattttgattcattgctctaattcaatttttggtatatttaaattagggttaagccccgaggcgtcggggggcaaaatgtcgggggccggggacctcggggggcgattgaccaaaattttattttaacgaaaaaatcaatttttatttttaaatgctagtaaatcttcattttaataatctaatcaaattcattcgttggcgccagtaaaagtgcgtccaatttggcattttataacatggcattccgaggccccaaaaattttcaaaaatcgaaatcagaattccgaggctaaaaaatttaatcttaaaaatttgagaattttagcggtgcgcttttcaaaaaactttttgaaaacttggggagcgggaaatgtggtccggaggtgacgataggcgccgccgggaaaattttgagaattcgtgcaatttgataacagattttgcccaaaaaataaacaatttttgcgatttttgcacattttagtaaaaaaaattggagttttggggggccggcggtgctgataggcgccgccgaaaagtttttcggaatttctaattaattttattaagaaaagttgctcaaaatttcaaaaattttcaagagtccccaatttcccgagttagtgtcggggggtcgggggataaaaagtcggaggtagggggctcggggtcggagagcaaccctattataaacccccaaaat

SEQ ID NO: 14693 - DNA, 2831 bp, Heterodera glycines
cgcccgtcctgaggccgcgaagcggccgaatgttccccacaaaattaaaaaacgggcgcgaagcgcccgtcctgaggccgcgaagcggccgaatgttctcaataaaattaaaaacgggcgcaaagcgcccgtcctgaggccgcgaagcggccgaatgttccccacaaaattaaaaaacgggcgcgaagcgcccgtcctgaggccgcgaagcggccgaatgctctcaacaaaattaaaaatgggcgcgaagcgcccgtcctgaaaccgcgaagcggccgaatgtcccccaaaaaattaaaaaacgggcgcgaagcgcccgtcctgaggctgcgatgaattgctaaattacatcaatttctagcgacgcggcgaagccgcgtccctgagcgcgaagcgctttccccacagcaacagaaacaaaactgttcacaccatagccaactgtgcaccctagtttatattaccatagagaaaaagggggactcggcttaaaaactaatttgagtcgaacggctgtcgggaggggtctgaaagtggtggaagggtcttacaactttttgaggcgcatctgggaaaaatatgggttttccgctccggtggacggttcagcgccggcggcgctgaaacggcgtgaaattttttttgtccgtctttggtggcctgtaactttgcgggaagaagcgggagcggaaaatgcttggaggtaggattttaagttggactgtttggcaaaacttggcgcttatttggcggggctatctgtaaatgccaatgctgcagaaaatggcaaaatttggcacccaatttcggcattttccgtttttcgggaataactcgctgggggttaagcggagcgggttggcgccgcttgagcatttgtgcagtttttaaagctgcatccgatggcgttttcagattttgaaaattttcaaaatttttcgagctaggccccctcgaaaatttttcgtttttgaattttattattttttgccgatttttcccaggaaaacggagaccactttcaagcaacagttttttgagctctatcgattggtggcatttttgaaaaaatttcaaaattttccggaaatagaaaaattttttggcctgagcgggacatttcagtcccgggcctataactcgtcagcggttgattttagcgtaaatttgtcttagagcagttttgtagagaattttaagctctatctaatgtgctttatccggtatttttatctttaatataaaaaaagatataaaataaaaatgaattttttaatgcaaaaccaaaggggggaccccatggatttgcatttcgtgagaaatttttttgctcctaaaattgccaaaaaatacttttctggggtagtttgaggtgctgaacacgaatatgcactttatattgcgttttggattttttggagggaggtaaaaaaattttgaaaaatcaataatttttggcccttgaaaattcaacctaaattataaaaattcataaatcgcctgaatgtggtccaatttagctcatttaaagcataaaaaatagcaaaaaatcgggagaattttatgagatttatttgaaatttatacctcaaaaacaaaaaaagttattccagaaattctggaaattttcgatttttcagaaaaaaattcagaactcggttctgtaaaggtgtttttgaaattttaaatacttaaaaaatccgcaattttttgctctattatataaattttattcgacctttttatcatcttttaaaataaagatacaaaaataaaagtgattttggcattcgggaccaaaggggggtgacaggatttttgagtggaaaaattttttcaccgaaaatattccaaaaatatgtcttttgggccaatttaggacgctgatcacgaataagtgatcagattttacttctgacatacttaacacctcagaatccctgtgtgattggggattctgggtcatcatttttttgggaggggggaaagttcgaagccgggcggtgtatattatttttctttgtatttttggcttattttacaatgcttttaattaatttgaagattggttgtaaattttaaatttttttttaataaataatttcattattattttttatctgtaaaaaataatatcatttcaaattaaatgaatattcaataaataatttccaacgttgtttttaattaataactaccatttttttcattgttttatttatttaaaatattttttattttattaataataaattatatttttttatttgaattaaatttttttttataaataaatgttttgttttaaaattaattatttatttattttaattaatttaatattgtttgttatattaaatgatttaatataaaattaatttcttatttatttttaaataaaagaaggaatttattttataatttttaaaaaattattaacacattcgattttaaattatatttttttataaaaccatttgcttatttatttaattttgaaaccatattttacctttttaaactattattgtaccattcctacaattttagtacctactaataactgttgtactcttctaatcactgttgtaccacttctaatcactgttgaacctcttgaacctcttctaatcactcttctaatcgctgttgtacctcttctaagcactgtcaaaaattatgtatttaaggccctttaatgacgctgatcacggatacgtgattagttttcacttttgacatcgttaaggcgtcagaatccccgtgtgattggggattctgaggcatcaagatgagggggggcagattcgaatccggacagtgttcattat

SEQ ID NO: 14694 - DNA, 1375 bp, Heterodera glycines
ataaagcacagtgacaaagcattgactaaatgaaaaacttattttcattaattttctcaatttgtcccctcattaaaatttacgattttatgcaaaaaaatgttcgctctctgtgccgcgtggcatgcaaaagcgaccgcgcaattttgtccgccgtctcttggccttcgtccgccgattgttccacggcatctttcgcagcggaagtaattgcgtggatttgaaagccgaaaatgaaataaaatattattaaaaaaattaataatattgacaggaaaaacaattgccattgcgcaccggtaaaccaattgaaagagcgccacaaaaagaggggaatgtgaaaagagcaggcctggagggccaaaaggaaaggcacccactgaaaaagggaagcgaacggagggaaacgaattaattgtgattaattcattttcttttataaatattctacaatttcacttttattttctttcactttccttccccacttaattatgtaattactcacaacaaaaaatggaaatgggaaagtgagtttgataaaagggccaaaaggggggggcggcgatttatcgtttattttcgatcgcgcaattttgtgggacgaaaggaaatgtgggagaggggatgataaatgaacaaaaaattaaaattgacaaatacaacgaccgatgagagaaggggagggaggggagagaattggcgagcattttgggcattaaattcccttctgttggagacaaccaccaaagaatgaatgaatgaaatggatgaaaaatgaatgatacaaataaatggggggaaacgaacgaacgattggtggccaattagagaaaaggcacacaaaatatcagtttcatatattatttttccttttgaagggatattttaattaaaaattaaaaggcaccaaatttatttgtaaaaatgcaaaataacacacaaaattttcatttttataatttcccatattttaaggtggttataatcttttaattaaaacaattacgcaaaatggtcacccaaaacgaccatttgatggcaaatttgtccgaccaactcacaaatctgcaaaaggaattggacacactgaaaaaggacatgacggcgaacaacgacgcatttttcaattgtgccatggcactgatcatttttcgtatgccattttttattaattgattaattagtctattgattctttttcaaatgctaattagtgatgcaatgcgggttcgcctttctcgaagctggagcagtgagaagcaaaaactgcacgaatattatcatcaaaaatgtgcttgattcgcgtgagaaataaaccactcactaattatcaactaattatgtcttcagttctcggcataattgcttatgc

SEQ ID NO: 14695 - DNA, 1523 bp, Heterodera glycines
  unsure (1)..(1523): unsure at all n locations
tcaaagttcttcttccaatttgtgttctgtgccactgcctccaccatcatttcgggtgccgtggcagagcgtgccgagttcgcctgtttcatcacttattccttggccatcaccgccttcgtttaccccgtgcttacccactggggatggacgaaacaggtaatggccaaatgttaatttatccttccctttttaagggttggatggcagccagcggatttgtagtcgacgacgctcaccaagtcacttacgtggactttgccggctccggaatggttcatgtgtgcggcggcactatctctttgatcgccgccgtactgatggggccacggatcggacgcttcccggagaggacagtcagcgtgccggtggggggaccgaggcggaagcagaaggagcccaaaagtgtggagatcaaaggccattcagtgccggtgactaacgaacattttaaagaggaagcaaattaaaatgcaaaaaattcgaatccgatcaatatcaaaatttttgtgccgaagtgtccagaatttatgcaaattaaattggcacagttcgcctctttggggggcttcattctgatgttcggctttttggcgtttaatggcggctccaccagtgaaatttcctcgccgggcattggccaaacagtggccaaagcgatggtcaacacaattctgtgcggagcattcgccgcactttcatatttgttcgtccatttcatccgaaagggcaaatggaccgttctgttgacgataaatgcatgtctaactggtattttaccctaattgctaattaatttcttataaatttgcaccgattaggaatggtcgctgcttgtgccgggtgcaaccaaatgtgcgaattgcaaattgctttttgccagtcgctttaacccattaaaatatgcttttaaggcccgcatggacttgcgtggtcaccggctctgttgccggcatggtctatttgctgctggccgaactcgtcttggcacttcgcgtggacgaccctttggacgcgttcgccgtacactttggcggcggactgtgggggcttgtctcggcatgtcttgtcactgagcagggcattctttacgcatttattggcgacgtaaaaatgaatgtggcactttgggcaagtgtcagacgccggtgaaaggtaaagtaaaaaatcaattcagcaattgttgtggcaaatggtttgtgccgtggccattattctgtggtgcactttgactatgacgcccgcctttcttttgctgaaagcatttggcaaaatgcgcgtgccacgagaagtcgaaattcgtggcttggacatttataagcatggcgaggcggcgtatccgtcgacagcttacggacacggatgggatgaagcggcagtgaagccgaacgtgaaggaggagctgcgcaaaatgagcgaatatgcggacggtagggcaagaagcaaaagtagggaaattttaggnggcaaaaggngaatttgtcaattgaggaggagggagaagggatttgaggggggggggg

SEQ ID NO: 14696 - DNA, 917 bp, Heterodera glycines
agatttgacggctttttgtggaacagtgccaattgaaccaatgtatggaagccaagcattcactcttcgacaaaacccacaacactatgaacacccggagcattgggagagggcccgagagccgaacatttacaaaagagtgagagagtgggagaatgattactgtacaaatagggattactgtaaccacagttttacaacaccaaagcgaacagtgtgggaccaatggaaggacactgacaaatgaagaagaaaagacgcaaaaaatgagcaaaatatgcaacagtgaaaactaattcagtgcataataataaatattataacaaataaaataattcatttaaaaatatttttataaattaaagtgaaaaaaagaagagtttaattattcgtggacactttcaaattgcaaatagacaaaaaagtgaagaagttaattgagaccatttaatcccttagaaaggttaaaatgactaaatgctcctaattttcaatttgccaaaagtgactaaattcaattattttgagtcaaatttttatttttgcccacctgataataggccacccttttctgtcccctcatttcgtgttcaattggaattgattcgtccgtacttaaaatttggaagcatctataaggaaaattacatggaaaattaccgcaggtaataagtgctttcgacaaggcaataatcgtgcgcatattgaacccatccggcacggaattcagctttggcaaaacaatttatggcgctgccaatgtaaagctaaaggaaggaaaagcatagaaacaaattaagaaaatgagaaattaaagcttcgcacggcttattgggttaataaagagattcaaattattcatcttgtgcacaataaacaaataaattaaacagtttttcatttgttttccatttttg

SEQ ID NO: 14697 - DNA, 1314 bp, Heterodera glycines
  unsure (1)..(1314): unsure at all n locations
ttttaattntaaaattattgaaatcccacnccaaaatcttaaaaatttgtacattttaacaatgaaagaggctttaaaaaacgccgagtttggcacgttatgtggcaaaattttttgtttttatcggaataattgccgaaaaaatgctcaacattcaacctcctataaaattttctaggtttttattaggaaaaaaacttcgtttcgcattttttaaaaatctgacattgcaatgttttttcaagggggaatcgattatgtttgaaagtagcaaaatcttcaaaatttggtgcattttagcaattggaataggttttagaaatgttatttctcttaattaggtatacactattttttaaaattcctcccccattctctcaaggcctcgagttttgctgtacggagcagttctacatgtactacaaggcacgcgtgttcggcgacgaggccagtgccgtggccattctccgctcgcaggacccaaaagccatcaaacggtttggcgcgcacatccgactgttcgacacggccaagtggagaaaagtgtccattttggtaggtcggcattttttaatttaaaaaattccaaactttgcggcaagggaaagggaaaaagattcaaattgatgggtttagtagagtttttgtccgatagatcggtaaaattttaaaatcatcaaaatttttagattttggaaccaaaataattcgtgtccacatgccctttctcctttgccatcctaaatttccatttcaaaatagccaaaatttaatcattttctaaattttgggtattatttttttctggtgcattaaggccccctttaaaatttgtcatgctattttattataaaaagtttacctatttttttgttatttaattttttaatttttttttgataatttcttaagtgaaattcttcaaattttccaaatcggtttgaaaatcaaagtttatctatgggttcattatactcacaatttttgtaaaatataataattgcaggagatgctaatcggcaattggaaaaaatacgagcagaacccaatgttgcgccagtttctgttcgaaactggggacgcgtggctggtcgaagcgagtccggacgacatttactggggctgcggagtggtaaaaacattttttttattttttgctttttcattatttcttggaaatttttgaagaattttgaggggaaaggaaaactgtgtaattgataaaattcaaaaaaacatttttctctatttaattgtgtcatattttttcacttacgcagaattttactggaaaaaattatgagaatttgaaag

SEQ ID NO: 14698 - DNA, 1830 bp, Heterodera glycines
ttaaaaaacattaataatttgtcgaaattttcttctaaattttcttttttttttttgaaatttctgtgattgaaaattacaggggcatggctcttcccactccactctgaaaaaaaactataaaagttgaagcagagtaatctcctttttcacacacattcatcccacctcacgcacagcatgtggacaacacggacctggtgcgggacatgaacaaatggcgcggacgtggcgccaaaaatgtgttgggccggctgctgacccggatccgggacacgttcaaggagcgcgaccagttcaagcacgagtgggcagaggtgcagtcgaagttgcccgaattgtatggcatcagcagtggcggcggcggagggatgccgagacggacgatttgaatggacggagtgccaaaaagttttcgattgattatgccgtactcaaactttatttatggcagtagttcccctccccttcgtgtgtttatgttatatttttccccattcgtccaccattcccattttagtatggcgttttgtgcgtgtgtctgtgttggcattttgcccattcattttactcaaaaaaacccaaattctccttctccaataaattgcaaaaaaaaaatatattagttttttttaatttttgggcgttaatcaacgccatttcacatatctcttttttgttttactaaaatttgttatttatttacaattttgtgatcatgtttagctgtgtttttgccagcatggttgcaagagagaatatttctgaattcttcaatcagcggttgccacaaatgccggacgaagtgcggcattatttgacaggtaagagggcgggagcagctcgtttccccccccccccgcatcgtttccccccgagaaaatttttttttgcgctcttttcgaaaattactaaaatttctgcaataagcaaatttctaggtatttttggacgctgggcttgaatatggcatcattcatttttaccaataatcccatgacctgaatgtgaaaactcgatagaatgtgaattttgaagaatttaattttttgatcaaattcgggtctgtcgtttagaaatgggttaaaattatcatttcaagatcagcgaccctaaaaaaagctccttccaaagcactagtcttgccaaaagcgggacatttgcccagtttccgtcatttatatgttttgcagatctgctcaaggagaacgaggatgacatgggaacggagcaggacctgacggaaatggtcggagatcatattcaggttggacaattaaacgaatgttgatgaaaaatccaaattaaaatcccattttccttgtacagcgtctggcatgaaatttgctgacttgagacacttttaaataaaattaaaaaaatctaaatcgaattatttttctctttattttcattgaaaaacccgtaaaataccgaaaaattaattaaaaataaactgatattttaaatctatgtataagaattgattaaaaatccagaaaaaatcttcatagacttgtgtgttcttccattatcgtaaaaaagtcaatcgaaaacttccctaaaatggccataaatgttgaggtcggggggccaatccccattttatttttattcatccatttgcacttcaaaggcatcgtccgtggacggcatggcggacacggagttggctgacctttgtgcagcactgttcagcctactcaatgacggacgcaataacggcaacagcagcaatgggaacagtaatggcaacggaaatgccgacaatggcaatggcggcagaagacagcgcggcggcggaggcgtggaagcggcacgcaaattgct

SEQ ID NO: 14699 - DNA, 2580 bp, Heterodera glycines
ttttaaatttaaaccaaccgcacaaagtacaagaaagaccttctaaaaaagcttgaagttcaacaaaaaatgcatttttttttttgaaggctttttgttaatgagaatttgatgctttttattgggaggaaatcggcggcaatttttgagcggaatgaatgaatgatttgacgctccaatttgtgcccctttatatgtttttttggcttttgctctcctcacacccatgccattagtaatacagtttttgtgaatggattaaaatgcatgaaaatggcaacgtattatttattggccattagtaacaaaaatctgactgaaattaaaaaaaattcaaaaatgctgaaataaatgtttctcccccgctatgactgattggtaaacaaataataaaatggcatacatattagtcaaaaaaaaatcacaagaataaatttacgaacaaaaaagttgcactaataatttggaaggacaaagaaaattaaacgattttgaattttataatttttcaaatcgaaaagattaaaatcactttaatttatattattgaaataataacatttttaattcatttattggtgttcatttatttatgatttttaattcatttattggatgattattatttttataatcttatttatttaattaattaaaccattaattaaaaataaattggtaaatttactaatttataaatcagaaacattgttttattgcaataaataataaaaaaaatattagaaaaatataatcaaatttaatcaacgttcataattttcttcgttgagttttcattgaaaaaccatttgctaattatgcaaaactgtaaaaacactcaaattagattgaaatttaaaaatataattttatttgggtgaataattagtctcgattggtgaaatataatttattttgcgccgctaaaaaaataaaaaattaaatttactattaacataaaacttaatgcaaatgaacatgaaaaaaaatcggcgaagacattctgacgaatttcttctttatcgtgtaaaaaagtaattagaaacttcaattattataaaagaaatgtaaatatacttttatttggttgactaattagtctcagacagagaaacctaattaacaaatttgttatttgctaattagtctccaatacgaacgtatttaactaatatgccaaagacatgttaagaaaatggattgaactaagcagaatggacaaaaatgagtgaaatgccaatgttcgacactcaaattttcctttcaacttaaatttttaaataaaatacataaaaaaaagaaacaagaaatgaaattcctgtaataaaaagttgaagaatgttttttttaagaatttttttaaagaatttaaatttattccgcaaaatcattaggcattagtgctacattttgttttatgaattttatttctttgattttcttctttgcttgtctcttcatgttgcatcttctttccacggctcatttcaaggctgaaaattgggcaatcaattagtcgatctctaactatctggattcccttatgtctcctcccttttccacactatctctctccatctctcgttttctcatttaaacagtccccccccccaatctctggtcgatcttcatctatctgtattctcttattttctcctccccttcccacacactctctctccatctttccttttctcattttaattccccaatctctggtcgatcttcatctatctgtattctcttattttctcctccccttcccacacactctctctccatctttccttttctcattttaatcccccaatctctggtcgatctctaactactggattctcttatgtctcctctcctttccacacactctctcgtcatctctcattttctcattcaaacagtccctctcccccccccccatggtgcccttctcaattggataatgccgtgcaacttcaccttgcacacttggacacaatgcttctttgatgggaaattgtttgtgttgccgccctgccctttgtaggtgaattgcttaaatctcaaaaatcagaaaatgggaaaagccggtgcttatctcatccattaaattgtttgattgcttgttgtaccttacaactacggccgtcccaccaccatcgtttgagtgccaagttgcctcttcccacacttttgggcggattacatgcctaattttgaagaaaataattttgttttgtaatttttggaacttaatggtagagtatctaccggcctctggggagagaaaattcggggatcggtcaggaaatacccgacaaaattaattagttgaaaatggctttaaaaatttaggggatatcaattccattgtcggtagaaaattttcaaaaaataaaaaagctaacacatatttttccaaacgattcagggaggaaatcctacttaatgggcccattctttggaaaaagaaccttattatgccacaattatattcaataaaaattttctcgctggttaatgcttagtttactaattttcccaacacagtctctctcccccggcttctccccgctagcactgttctagagtctctgtctt

SEQ ID NO: 14700 - DNA, 1148 bp, Heterodera glycines
ccacacaaagcacaagaaagacggatgcgaaaagctggaagttgaatgatggcttcatttctttttcgagactgaatttggtgctatttattgggaggaaatcggcggcaatttttgagcggaatgaatgaatgatttgacactccaatttgtgccccttttatatgctgttttggcattgttttttctcacaccaatggcattagtaataaatgcattcattctgaaccgattaaaaaaacaaaaaatggccaaataatgtcaatggatgtgagtgatattgtgattgacaaacaaaaaaccccttaaactgtcgccattactaattctgctaggcggattaatgtgtacaatacaaaactaaaaaaaacggaaaatcggcaaaaataaatgttttattgtatgcaaaaactttttataaaactattattgaaaaagatatttaaatacctatgttaaatttagtaattccatcttaaaatttcattaaaataattagttaaaaagaaaatgccaactaattaatttaaagttcatttaaaaaataatactcttcaataaattcaaaaatttaatttagaataatttttatttaatttaatatttatttgctaatttatttatcattaattgtttatatcaattcaagacatttttgggtatggcggactgatcaatatccgattacaaaataaggagcaatggcgagaagtgcatttgatgtgatcatggattgcgaaaattgcgacttttgaccgattttttcctgaaaatcggtttaaaaacgcgataattgataattaactaattaatgatgtgaatatcgaaatatcacatttccaagcattacatatttcttttttaattcatttattttgcttcactatatctactatgtgtaaatttgttttggttatttattttttgaaaaataataaataatttattcatttccaatcagtcagtgggtaaatgtgcataatcggctcattacaaaaaataattatcacaatttgctaaatcactctttcattttgcctacccaatgatcagcagataaagctgcagagggagaatttttaattgtgagaaaagattcaatcgtgggtggagtcattttattattattattattattatcattagga

SEQ ID NO: 14701 - DNA, 2031 bp, Heterodera glycines
cccgctaattgctttcctttacatttaatcggaccaccttactagattatgtgcatcgtcctctatcgttttttctctcttttataatcctgcaaaatccctaaaaatgtgatcagatgcaatgcgctgtttcttttttttgttgtccattttttgtcgaaaaatcactcggagcaaatcgagaaacgaaatggaacaaaagaataataacttaaaaattatcaattcagctgatcaaaaaaggcatgaaattttggatttcgcgcctcgaaaattaactttaaaactttttgatcggaacaaaaacctgaggggagaaaaaatcaaaaatattagcagatcaaaacttttgcgcttcttctgtatgagttgatcaggctgggcggactgggacactttagtctggccggtatagtctgagccaagtttagagcatcataacttttttatttgttgaccaaatccaataaacttggtatcattcgaatgctcttaacaagctctatcggcttttcaaaaaaacgcaaagatatatcgacatataaaaaagttataagtaaaatatgcaaaaattctgactttttgctaatattcatgtttcaacttttttataagctgttcaatcgcttagaaatagcttatcaaaagcttctaaacatgtagagctttcgaatgatgtcaaacttataaaatttggtcagctgagaaaaaagtctataccggccagactatatagtgtcccaatgaatgaattttcatttttgagaatttattggtgaaaatccctaaaataagaatgtgaaaacagacaaaaggatattaatcaaaaaacagaggcgataattgacacatgaagttgcctttcattgatcagctgaagtgattgatcaaatcaaaccgatcggtcagttttttcctctttctcttttctcctccctgccctcctaaaatgacgtgctatttttgtcttccgctgctgttttcccaacaatctctcccaccaatttcgtgctttcatcgccctttttgagctctctctctctttaattttacaattcaaattctccgtcgtgtgcaaattttgttgctaaatccaccaaaagcattcgtttcgttttttcattttctgcattattttaaaagtttacctcccccccccctaaaatttatcgcaaaatataccattttatgcttcttctttttgtttagatattgcttattgtgttttcacatactgtagaagcattgattttgcgtattgtctgtcgaccgtttgtccctctcattttccatttgtccgtttcttctcccattagtcatttggttagcgaagccccaaacacacagaaaaagtgcatcaccacaacacattataatttgatttgacaattggataaataaataagcatttaatatttacataattatcgtcgcccactcatatttttgagggtttgggttaaatggtacgaaagtggaatttatattaataaatcattgggtttgtccttgaatggcaaggacgtcctggaaattggggcctttttctggaaaatttttaaaatattcttgaattccagatatccttgaaaatgagcatttgaaagaacattcaaaattttataattttttaaaataaataaaaattttatcagaaactgtttgatcgataaaaagaagtaataatattcaatttaataaaatttaattttccaaatactaattttataattcattttatacttttttcccatttttcattcgcaatttccgcccctccccccccccatttttatgctgtataaaaagggctgtttgttgttcattcgccacctttcttcatattttcgctttcttcgttttccagccattttcctgccaaaaaatggcacaataaaaagagcaaaatcagtcgagcagcaatcagaagaagaaaaagctgaaaaatatcgtctattcgtggtacagtcgaaggcaatttatgtgcacaaagtgcgaaggcatggccaaggcggggcaccacggaatggc

SEQ ID NO: 14702 - DNA, 2013 bp, Heterodera glycines
  unsure (1)..(2013): unsure at all n locations
tcagtcgagcagcatcagagaaagaaaagctgaaaaatntcgtctattcgtgtacagtcgaagggcatttatgtgcacatttgcgaanggcatggccaaggcggggcaccacggaatgtggccataagtggacggaatttttgggaattaaaagatttatacgaaattactgaataatttagatttaaaattaaatattcaaaaaacgcgncccaaaaccaanaaaagaattgaaaataaatgtgaataccaaaaatttggacgccgttactgggaaaggcatttttgccaaaatcaaagtaacatatgaactagctggcacaattcacccncgggggtcttagtttcttttccctttgcccattcattccgtaaaaatttatttgtaaaagaaatttgatctgttccgtccatcgctttgttctgctgctgtctgcagttttctcctcggcccaccgattgttgtccttcttccgcattttctctgctgtcgtttttcatttctcttttgtttctgttttttctcactgtctctctctttctctttgtttctctctatctctcttatttcggtctctgtaatttctgactgaactgatcaattttctctgatactgatcgtttggtttgatcaattcaattacatttccatatttgttccaactcggccccaaagcagttcaggccctgttggaaatttagaacacaatgtgaacctttgagaggtttccgacatacaaaatatctgctttcaagaacccggacctcacaaattcatcctcaatcaacctatgcaaatcccgatcccgagtccctgtgttttgtaggattttcttgatcccagctgacattctgcccacaaactctcactcacaagcccgacattcacccccagccccgatcccgaatcgtctaatttcaggcattttcggcattttataaaatttgaaaatgtaaaattgagccgaaaactaacctgcattaaccaatgagtgctgaaagattcagtgattaatatttgtcccttttttgtgtcaaaaaattcctcaaaatgatggaaagtttcgattcaaaaaacaaacaaagcaataaaatttaattgctatggtcaaaaggcgtgcaactgctgctgccgtgtgctttgctgtttctgctggtgctttctttgccctcggcggagacgacaaaagcaaatatttgcgttgagtgccgcgccccaaaaaagggagggaaaagcgcacacagaagaagcggaactgtgtgggggcatttttgttttgttgtcgaatttgggctgaatgggaaaagaaatccgccgccaccggcggacggacgaagaaaatgagacgggcattttatttatttcactttctttcatacgcaaaagtggcaaaaaaagaaggcacactaagtcattgcctctctctgctgaggaggcgccttaaattttttcgtatattttttatatttaagattaaagtttagtaacgaaccaattcggggattgcgaaattgcactcaaaattggatgagagtgtctttaatgagtttcagactttttctctagaaaatttttgttttctttttttcgacatttatgagaatttactgcccgatcagggggatgctcctcgatattttttagattttctcaagcaattcccataattttttgtcgggggatttcatccccgatccccaacttttctctccctgagtgtcgggactatccgtccttagatgtgttattaatttaattaccctgaggaggcggggagggggggggggaactaattagcgggtgtgtactcccaaagcaatcatcaaatctgagggtcccgcaccgcaaaatttaagcggcgcgagagggcgcggggggacaggggtcaattggcacagtcacggcccaattgaaggaccgcaacaacacaagcaccacaagtcagtagaacaaatgatttttgagtacaagcaatgatagaggcaaatgcttgtagacatcatcactaatta

SEQ ID NO: 14703 - DNA, 4060 bp, Heterodera glycines
aataagtgtcgcacgtctcagtcttgttctcaaacagctttttttatattgtacgaatccggatcaggggttaggaatcggtcgaaatggatgtcggattcgtgatcagcgaccccgaaaacccctagaaacatgtttctatgattttttgaaagttgaaaaaaatttttaaaaaagggggggtaccatctaaactatttacctgattttaaattgcttaacagtcttaccttacaaaattccaaaacgccgttggaacacaaaaaatattgccaaaaaaaacgcctaaaaactgactttttctggcgctattttggcgcctcaatgtcaaaaaaatgaataaaaaaacataggaattttggtcgcattacacatttccctaacttctgtgtttgcaggtgtttctgatggaatatgccggacccttcttcatttatccgctgttctacttgcgcccagcgcttatctacggcacgggcgcttccatggcaccggttgcaactgccgtgacaattgtacaaatttacattgataccttatccctaaaatgccataccaaatggccttgggcacgaacggtccctggaattcggcacttgccatgagattttcagcaaaaaataaaccccaaaaaatggactgtcgccagcagtttcggtgtaagagtcgaagtcgagtaatttttttcgttttttaggcctctaaaaacggatgtttaataaaaatgactctgacggttggtgcccataggtctaacccccttgaaaattaaaagggaattcgttaaaataaaaatctccatcatttaaaaaaaaatttttttgtctaggcctgcatttgccacaccattcactatgccaagcgattgtacgagacacaatttgtgcatcggttcagcaacggcacaatgccattccaaaacttgttcaaggttggctgattgggtagaggagggcctcacaaatgcaaaaattttcatgaaaaattcaaaaaaaaaaattttttttttttttttttgtaaaccaaaatttctaaaattccagggtccaatttatatatttaactaaatcatagaactgcacgtactactggggcttctccgcgttcatcgcctattttgtcaaccatccgttgtacacgtcgcccagcttcacccaagtgatgattggccttgtcggcttcacaatcagtgaacttggtgagtttttgtttttgttttggctaccccctggaaaatttttttgcttttcacaagctccaccctcgggtttttttcaaattaaaaagcgataaatttgaagaaatcctggttccgaactctaatgcattaaattgtcaattttttttttaattcagaatttttttaacgatgttattagaaaaaaaaaccaataaaaatttgcaaattctcttcataaacattaaaaaaaatacatgttgtcctcaaaattaattgtaagaagaaacacaaaagtcaaaattctttttaatgctcaatttccactgaaatttgtgccagtagtaagtgtgaactgcttggcccagtggttagtgcatttgttttgttttgtgtgttgttgttgttgttggttcgattccttcttccccctttctcccgtttgaccgcactttggctctctcaactttgttgtggccaaattgtgaaattgtgcttcagtggcgggtaaatgaatttggaggactgagtgcagaactcgtttctctgggactaaggtcccgcgggtgcaccccaaaatcacgccgccgaaatcacgccgggacaaaatcacgccgctagaaatttaaaaaatgttttcaaaattttttcccttaaattttcctataaaaaaattttctaagaattttttcttgaaaaaattttagggttgaaaattttttaaaaaatttctagcggcatgatttcggcggtgggattctggcgccgtgattttgtcctgttcccggttccgctgatgcgttgaaatttgaactctttgacgtggtcattcggtctacatttttccattttttttttgtttttttctaaattttttttcgagttttcagccttttctacaggccgagaattcaaaatttgaagttgcctatacatttccaaaaaactttggcatacaaacatttttgaaaactcttttttttgtttttgcattttatttaaatattcctgaatttttgcccaattttaggcaatttgtccatccatcttctgctgcgtgaccttcgccccccgggctcccgtgagcgcaaaattccctaccccaactccaacccgttgacgctgatgtacaactttgtcagctgtcccaactacacttatgaggtgtgataggccaggccattgtgcgcttttgatttttaagattttcaaaaaaaaatcactcaaaaaattaattaaaaaaaatttcgttttaaaaaatctctatttaaatccccttttcatttcaggtgtattcctgggttttcttctgcgtcatgactcaatcgcttcccggttaatcaatgcgcaataaatagaaaaatttaaatactgtattttaattggtgaccggtacggtaaaatttacaaccgtatgtcaagcaatcaatcttcgtgaaattaggataaaaatggttaaaaaaggacaaatttcaccttttgtttaaccgaccgatttcctaatttatttttggtataaatccatttacggtaatttattgttgccataaatcaattaaattttccgctcactaatctaaatttaatttttttttttttttttgcagccgttttcttcactttggccggctttgcgcagatgaaaatttgggcggacggcaaacaccgggcgtacaaaaaggactttgccgcttacccgcgcaagcgaatgccaatcattccgttcctctgctgatgaatggaagattatgatagggatatgataatgatgatcagatttgatgtggggttctttggcgttgtgttgtctctgattgaatggttggtgatcggctaattcgaaaattgatttgatcagcagccgaatgatcggtccaacgaaatttaatgtttttttttcgtttttgccatagaaaaacttcttaattctcgatattacaatacactgactactactgcttgttgatggtgattttccctcatttgaacacttttccagaggcatataattaattaaatttgtattttttcaaaaaattattttgaatgtcatttttgtgatcactttgatcaatgttgaccttgaaatgctccggaaacccgcttttttcataaattattctcaaaaatgacggagtaagacaccatcagcatttctaccattctctacaccgtaattacccaataaattaattaattgtccacgccaatttccttctctctaaattattattatttttgttgatcagtttagcattgtcacaccaccacaaaattgccgctgtttgttgccatttaaaaaacaaaaaatatgcacttcatttcacttatcaaaatatattatgccttggccatgttaaatgcatatcacactaataataagtttgacctttgccagcaaaaccggtttatcaaaattagttaacttaaattagattttttgtttttcgaaactttccaaaagtttaaaaatcttttaaattcgaccggttttgtacgaccaccactttagtgacgtatttccccatttatttatcattttttcgaaataaattactaggatgatttaggcaacacatacgccccaattatgcatgaattgttggcattgaacacactgaagatcacgggcggccattttggctatgccaaattttttggtttaattcgtaatcccggcaaatcaccgcgggttcctttccggcggtggtctgtccgcggtatgctctcgagaggaatcctttgaaaaatataatttgataataaaagtatcataaattgaccgttatcttccataatgtttcttccgttttatcctacctacataaatatttttaatattgttgaaattaataatacagtttccctcgcattattgtaagg

SEQ ID NO: 14704 - DNA, 1064 bp, Heterodera glycines
tttcgagtgattcgttcttcttttgttctgatctggtggaggcaagcttctttaggaattctgtattctccttcacttcggagctaaatttatacatttttaatttaatttaaattcatattcttatatactattcaattggtaaataaatttccagagtctcatctggaaaaattttgctacataatctgaattcctcatcagaatttgggtgcatgttaatcatgagatagctaaattgattattggtcgcatcgttatatgcatccatgaaataattcagtctttttgggaacagttgtgaccccagtgtccttcctcacttgtaatttcctgaatggttgcgcattaaaaccagataatgggcgttagctcttgccgttttaatgtcccgaccgtagagactctgggttacaaaaattacgcttacattccaattatgggagcccctggtaaagagtaaatcaagaaaattgttctgcatgttaagcattaaatcgtcaagtatcagtaagagggtttttcctgttatttaatcttattcatgtccggaatcccgttaaaagtctcaacaccctccccgattaatcctaaaatactatcattcatctcaccgtaacaataacgaattttggtgggcgatggttcaattagattcttatggtgttttaaaaaccgtaatagccaacgggtcttaccactcccggtagaccccgagagaattagagtgaacggaccgcgaaacattttttaattcctcttatttatttgacctatttatattttcatagggaacatgtttcgcgcatttggggcatagccagaaattatcaaaaaatgatgtaccgtaaattaaattaaaacaatcatagtcgtaatattttccattttcttacaattgatatagtaaactagaatttgctgtatatttttataataacaaaatcaaaaaacctaaaaaataacttaaagaaaaaacatttgattgaaatttatatgaaataataaatagatatgttttattaattagaaatattttatgtggaaataatactaaataaaaa

SEQ ID NO: 14705 - DNA, 2325 bp, Heterodera glycines
tttgggtttgtattagcaaaaataaaaaaggcataagagaataatacttcattttaagtaaaaaaaaatgaaattataatttaaaaaaatttatgagtacattataaacgtcaaccgcatcagaccagcctcatccaagccgtttcaatcggttcaactcgaaatacaaactcccaagccgcaaggttcgagcattaccgatatataaagtaccgatataaaaaatttctgccgttgataaaatgaaaatgtgatgcaaaatactttatttttcatttacatgcaaatgatttttaggcaattatttatttaataaacttaaatacacataagcacacaaaccagagtagcaggcacaagagatagttgacaagaaataatatattaatttaatttctgatcatttcaacatcacttacacataaatatcaacctaaaaaaagtaagaaataaactttagaaagcctgagaacaaattaacacgaataaaaataagtaatcaataattttgtaagaacaattaacgaagtgagagactattaaaatgcagtgattaaattttattttatatattactatattcccttcacattcaaatgcattatataataaaaagtatattttttaaaaacaattaaacaaaatattctaaactatataaaactagattaaaaaacaaatatagcaatataaaataattttaataaaatagctggatttatgtcgcttcatgtcttgagttgcttttccaaaaatatataaataataaaataaattaaactaaaaacaaacatgataagtgccaggtcaattttttttttgtgattacgcgtgtcagctgctcaagattattgagaaaattatttatatggtcttccaaagcttcaaaattgacataaacaaataaaatttgtactaaagagtgcatcaattcttcgtgccgagataattaaaaagaaataataaataataggaaagcgtaattcaattaattttatttataattcgtaaaaagccaaaattaacattacctttaatttgtactgaaaaatactaattaatatgaaaagatattttaattgcgaaacttatgtgatttattaaataaatttaatacattgagacgcaaaaccttattcttgtagctgatactcgaggtacatttacctataaatttccttctaaataagcgcgacatataggcaaaattacttttttcgtttttgcttttcacagatttgtcgtgggaatacaattggctatctccggcagtagaattgttatattttaaaattatttttaattatttatgaaaaagctaaatttattaaaattaatatatattatacaaaaaattaaataacaaaaaattacttatattttccccgtgtaacataataattaaaatttaaaaaataagacgaaaaagataataaatcaaaaatacaatataatcaatttcaaatcatacattgtgaatatccaaatatttaactacaaatagagcaattattattttttatttaaacgtccaaaattaattacacactggaaaatctagccaactaaattcgaacagaggaaaactgaatgtaactaaaaaatttcatcttttagttttgtaattgtttgtaaaatgttgataactcctatgttttaattataattattataaaaatgtcagagcgacattgcgaaaacattggaaaattaatgaatatagtcaattataaaataaaaataccaacttatttgaataaaaaggaataaacaattatgtcggaacggatcaaataaacaataaatatatgacaaataaaagggtaaataattaatgaaaactttttaatatgcaaaaagaaaaaatgtcacaaaattataaaaacttaatattttaataaaaaacaattgttattagaaataaataatcattaattcattgacttggattaaacaataataatataaaaaattaaataactcgaaaaagaaatttattatctgcgctacataataattaaacggagacaaataaacaattttaagaattgtcaaaaaatttaacaaaattatgtgtattttatgaactgtagccaccaccacgcacacaataagtagagacttagcttgaaaattaataagaatgctttaattgaaaaaagataactacctaattaactaaatgaaaatgaaaaattgaaaaacatcattttccaattaaatttaactgattttttataaaaattgcaaaaagataaataaaagtaaaaagtacaaaatcaaatgcacaaaacataacaataattttttttgtattttatctat

SEQ ID NO: 14706 - DNA, 1389 bp, Heterodera glycines
attctgaggccttccgcgatggaggaaaaagcgttgcgccgaccaaaagtgccattggggcgccaccaaaatgatgatgtccaaaaccggcggagcaggcaaaaattttcggcacctgtggaaatgggcctatcgggaggcgtgcaagcaggcgggcatcgaggtgggggcctggccattgaaattccttggaaattttaaaaatttaaaatttcaatcactaaaaatcaatgaggttgtgcttcaatatttatcaatgcaatttgccattttagagagaatatttaaccgagttttaaaacttcgagttttgggaataattggaaatttaaaaatattcctttaaaagcagaaaaaattcattttccaaaaaacttttttgaacattttttcattggaatttcgtagcttttagtgattaattaattaattaaatttgattaattagtttaatttaaatttaattgttaataaaaatgtacggacaaagaccgaattgcgtcgcgctaatttataaaaaaaaaactaagaaatatattaataaaagacctggctactttataaaaaatttttaaatttataatttttttatttttatttgttttttgtcatttcgccacaaattgtgccaaattaaaaatgtgccaacccatacagggggcttcttctccgtccctagttcttgttcttgttgttgtcctattgtttcaccattttccaccaccctcaagccctcaattaaaggcgttagaatgagtgagtgtttgtgccattttttgttggcatttttcccaccacaagaaatggcaccactccaaaaatggcacttttccctttttctccggccggagggcgtttgagaaatttcttgcaataatttttaagtttaaaaaatactattatttttattttttatatatttatttttttgcccttttttggcaatttttagtttaattttttcgttaattaattttttactttttaatcatttttgttaatttaaatttaaacccgttcaatttcatgattgtaatttttgccattttggagaaattaaaaaaaacgaaaaataatgcctaaaattttaaaattttcatgaattgatatatttttattatttttttaaattagtaacccctacgaaaaaatgtcgtcaaatttccactcatgaataattaattaattgctgaatgtgctgttttgtgtgcgtgtgttgcgaatggtcagcgttaaattggcaatatgccgaggcaaattggctcttaaaaaggagaaatgccgaatagtgatggtactcagttggctatttcgcgctcaaatggcagccaaaatctttttttgagctcaaatgaaactatgagcattcatttgttcttcactcaaatg

SEQ ID NO: 14707 - DNA, 2079 bp, Heterodera glycines
taaaaacacttttgaaaattgtgcccgaggcgccacaaaaatttttgaataatttatgcgcagcaacggcgccgccgcctcggaggcggcggtcgttcgtttgtcccccgtgccgccgccgcctcctcataagtgcgctaataatgaaaagcggcacaaaaaggcagaaaatctcttaccccgggagtcataatatagggaaggaaatgatttttttattgttttacataaatgggggggacgacagaatgccaacaaattctaaatatttaaaatgccatgccaaaaaaaaacataaattttctggctctactgcagttgagatgcgcgtccaatcatcttggccatcctcgatttcttaggccgcatgaattttttatttcgtgcttagtcaatgccttctagagctcggcgcgtgacgggaacccgcgcgggatccatcccaaccctttcgcgggattttgcggggtcccagtccgcaatcccgcatattttaaaatagcgggatttgcgggattaatcccgcgggattccccattccgcaaaaaataattttgaattttttgaattcctactgggcgcaaagcaacatcaataaaatattcaaaaaactgaattttgtaaataaattcgagagtctcgaggagggtaattaagtctgtccaagggtcatccaagttaatccagaaattcgtggagtcttgcgcctccgataatttttgaggattaaattgggcccaaaaacttcgggggcaaatggtgggacaatcccgcccaaaatcaaagcatttcaagaaatttgacgagaatcttcaagccttcaatgttttggctttaaattatttgggggggggggaggtcaagggattggacaacttggcccgaatagaaaaaccaaattttttttaattgtaagcctgtccaagtgtcttaagcagaccaaaaaaactcgagagtcttgagccccttcgacaaatttttcaaatcgatcaaagaagaattccgaggccacctaaccaaccctttaagcctttaggtcacaaaaaaaactgattattaccaacattttttgagctgtttgagcgggaggggggtgggagagtaaaaatttcatttccaaaaaaatattgtgccacaatttccaaatttccaatgccaatgagtccatctgctgtccattttcagtcccacccccgtcccccgttcatcatcattgttctgctgtcgtcgtccaattttggcatcgctagaggcaatatatgtgtcattgccaccccagccgtccggggaggggcggcattttcgtcgtaccgttgtgcccccaggggctgctggcccatcccatccccgcgccgtgccgttgctgccagccgactgctggcggtgcccttccgcttttctttattaatttttcctgcctgccgccgcgaaacccaattttttttattattgtatttgcgcttcgccaaacatttgaaatgtgtatggtggttgtgatgataggccggcaggccgcccaatgtgccggcaaattgtgccgggtaaaaatgtggcatttttggaaggtttctctttttataattgaaaaaaaaactttcatatcagcttaaaagggcttcttctcttcatcaaataatcatagtgatcataaaaatgttcattgaaataatatttaaattaaaattaaattattttaattgtaaattatttggtttctctcattaaattaatttttggtctgtcacaatgccatttttgactaattaaagtttaggaaaaataatttattttgcctaaaaataattgactggatttaaaattgttctttttaaaggcatttataatataaataaaactaaatttttttttaaattttcataataaaaaggccaaaaatttaatgccaacattttcattaattcattaattatatttgtatttgtttgtttgctttttttctgtttcggcaaaatgcactattctcgagacattttggcgccgtttcttctttttacaaaaatattctgtccaaccctttaaaggggcatcaaatttcctttccattaaatggcatttttt

SEQ ID NO: 14708 - DNA, 1930 bp, Heterodera glycines
  unsure (1)..(1930): unsure at all n locations
atatactaaaaacagtttgaaatcaccttttacatggtttttaatttttaaatgcgggatttgcgggattaatcccgcgggatcccgtcccgcaaaaaattttgagttccagtcccgcagcgggttccgcaaatttgaaatttccggtctctactaaagacaatacaaattaaatataatttacttagctcaagggcaactgaattttaacattattggtattgcgaaagccttgagttttctcaattaaaccgcaaatttaaaaatgatctaaaagaatcaaccaagttaaatctgtttgcttttaagtaaataaaaaaaagtgattttacggaaaactgctaaaataccaattttagaaacgcaccaacacagcatattgtacattttgttgttctttttttaaattaatttatgctaatttaagaaaatggaccggtgccaaaataaacaaaattttactcagtaaaaatattaaacatttcataaaatttacaggaaatgttgcacgaggccagcctgatgcactcggtgaagcatgagcatttgctgccggtcgccggcatttgtatgggcgccgccggggggctcaaaattgtgacacttttgcgtccgttgggctcgatgctcaaatttctgcaggaaaacgaaaaattgctgggttctaagcatctgatgctgtactgcttccaaatttcttccgtaaatatttctaatttttcttgaatttttccattttaatttataggccatggaatatttggccaacaaaaaggtggtccatcgcgacttggccgctcgaaatgtgctggtccgcaacgtaatgcacgtggaggtgggcaaaaaacaaattatggaatttataataaaaaacgaactatttaaggaatattataataataattaattaattaattttgcaatcgatgccctttaggtgaccgacttcggcttggctgccatgctgcaacagcccggcgattcggtggtggtggacggacgcgtggcggtcaaatggctggcgctggaaagtctaaggcgccaaatttacaatcagaagacggatgtgtggtaagcgcgtaaataattgttaattaattttaaaaatcaatgcatgacaataaaaaactaagaaattctcaaattttattattttgagcgcttttctcttcttacaatcgcatttttgacatttctttcgtttaattttttttttttacattttttaattgagctgacgaatttgggactaattttgtgattttttaaattaaatattttcaggtcctttggcgttacgtgctgggaaattttgacgtttggcgagtcgccctacaaggatttgctgctgagaagggagaaattggcttccgagttggcctatgagttggagcggggataccgtctccgacagccgaccaactgtagccaggaactgtaccaggagctgctcaactgtgagcattggaattgaagccgaaatttggggttatgccgttccaacacccgccaaaaaattccggaatgcggaattttaaattttgaaatttttccaaaaggaaaaaatcggttttcttcaaattttcatttcataaaattgccgagatgcgttttctcatatttggtattgtagtgaagatcaaaaaattaaatttggcttttggtccctttacaaaaactctttagttgacccttcccttccccgcccccttactgtatgataccgtacccatcataggttggctggtggacccggactcgcgcccgcattttttcatgatcaaagagcgctttgaccagctttgccgtgcaccgcacatttacattcaggtgaattttgcattaaaaagtgtttattttgngctataagatgcttgatattatttaatagctctattttctctattatataaaaaggtctatcgattat

SEQ ID NO: 14709 - DNA, 1034 bp, Heterodera glycines
aggggggggggggtgattgagaaaaagtaagaaagatttaaacaaattttcttgcggggtacctgttggtacgttgctaggtcgttacacaaattttcgtttttgatctcattcgaaagcctaaatttgatcactcgaggctgatcaggcttataaagataattattcaattctattgtcattgtccctcactataaaatgcttttattagttgattaaaatcaattgataattgcgttttaattaaaataaaaatttaattaaaaaattacattttaaaataccatgacccacagtaatatctcaaaaaataatttctcagatggcgcttcttcctgcagaggtgatgatgacgaagtgcattatctgatgccaaaacggtcaaaaagtgccgacccaaggaccagtcgcagtagtgacgacggcacaacgcaaccacagcaacaccctactacggtagggtacaacactgtagttggaggaggaaaggaaacggtgggcgcacgcgtttcggaactgtacacaccggtggtggaaggtgccaaaattagtttttaaaaactcagctattttttgctgttttcagccgagcatttgccaaattacataaatggaatgccaaaaaatgtcattgaatatgcgaatgggacgctggtgccgcagccaatgccgaatggttaccaaaatacgccgaactcaatggcaccaacgatgaccaagattaatgcaaaatgtcaaagtgaatcagtcatgtgaaatcccttttttggctttatgtttttaaatttataacgcgggttcaatgcaaaaatattaattacccaacaaaaaaacatcgtttgtagtcacttttagcggataattgtcaaattctcatttttaaaatttatgtatattttattttttaatttaagttcgagagtatgttgtattttttcattttgagattttcaagttcgaatcaaatataaatattatgtatgtgcccataaattttgaaaaaaaatccaacggatttaattctgagtaatcca

SEQ ID NO: 14710 - DNA, 1236 bp, Heterodera glycines
ttattgtataaaaacccggggattgtcaattgattggacgcataaaagtccattggacgcataaactgtactagagccataaaatcaaaggtaaaacgaaccatcctcgcaacgcgggcctagcttcaggcgttgactctggcacagaagaaatgtcaatgtcgattttgaagaaaattttctgacgatctgaaaaaattgcaatactaaataaaaacagcgattcacccaccgtcggcgaacagttcaagatgattaacgtactttcgcagttcacccagcgccattcgtgtgtaacagacgacaaccgttcggttgtagaggtcacaattatcatcatttctaagtgattcagactttacaagacaattaggttgaaaaaacgaaccgaataattaaaacagacatcaattccttttcacaaactcttgcttaatgtatcacaataaagaaattttggtactagtacagtttggatccgccttttggtcaaattttttcaaaatatatatttttttgttttaaaggatcctgaaaacaaataactaggggttttcgatgtcgctgatcacgaatatggcacctatttcgtccaattcgggatcccggacccgaattcgaacaaaaagtcgaaaattcgaatttttcaaaagttgcgcgtttgctctaaaattgattaaaacacggttaaattagtcaaaaataattgaaaacatcagtaaaatgattatgttgttcggattctgagataaaaatagattttaaagtcagcgagtgaatgttaattggaggtggtttcgcggaaagtttctgatttatttcagttttatttaaaaacattctgtcccacattttatcggagaatcgtctgtcggcgaaacgtcttgtcggtgaatcgtccgtcggcgaaccttcctgctcccgtttttctctataaattttaagcgtaaaagctactgcattttgtttgcacatatgacgatgagttctgttactaatcacttttgtcggatgtccttccttcttgttaacttggtctcagatgtgctatcgttaattattcggtacatatttttattttttagactaaccatcctttcattgactctgtctttttcatcttagtacgaaatggactctcccgctggtgctcagccgtcgaaccccaacgctcaacaacaaggtggaggccgaccatcgaataagcgactccagtaaacgcaggcacaagtggat

SEQ ID NO: 14711 - DNA, 2606 bp, Heterodera glycines
  unsure (1)..(2606): unsure at all n locations
cccccatttcgcccgcaaagggcccaaaatgtcggaccatttcgcatcgagggggggccggtgtaaaagaggtgggggggggggtcgccggcgaagggaaaagaaggaaatttctgaaaaatttggcttttttcttaacaaaattagcccaaaatctcaaaatttggtcattttttagtcaaaatctggtagcaaaatggcactaaaaatacaaaatttttcccggcggcgcctatcggcaccgcctgctcctgcgttcgaaatttttttgagaaaaccgcgccgcaaaaaaaagagattttaaaaagcaaaaaaaaaaggtcgtcaaattgcatggctggaccatttcgcaaaattggcaaattggccgctgaccccccccccccctccagaccatttcgcaaaaattttggtcgaccccccccccttttcatgtatgatcactagagaccagggctgttgcaaagggaaaaataaaaggcgaaaagcgaaaccaaaataaaaagcgaaaaggcgaaagcgaaatgcctaacaaaagcgaaaaggcgaatttttttttccaaaaattattcataattgaaatcataaatttgaatattgtggtgcaaaaacaataacatttcagcattttcgggtgtcaagctttttcgcaagtcatttatgattaatcctgccgttgaaaaaagacgctcgctttcggctgaagtagccggtgcagaaagaaatcggaatgccagttgatcgcggaggaaaatcctttttataattacatgatttgcagaaagcaacccgcccagaaagtttgaagaaattccaaattaaagacatttcataaaaaagcttaaaagataaattctatagattttctcctttaatgtttatattaattattattttaaaaacccaatctttaggggtgtacttttatttcgcttttcagccaaaaagcgaaagcgaaaggcccaaaaaaagcgaaacttgcaacagccctgctagagaccgacttttgagggataccgtattttctctaattatcccccaatctccattaatcccccaatctccaattatcccccagtctaggatgggtttgaaaaataatccctctatcttaatcccccagtctccaattatcccccagtctacgaggaggttgaaaaataatcccccatgagggataattagagcaaatacggtaattccctccgctggtgccgttttgtcgtccttcgctcccattgcggccattccagtctcacaattcgttcgttgggagtgcgtgccgcgcttctttgagcaccgtcgccgtgttcgactccgttgggtgcgtgttcagttcacacaaacgaatgtcccgcgggtcgccccaccctccgttcggtttcgccggctttaacattcgcttgccaatttccaagacgcgcattgaggcggggaaaaaggaggaatttacgcgttcgaaaagtttcctaaaaaggtttaaaaaaaatatgcaaatttgaagaaaagaaattaagcaatgattaaggcaagcgaatttcgaaaatgtatgcaattctgtcaaaaattcggtgctatgtcgttataaaaaaccatcaaacgcaaaatattcaacaaaaaccacccataattttgcttaaacctaaaattttaattcttgatattattcgatcgtgcccagagattttcacctcggacatttgcgccttttttgaaaaaatcatcaattattcaaaaacagaattaatgcttaagaaactaaaagactatgttttcttaattttaatgctatctaagctatcagggattgaaaaaatttcaaaaaattaatgaccaaaaatctgaaaacctggttcttgagtacttttggccataactttgttcaaactttgacgaaattttttgaagttttgccagctaatagagaattttagagctatcgaatgatatcgaaaattaaaaatttagttagtttgagcaaatttatgggtagttttttgttgaaaattttcatttgatgtttttttatggtgtttttttataacggcccggcatcaaaaattcctgttctctcgttacgcctattaaattcaaaagaataattagttgaaccgtcgctgaatccatccccaatccatttttaaaaatacaaattaaaaataaaggaacaaacaaagcatcatttgcagcacgttcggctttgcatcgatgggtgtgaacgccacaatcgccgatatggagaactctaaacagggaaagaagaatcagaggaagtggaagatgggtaatggaggaatgagcccattttgttcaaatcagtcgttgtcatttgtcacctcggtgctttggtgtaaatgacgcgcattttcgaagccatacatttgacactgagttggagcaaagtccagtcccaattgtaatcgtcgtaggagcaaaacaactgcaaaatgttattaaattaattaatttaaaatatgaaaccaagacaacttttgaacagttctgcaccgccttccaaagtgttctgtcgacggccattcccatgttgaatttgctgctgtacanaattcgaggcccaatttggcgatatctttttcatatttgtc

SEQ ID NO: 14712 - DNA, 3523 bp, Heterodera glycines
  unsure (1)..(3523): unsure at all n locations
tataatgggcgaaagaaagcaattgatttgtggtgttggaagggatctcattgtcagttatttcgacaaatgatttaataggcggctcaaaaaaatttctgattgactccatgaataagagaggcncaaaaggcantcggataataaaaatgggtacttccgggnttttccaccccttgaaaattttttttctaatatttttcccaggttgatcacgaattctgatgtctaattttagctagaacgtgttttacgtgagttacgtgaaattttactgaaaaacttaaaaaggtaatagtgccagaacttacccccgccccttttttcgaaaaaaaattctattttttttttaacaaagtaaagtccttttaggggttttcacggtcggagaatccgttcccatatccatttcgactcaattcgaacaaaaagtcaaaatctaatttttctagtttcgcatttttggtacaaaaccggcttaaagtaaggaaactaactaaaagcaatcaaacagagattttacgaaatattattgtctttatgccaactatttaaatttttgttttcaaatttttaagtttttcacgtaaaacactagctaaaattaaacatcaaattcgtgatagcaggtcggtcgttcgttctccgtacgcccgcacctcgaaatttttttttaaaagtttttcttaaaaatgtttgaatttttttaattttcgagaaacgacgcggtggaataaagtgaacccaaaaaggagggccacctgctgatgcttctgcggatgaaaacgtttcccaatgcctttgtgctttcccattttcgggtgatcccccgacgaataggcagccgcgtggtgtccattgttttgtggcatttgataaccgccattttgtgaagggacgtcgtgccaatactgagccaccgtataagccggcgcagttagctgaacttgctgttgaaagccctgtggaacggcttgttgcggcgagaggtcaatgttggtgatgttgccgtaattgtaataggtcacagcaggggccgaaggagggcaaaagtattgttggatttgagtgtgatgagacatttagagaagtgagagaagcgatggttggcaaagaaaaaaagaggtttcaaggctgaaaattagcataggtaggtatgaacggaaaaagcgatttagggccataaaatgggtcaacgtcagttgggcgccagcaggtttttggactataagttttttctttgtcaaccaaatccaacattgttggtatcattcgaaagctcttaatatgctctattagcatgcaaaattttaaaaaatttcgtcaattttgaacacatttttgaccaaaaaggttggaaatctggttttttgaattcttctggccataacttttttgaaccttaatgaaatttttcaaaattttgcaggctaatagaggacacttaggcttttgaatggtaccaacaatgtttaatttggttgacaaagaaaaaagttataactgaaaaggtgctggcgcccaaacgtgtcggcgcccaactgacgggttccgcataaaatatgggaaaaagtccagaaatatgacataaatttttacaaaggaagtgtgaaattctcaattatgttgttttgattaaaaaccagttgaagaattaatgtttggcgtaaaaaacgacaatggattcaaaaatccgagcagattgctgactgaccaaccgttttatacccatgaaactcctcctcggtgacccttctttggctaagggatcatcaacaatttcccagtccctcgaggattgaggtacataaaaaacaatgggaaattatgggaaaatggattttttttttgtccatgggccaaatattaccaaattaactaagagcaagccattagcaggggctgagttggttgccttatgattgtgctgttccttccgctgaaacgcctaaattgccactggctaattcacaatggtcaaagggtggacaaagcaccaaaaattagaaaggcctcagaagtgatcaggggaaaaatgtggagaaatttaacggaaagcccaaagagagaaattttttgttgtgtttttttttgtgagcaaaaattgaaaaaagtgaaggcaaaattaaatggtaaagcaaaaggaatcaaagtcaaaaggcaagagcaagaagagaaaggccaagagtgctgccgcgtaggcagagcaaaagtggcgaagtgcagaaaaggcgagaagagtaaccccgagacgcgaattcttctttcctttattgggccaaatgggatgggcggtccacagtgtccgggtgattggtggtgggtgggtaattctgattggtgggccaaccggtggttgggcgacagtgccgggtgagcaacgggcaacagatggacgggcaacggcgagggtggggcacaatcggaccgtgggggaggggggagcagggccaagaacgccaagccaattccggattttatcagtgcaagtcaccaaaatgcctgtggggatttatgggaagagagaaatggtgggcaaagcccacggattagcaattcatatttatgcgaaaaatgggaccattgggataatccccaaccaaaaaatatgtaaaaaatttgttttgcgtagaaaatgaacaataaataggcaactaaaaaggaaagtgtgtttgattccgaaaagtcaattaaattcccaaacaaaaatgccgtctttcgttctttggtcggcacaattcactgattcatcgtccgccggttggagtgccggtgttttcccatccgtttctgttgacaacatcggcgagccaattggcatcattccactgactctttgcccaatcactaaaataaaggacaattaaattcaaaagaaatattttaatttgtaaactttttaaaaataataactcaattaataataattatttaatttaaaatgtatttttcatttttgaatatgccatttttattaaatttatgctcttacagtgacgagtcaatgggatggccccatcctccgacgtatccgccggcgtgccccaaaacgtccctctttcaccgttctccgctcggattctgccccggatttggattactttcgccagaggacgcttttcccttttcattagccgccgattgtttgccattcaataaaagctgaatgaattttgaatagtataattttacaataaaaaatcaccagaagtaccattggtccatcggggtttggaggggcggggtctttcgactgcgccttcccgtgcatcgtaatgtaaatgataagtaccgccataatcgaggattgtctcgagaagagcggagcctttgtaatagctatacattactgataaagacgacaagtggtacaaaataagaaaactagacgatcaaaaaggcatatgaaaaaagcaaagagactttaagactcattcacaacttcaggccatgtcttcttttatctccacgcgcgtagtgttgaagcggagtgtcgttctgtgtgcttgtgcggcgccgccga

SEQ ID NO: 14713 - DNA, 1300 bp, Heterodera glycines
  unsure (1)..(1300): unsure at all n locations
tgacaaaggcgcagcccataaaaggaaaaaaggaatgaatcctttttcaaaatgccaaaacaaaaacagcncacaatagatagagagtgttctgtttgattgcttcaatgcttttaaaaattaatttgctccctctaattacttttgcctaccaattagcccccctccacctattttacttcagtgcttttcctatgtttgtgcttctttctctgtcccttcccccttttccttttgccgtacttttgccttcctttcccatttgacattggatgatcattcctgcgcgttgtcacctccaattaattaaccctaattatgttaatgacccttccccgcccaatttgtccccgatgaccgggcaaccgtaaaattctgtgcattacgttaatattatgtgttgcactgaatgcaatgatcactttgtgacttttatgggatagtaaggaatgcaggaggaggaggggattttaaaacccactcgaattttcttcaaattttccataatgacgcaatttgtccacaaattttactccgccatttgaattggaatggcttttcgtcctcttctcagaaagcactcgttgcttgaacatcgatttaaaaactcttttttctccgctttttacataaaatacaaatgccatttgaatcgaatccgaacgaatcaccgaacccaaaaccaaaacagtgatcagcactagcagcagagattgccatcaattgtcgaggcaactgctgctgatccaccattcattggcactgttttcaatgcttctgatcattaaatcaccgattgaaacagctaacaaatgagtcgcaacttttgactgtcctcgcagtccgcagatgcccctccccattctccgtggcggtgattgatccctccgccctctccaaatgatcactttcccaaatcacttttccccctttcattgggcaaacaaacgcagcgaatgacgcggaaagagaacgattgatggaatgaatatgaagtgaatgagtgaggagtgccttggtgcgtttcccccaactcggcccatttgtttcgtttcttctcttttggctgtcataacaccgcacaaataatcccaaataatcccttctccgccgcgtcccaacaatttccgatcattcgaaaatcaaatatttaaatttgacatttcacaccaaatatttgttcattcaattgaattgcaaagtgaacaaaaaaccgttcatttgcgggacaaagttaagccaataaatcaaaaccaaaataattaatttaattggaaagccccttctcatatcatttctt

SEQ ID NO: 14714 - DNA, 1271 bp, Heterodera glycines
taagtgaccaatgatttttctctgtcaaattggcaaatcgaaggtgccgatcatttcaccttctttgctttttcatttgttctgctcaccatatttctcctcctcctcctcctgcagttgtactgctccaacttcggctgattttccattttttcgtttttttccaattgcaccgattcgctcattttacaatgcctttgctttgcaaattttaacagttcccccccccccccccattttgtccccccgggggagggcattctttcctccgtctttcgccaaatgcatcgattagaaatggcgtcggattgatgtcgcaatttcttctctcttttccatttgttcattcatttttgcgctctattttttgtttacattaatccgtcattcttttttttttattaattttcacttttccttcaattcgatcacttttcaatgccaaaatttcaatttttctttcgaattaattttaaaaaattttccgtatatttaaaaatatattttaatatttaatagatttacatttttcgcttttccttcttttttcacaaatatttccgccatctgtgctaattccccgcgcgttttattggccattaattccttggaaagagtgcaaaaataaatcgaatcattcattgccaattgactttccaaaatattttacgggaatttagctcaaaatggaaaatattttggcaaattttaatttagaagctgaacagcaaatgcagaagaaaaccttcactaattgggtcaatttccgtctcgaagaggtgattttccgtttaggctttgttttggattttgttaattgcctttttgggcatttaatcatctaaaatggctttttactgatcaatcaattggctttgactttcccctcctttgctttatcccattagttctcttcttcctttaagcattcctcttctggcagagtcaccgaccttttcattgacatgcgtgacggcgttttgctgtgccgtttgttggaagttttgactggccaagttttggtgagtgtttgggcttaaaatagaagctaattaggctttaatgggaatagcagttccgttacttttgattgcattattaagctcgtcattacggaaagtgccgttgtcgcgatgtcaaaaaacggacaatcgaacgggtgggtgattttgtgccgaaactcagacttttgcattttcataatctgtaattactgtaatttaattgtcaggaaagtccaaagacggcactcttccggcggtgtcagttca

SEQ ID NO: 14715 - DNA, 1188 bp, Heterodera glycines
tcatttttaatgatgtgttattttttgctaaggtcgagcaaaatctgtcactgttgcgacagtccgtttggcatcaaattcaccaacaacaagcggaacaaaagtgccatcttttggcattgcctggcacttccaatggcgggggaacagcggcgattgttacgcggacagcggacagtttgccgaaggagggaattgagcggcaactgatcaaatgggtcaccgacgaagtgatcgggtcagccgttaattggccaattaattatgccatccttttaatctgataattagtttgccttttttgttcagtgaccttggcttgcgtgtgcgcgatttcgaccgcagttggtgcgacgggcgtctcttctgcgcactcgtccatcgttttgctcccgcgttgatgtctcgaggcgaagttttgggtgggggaaacgacgtgcaaagtgcacagcggagaacggaaagggcaatggaggtggcacggctccatctgggcatacggtaattattgccctgattgattgagtctacctggctatactgtaatttattgcccttaattgattgggttcacctgagtatacggtaatttgttgccctatgaacacaactgggcatacggtaaacattgcccctaattgattgaatccacctgaccatacggtaatattgtgatttatgacattaatagtcgtttgtttaattgtcaagcccattgttggaggcgcgagatgtgactgtctctgaatatgtgccggacaaacgttctctgatcgcttacgtctctcaattcgtttgccttcgcccccaccaaatgatgagtcattcttcgattcaaattccttctgctgtccctgccgatgtttctgttgtcgtcgaacaatgccaacaaaagaaggaaatggaagaagaaaaagtgaaacatttgttcaaattagcatttcaattttaaattaatttttcagtttttcgtgttcaaagaatggctccattggttgcattccgtcgccgcggacgaacggctcaaattggtggcacggcaacgaatcacaattcggcattttattgtacgggcattgaaaggcacaaaatttgccaaatttttcagtggttcacgcaaatgcgcgaagaattttgggaacgacgggcggcgattgtcgaccacttgctggtggcaattagaaaaag

SEQ ID NO: 14716 - DNA, 4400 bp, Heterodera glycines
  unsure (1)..(4400): unsure at all n locations
gcctgcannggtcattagaaagaattcgaaaaaataattgcaaattaaaatcaatgaaaaataggaattaattagtctttgtcagaatatgccgaaaaagataatgaatatgatatagacaagatttattaatcattttatgtggttttttaaagttaaaacaaattgtaacccaaaaatttaataaaatctaatttattttcaaaagaaacattatatatttatttaaataaaaaataaatcaacaattaattcatatgcaggataatttatgaatctattaacaaaaaattaatgctcaaaaagataaataaaacatggaatttcgataagtaaataacaataaaaaactatatccaattatatacatatatatatacctaagaactggaattttgcaaaaggatccgtcagaacaatttattaaaaacctactttgctacaccacagaaatttgtgaagaatgatgtccaattatcaaataaaactgaaataataaagcatataataaatgtgttatattaaaaatattttaatganagatatccatcaccgaatttttttgtattttaataatcagggaacggatttttaggttttcacctatttttttgcggatagcatatggtgagataagcgcaaaaaacacattttcttcgatcaattttcgatttagagcgactttttagcaactattttcaactattttcgcttatgaaactttttaacaactattttgacttgtgaaatttaaaaaaaactatttttcaactatttctgcttttcaacaaaaaaaattattatgaaaaatgcaataaaaaataaataaaatgcacctctaagaagcgatgttaattttttcaaaaatacacccctttttttgaaaaaatgcaccctcccccaagaatcggtttttcaaaaagcaaaaattcttgccatgatttggcggacgatcgaaaaatttttacgcttgaaaattttcaaatgtgttgatttacaattgtgcaaccaaaaaggataaagatgagaaattttgcaaaattcacaaatttattggcatgttttccaatttttggcaactttttagcaactattttggcgtttttcagtttttaacaactattttggcagttttttagcaactatttaggtacctattttgcgtttttagcacctaaaattccgttcgcgcggggatcccgtttcgctacgggctcgagatacggtgattctcatttcaaaaccatcaaaaatctcggaattatcatatgattttaacattttatacttatcgggaacgtgaacccaaaatgcattgaaagaatgattaaaatattgtcttaaattactgcgttttagtcgttcataatcatatgtgctcattttgaaattggccatgtgctcccgctcaatttgacgaaaaagtttaactgcttgcacataaaattcagcctcttgatttgttggcattggacaaagagtgtaaagtctggtcttcagtttctgttaaaaatgtttgcccaagagatttgccagatattaattgattcgatttgaattttctttttgtatattcatggctttcctatcgacaaaatatgattattcatagttttattttaattgacacattttatcatttttaaatggaaatccgtacaaattgttgagcctattaatcccgaaaaccagcctttttttgttgaaaatctgttaacaaattacactcaaattttcaaaatttcccccggcggcgcctatcggcaccgccggacccctttcttcctcaaaaattttttggaaaaagcgcgccgaaaaaagttatgtgaaacgtaaatctgaatttctaataatattcgatcacttagtccaaaaatgattaattgtttgaaataattgaagaaaatttggtttgaaaattttcattaatttaattagtagggttgtaaattatatggactaaaaaacgcgaaatatggacattaaatatggactaaaaaagcccgaaatatggactaaaaaggccaaaaatggccaaatatggaccaaaatatggataaaaaatgccaaaatatatgttgtaaacccccaaaaatcccaaaaaaggtgtgcatatttaatatttgcttaaataaacctaaaaagtacaataaacaaccaaaaaatggggtttaaaacttaaaaatgcatattttttattgttgttcgttgtatcaaaaacacctccaagtttgccaaatttcgaaaaaattctcattaaaaaaaaaagaaatgttcgcaaaaaaatgacgaaaatatttattgaaaatgcaaaaatgacgacgaaaactcaaatttttcgtgttttgtggggtgtaatttttaaaaatttccaaaaagttgatctttaggggtgtatttttcgtttttttttcatttttcttgtgaaaatttccaaaaaatggccaaaatatggactaaaaacccaaaaatggcgaaatatggatttattcccgaaaacccccaaaatatggatttatatggactaaaaaccttcaccaaatcaaaaaattttaacgtagaaatgctatttttaagcccctttcttcatagcatatgcgcagaaaaaatatgttaatccatataatttacaaccctattaattagctttaacttttgggttttataaaataaaaataaaataaaataataattttatattattttcactttaaaaaaattaaaatttgaatttttaaaaaattttaaaaatttttttgaatttttaaatttcccggttggtcccggttcccggtcccgaagaaaaatcgaggtcctggtcccggcttctcaggcccggcaagtcccggtcccggttttgcccaaaattcccggtcccgtggcactctatttaagaggcttaacaaaataaaataaaaaacataggtggaagatattcgaagctgcgggcttgtcatagccaaaaatgcaacaattttatatcattccaaggagtattctctccgttccggaatattttttaatctgaatgattaaatcgcaaaattgccgattttctctatttttggagcattaaaacaataaaattgaaaaaattaaatatgcaattaatctatttttaaaagatttaattgctttttcggcttttagagataaattgagcgcttacagttgggaatgttaagtttagccttggaggccgacaaaaatattttaattaaaatttttacgcacttgcagaaccgcatgaggggattgccgatctttgcagcggctaacaaagcccgctttgtagtgagttcggtttccgtacgggtcaatgatatcaaaataaaaacgctcaatttcaactattgggtcggtaacgacctaaaacaaaattttgttaatagttcgtttttataaataaaattattatagtgcagctcatgtagttaagctttttcttaattagatttagtggatgtttttttatccgggatggggcgcggacagaaaaatgacgtgggtacgaaataataacgcgacccaaaaaatacttttataattttatttttttagaaaaagctaatttttttttattttggtggtttttaaatgacgacgcagcacgaattgactatgagcagcacttttaagagtaaccacaaacttcaatgtaatcattcatagaaatgaaacttttcatttcgttggtttggtgctgaacatgtcgtgtaattgaatcgaattttgctgcgacgtatttgtgtagagccgtaattgctttgaactcatccgactcgggctgaaagaaccattcagcaatcacaacgagaaattcacggaaatacggtatatcatgcgaaaaaaaatgattggggcgggataatatttacaaaaggtcgagacaattagcaaacacacttatctgtcgataaatcttgaactttttaaaaaagcaacagttaattaaaaaattagtaaaaaatattattgtttattttaaattaatgatttaaatataaatatagtaattaatttattatttatatattaatctcaatttaattaaatatttttctcaaaatcaaatggttcgaactccaccggaaaagcaacttcggcaccggcagctaacaaacttccgattgggcccgaatagcgaacaaacgttgctgcatgcttgcttatgtgcttcaacttttgcactacgtcccaagtcgcttgagtanatgttgagaattcggaagtaagtttgtgcacgtcttcagtgtctacaaagacggaatttgtcacttttgcattttttacaatttaaaaagaattttttacactttcattaaataattctctacaaaaagagcttactaattgaatgggtagtcgttgcaaataaaagtagaaacgccaaagacaaa

SEQ ID NO: 14717 - DNA, 761 bp, Heterodera glycines
aagtgaccatttgatcgggcagaaccggattggattcattggagaaagagaaagaaaagccgctcgagagtaattaattaattaatggggagagtgaagtaaagcgaaaacgacaagcgacgagagggggagggaattagcaggacgaatggactccgaatggcagtgcccgcattttagcaccacccggaagatgccgacttaaccattacacggggaccgcacttttagtcccaactgaattctttccagaatttttttggttttcagaaaaacaaaaaagcgctgaactgagatagccagcagctcttccttggacttcgtccgtttttctttttttccatgacaatcagtgaatggctaatcccttcccccgacagataaacgggtctcatttttcctcctttttcttcatttaaagtgatccttcgcaattcgtcgtccgctcgaacactttgtgcttttgttttgtttccttttgcgtcggccgttttgtgttcttttaaagcattatttgtgatggattgcgccgcttttcccctttttctttgtgcttatcctccgcctccccaaatttccatcgtccatcaaattgagacactgtcagaccaaacgaaagaacgggaagaaatatgaggggagggtaaaaggggaaaaatcggtcacatccatcggtcggtcggaacgtgataatcatttttgccctgggggacggcgatggatcatctacccaccaaaggcaccagcttgatttatcaccc

SEQ ID NO: 14718 - DNA, 2971 bp, Heterodera glycines
  unsure (1)..(2971): unsure at all n locations
ccccccccacaacaaatatccttcgcctacggctcaaatccgccgcctccccctgccccctgctgtggtgggatgtgttgtaaagagcagagggagggcattgcaatgcttcattagtggtttctctccacaatccatgcgccatttgtgccgatcagtcgcgggagggagggcaaaagcaaagggaatgaatcaaatcaaaggcgggggagggggagggggagggggaggtccttcctgttcncttccatccaatggctttgacccctctcgccctttgcggatgattaacacaatacataagtgcaccgctctcccgccttctctcgcatttgctgcgcttgttcattcgcttgtccttaattattttttcaaaaattcggctgatttatttccaaaaaaatgaaaatgtttcttttgcagatgaatcagcaaaaggaagaaaagaaggcgtccaagggggagagggaggaggacgtcaaagtgttgttggccgaagcggaacgcttcaaaaggctggccttcctcggggtgatggtgtgcaccggtgggtgacccgtggaccattcattggcacttcgaatttgccgttgtctctttcagtggcaactttgaccgcctcaatgtgcgtgccgatgctctattcctacacgcagtacatccaattgtcgcttcgggatgaaatcggcttttgtgtgcatagaacacaaaatttgtacagcgaattcgcaaaagtccgttcccccccgttgcccatggcatttcctttcaattttcagtatgaaattgttcgacggcctaaacggtccccaatggtcagtcagtttctcatctccaaccacggcagtctctccgcggcacagttcactccaaacacagcccaacgccgcaaatcgcgacagggaggctatgagcaagtgatcgccggctacgccgccgccgggtcccaagtggcgccccctccggcgccgccggcacccgccaacgcttacccagggaacaattcgcctcctccgcctgcccaagaagtaccgcaagctccgccttcttcgcccgctccatccgctgctaattacgcggcaggggcacaagcgccttcggccggtgctcagcaggtgccattagtcagtgcccattagaaaatgatcaaaacacagcaggaacaggcggtggaggagcaatgttgctcatgcgcggttggcgccgccggaatgccggggccgccaggcgaagatggaacggatgggaaggacggacttcctggccagtccgggctggacggggcggacgcgccggagcaaggggcgaccggagggtacgacgagttctgcttcgactgcccgggtttcgaaacattttctcggttgggtttctgtaccatttgcttattcagctgcttaccccggaccgcccggcgggatgggccccaaagggccacccggacagccaggactgccaggccaacccggaattccgggagcgcccgggcctcaaggccccccgggcccacccggccccggcggagcgaatggaccgcccggacagccgggaccaagaggtaaaagagaagggagcggagcaaatgcaagcatacacttcagggttggacggacagctttcggatgtgcccggcgttcaagggcctccgggccccgttggcccaccggggcccccgggagtgccgggagagccaggccaacaggggcaaagccaagtaatgagggggagggctgaaaataatcatgctaatggccattaagccgggcccgcctgggcctcctggcgatgcggggctgccaggactgccgggacagccaggcgcacccgggcaaagcgcggcggacggcgaacccggaggaaagggcggctgcgaccattgccccgccccacggaccgccccgggctattagtcggattttggctccattcctcaaagcattgtccttttctttttctgtctgctcaatctcagtttctttccttatttacaatttcttcctcttgaaagcatttattttgtgcataaaatgcagaattgtcaaatttgttgttaaggaaataaatcataaaggcggggcaatcgcgggaaattttgatttaaaaaatgtaaatgtcaaaattatcattcaaatggataacttttattgaaagtggaaaaccagtgaacaaaaaaatgggaaaaaattgatcaatcacattttaatgatataattaataatttatgcaccaccaaaacacaacaacgccccctcactctaaataaagtaaatcagaggtggccatgctcatttctcaattccattttttgaatttaataactcaaagaagcaatcgcaaaacaaagtgactaacaaaagcattgccctcctcctcagtgtctgtttgtctcttcagtcttttttacatgcgactttctccgtctcctcttcctcgccttcgtcacttccctcttcctctgccgaactctctctccccaattcttcttgcgaagggacttcaacggaagaagactctttttggatgggatgcgtttgttgttgctcgggcgagtggcgcactaattccgtgtcgtcggcatcgaccaacttatcaagggaggacatcgaactgatcggagtggtgaagtcctgctgctcccttcgaatgttctgctgaaaatcagacgagagattgtctcatcgttacccgaactcaaaaatcgaccccaaatataatgtcaaaggtatcggaagtgaatgattatccaagtctcacaactcccaaccaattaatgacctcatcatcgccgtccgaaccctcagatgctgcaggtaacagtgagttttctttgctttccgggatcaaagtcgggttctcaacctaaccaaatgaaggaaaaacgctagaattattaaccagataaaattgaggctaaataagatttacgggtgattcgttggttggttttgcgcccaatatcgtctcattttct

SEQ ID NO: 14719 - DNA, 2554 bp, Heterodera glycines
  unsure (1)..(2554): unsure at all n locations
gattagaagaggtaaaagagtgatttaagaggtaaaanagtgatttaagaggtgcaacagtgattagcagaggtacaacagtgattagaagaggtgcaacagtgattagaagaggtaaaacagtgatttaagaggtaaaacagtgatttaagaggtgcaacagtgattagcagaggtacaactgtgattaggagaggtacaacagtgatcagaagaggtacaacagtgattagaagaggtgcaacagtgattagaagaggtaaaacagtgatttaagaggtgcaacagtgatgagcagaggtacaactgtgattaggagaggtacaacagtgatcaaaagaggtacaacagtaaatagaagaggtacaacagcgattagaagaggtgcaacagtgattagaagaggtgcaacagtgattagaagaggtaaaacagtgatttaagaggtgcaacagtgatcagaagatatacaacaatgatgagaagaggtacaacagagattagaagaggtacaaatttgatgaagaggtacaaatgtgatttaaagaggtacaaaagtgataaaagaggtacaaaagtgattagaagaggtacaaaagtgattataagaggtacaaaagtgatagaagaggtgtaacagtgattagaagaggtacaacagagaagagattagaagaggtacaacagagattagaagaggtacaaatttgatgaagagttacaaatgtgatttaaagaggtacaaaagtgatttaaataggtaaaaaagtgataacagaggtacaaaagtgatgagaagaggtacaaaagtgatgagaagaggtacaactgtgattagaagtggtacaacattgttaggagaggtacaatattgtttaaaattaaataaataaggaaacgtttttattaaaagttaaaaatcgagtgcattttaatttaaaaattttttaataataaaatactcttttattaattaaaaacaaccttggaaattattaattgaatatttatttaatttgaaattaaatgaatttttttttacaaattcaaaaataaataatgaaattctttaatttaaaaaaaaaatttaaataatttaaaagaaatcttcaaaaattaattaaaaacattttaaaataagccaaaaatacaaagaaaaataatgttacaccgtccggatccaaacctgcggccccccccccccccctcagaacatgtcccagaatccccaatcacacagggattctgaggtcttgacgatgtaataactgaaatctgatgtcagattagtgatcagtggcctaaattggccctaaagacatatttttggaagatttttgtgaaaaaaaattttccactcaaaaatcctggtcacccccctttggtcccgaagccgcccccccccccaaaaaaattgggaatttaaaaaaattatcagcgatttttaggccgcttccagtgattagaagtggtacaaaaggattagaagaggttcaacagtgatcagaagaggtacaacagtgattagaagaggtgcaacagtgattagtagaggtacaaaagtgattaaaagaggtacaacagtgattagaaagtgggcattcaaatagagcatttatggtaattaaggaattgtttttaatcaaaatagataaaaaatcgatgtgttatatttttcattttttaacatataatacactttttattaatgaaaaacaaattatgaaatgtataataattgaatagttatttcaattgaaatgaaaaaaattttacaattaaattttaaaataatagctgaaattctttaattaaatataataaataatttaaatgaaaatcattattcatcaaaaaataatttaattaaactaaaaaaatttattattaataaaaccaaacatttaaatttattaaaagtaatgaaaattaacccaaaaaatacaaagaaaaataatgtacaccgcccggcttcgaacttcgcccccccccaaaaaatgatgcctcagaatccccaatcacacagggattctgaggtcttgacgatgtcaaaagtaaaatctgatcacgtattcgtgatcagcggcccaaaaaacccctaaagacatgtttttggaagatttttggtgaaaaatttttttcacttaaaaaccatgtgctcccccctttggacccgaagcacaaaatcacttttatttttatatctttttttaaagaagtgataaaaataccaaataaaatttatataatagagcaaaaaattgcggatttttgtagtattttacttttacagaatgacttttctgaaccgagttctaaatttttttctgaaaattcgaaaatttccagaaattctggaataactttttttcttttgaacattataaaaccaaataaatctcataaaattctcccgattttttgctatttttagagctttaattcacttaaattgaccaaaccttcactgagcaatgaatttcaaattttaacccaatttccaaggaccaaaaaattaaaaaatttcgaaattttaaaaattcaaaaatctgaa

SEQ ID NO: 14720 - DNA, 1376 bp, Heterodera glycines
  unsure (1)..(1376): unsure at all n locations
gacaaatatttaattggttggctgctcaatggtctcctctaattagtcatttattctcgtcccctcccgagtccaccctccgtccaccgattgatggtgtatcagccagcgcgagcgtgtcccccgccccccgtctccccgctgattatttgcagcaccccgcaaggggggggggcactaatgggggggggacagcgggagacgcggaggattggatgggatgggatacaacaacatcacacactgcagaacaacacatcattctcagccagcacatcgcccccaccttccccccccccgcccattgatcaatgtacgagattagtggaggtggtggtgaatgggagaatgtgggggggggggggcgaagacgaaaaaagaaactaatcaattttaatgggtaaattttcaaaaaaaaaatgtcaaaatatttatgtatgcatgatgaaaaaattaaagtccaaaggcaaaaaaaaatgcactgaaacctaggggatatgccaaaaaatcaagtaaggaatcaaaaaaatgcaggatgactgaccccttctcgatttctaattttttttaattgggtaatttttaggtaaattatcgggagacttaacatccgtgcagaaggaaccgttggaaacattttatttattaaaaacggtataaaattttaaaaattgctatttgctgtatatgtataggaaattcaataaaaatgcatatttaaaaatggggttgttaggttatagggacaaccaaaaaatgggacaaataattgccccccccccacaaaataaagggcaaataataacccccaaaatgacaaaacatcgattaaatagtgtttggtgttgtgtctttgaaacagaggtaataacaaaagtcaaggtcgtctccgtccttgaaaataaggacaatttggcgggtttttgtcgcttcccattttaggcagtaaaataaattcaaaaaaaaaaactgactaattaacgccaaaaaattgaaataaaaaaaattatccccaaaaaggaaaggcggcccataaatttttgtttacatttggccaaggaataaaaggcgaaaagccattttaaaacaaaataaaacacacaggcaacgaacgaagaaaattgcgaaaagaacggcggagggcgaaaagcgccgaggcaattccatccatccaatcattcacatccattcattcatacattccgctgattcactctctcttctcacattcattcccctccattccccccatttctcacaacctcaaggaggggaggggtgcccccaccacccccggaggggtcgcccaatcgccgatcgattcgacgaccttttcagggngggggggggggaagaggagaaaggggggggggggg

SEQ ID NO: 14721 - DNA, 2650 bp, Heterodera glycines
  unsure (1)..(2650): unsure at all n locations
ttttggacaaatttaagtcagaaatgaaggacccgaaaacctgttggatttcacgaaatccgagaatcctctcgctgctattacataaaatctaataagattttaggccttttaaaaatacagttaagtaaatgcctgtttgaatttctttcctatggaatttagaaatatttattttaatttaaaaaatactttttttgattttttagtattaaattcaaagcatttcgtatggtgggaatcggtgaagtgtaaaataaaatgctggccaaaatgaccgacttttagcaaaagttggcatttgtccctggggcaatttgttgccggccctttgggcacaaaagcattgaaaaatgttaacaatggcattgacaaattaaagaatggaaatgtggtgagaaaaagtagagcttgacattttgaaaaaagctggacttggattccgtattggacctggacacggatttcctggacaaaaacccaggaaaatccaggttatccaggcttgtcatggcctgtatcccctggcatagacctggatttttttaaatttattttaaaaagcaaacaaatgattgaaaaattaattaattgtttagtaaaacttgaaggtatctaatgacaaaaattatatttttaatttatttaataatttttgataacttgatacaaaacccaggaaaaatccaggtttccgaaaaatggcctggacctggatcgaggaaaaatctaggcctaaatccaggtccaggtcgagccctagataaaagtagcaaaaatttttagaaattttcatttaataataaaaagttggaaattgttatcagggaaaatgtaaaaaaaaatttaagtaaatcgtacgaacaaaatggcacttggattttacgtaccttaacctgtgaaattttggaaaatttcctaatttctaatgaagaaaaaagctaagccttatttttggccaaaaaccaatggctcttttcatggcaaaatttgccgaaattaaaaatgggcaaaattctggaaaatgtgagtgagtaagtgggtgtgtgctgctgtgtgagcatttgtcaattttttggccaagtcaatgggagagggggggggggggtcaatggccaactgcgaatgtccatttagccatccttcgccacaaccccctcccaacactgtgtctctctattgcttcgttactggtggggctgcttgctgctcgtgatgaaagatggatgagtaaagcaaagtgagcgaaaatgaggggagaaatagcaggttaaaggaagagaaaaagagagaaaggagggagaggaggacagaaagaggaagagaaagcggagagatagaagtcaatgaaagagaaagagtgagagggggagagagggagaacagagagagaggaagataaagagaaaggagagaattcaatggaagagaaggagagagggaagggagaggagggaacagagagagagaagaagaggagtcaaagngaaagagggcaatggaagagaatgatacagagagaggaacagagagaggaagaaaaagcagaaggatatataggttaatgaaagaggaagagagagagagagagaggaagctagagtgagggagagacaacgaggaagagaaagagagagggagagagagagggggaagagagagagagagagtaaaagaaacatgatagaacgagaagaaagtgaattttctaatttgttggcttcttcttcttcatatttaaaaaatataattttaattagcttttcaacaggtcaaaggttgaattggttgaaacggaattgtcggaacagaaatgccagttttcaattcaaaatggctttggtatttggctttttgaaaaagatatttgtttttctttgttattgtaggtaggtggtacacttaatccacaggctcaatttcccgcggattggcttacacttttgggctttaccctccccagcccattcgcttcatcatcaatttcacacgcttgaaataatggagagagtgtgtatgagcaagaggacaaaatggaaaacgggcagagtacagcagccacaggtaaaaacagacggcgagaaaagcattgagagagagagcgagggagagagaagagaatagagagggagagagaaaaagtgatatatagcaagagaatagggcagacgagagaaaagcattgagagagagcgagggagagagaagagaatagagagggagagagaaaaagtgatatatagcaagagaatagggcagacgagagaaaagcattgagagagagcgagagagagagagagagagagataagagatgaaatgcattgatagagagagtataagacagacagcgagaaaagcattgagtgtctgtgaagggttaaggacagacagcgagaaaagcattgggcagagaaatcgacagtcagagaaacaattttcaaaatcgatgaagcctcacttttccttggggttgcgtaattactactaagctgtggtcagtgtggccactgatgaaaagcggggctctggccatttggccaccctcggcagcagcaggcggaagcgtaacggaacacagcgcaaaattggatacataattaagaatctatttttggcacggcaagccaattatattttacaaatgaata

SEQ ID NO: 14722 - DNA, 2987 bp, Heterodera glycines
tgggaaacaagttgaatacctatttcttaatatatagccaccatgggtttcatttttcaaccccccccccccctcagaaactcagaagggggaggctttaattcaggggggggctgtattagaggaaatacggtaattagtttcccattaaaatattaagacgcaaataattaaatttttttttttgtaattttttgggctcatttttggtggaatccagttggtttggttggtgctgggacgttagtcaaaaaccatcaaaatgggcgttagtcaaaaaaccatcaaatgaaaaatttttgtcagaaatttatttataacttagcctaatatgtacgaaattttaaactcttgatatttttcgatagctctaagtgttttctattatcatgcaaaattttagaaaaattaattaagtttgaaaaaagttatgacttgagaagctcagaaaaccaagtttttttcaacatttttggccataacttttttgagacttaatgaatttttttgaaattttgtaggctaatagaaatacttagggctatcgaatgatatcaagattttaaaatttggttgcatctgagcaaagttatatcaaaaaatcttttcatttgatggttttttgactaacgcccattttgatggtttttgactaacgtcatggcaccgtttggttgggtaaaaatcaaagttcttttttctcataccattgcaccgcctcccccacacacaccgcaggaggaacgcgttgccgactgccgcaccaagcttggcgcgctcaaggaacgcattgcgatggcacgcgacaaggcgaaccgggtccgtctcggcgcgcactttgagcaacgcggcggcgttggcgcatttctcgagttgccgttgtcggccgcggacgaactgtccgtctacaacgacatccgcttcttcttccgcacgcgcgaaacaaacggtgcgttaattgttttttaattgttcattttggcgatcgacacattttttttaatgaacttgcggaacattcgtcctgcagagaatattaaaaatttaatttttgtttttttttactaattatttttcacaatttatattttttaagatttattaataaaattaattttgcattttaatattcttttgagattttctaataaaaataaaatgctgaacagtttataacccaaaaaaaaaaatccaaaggaatttcttaattaaaaatctaaaagatttttgacagaaaatatttttctaaataaaattaaatataaaacacgctctttttttgggaagcagctcgtttgtcgtttcccgccccctcctttaaaaaaatcgctagaaaaatcctaggggtttttttttggggaatttctaattttgatctttgcaacctactcacaaaaaaatatatgaaaattcaaaaacaaaatcttcccaactcttaaaggccaactgctgtttttgggtgcggacaatgcccatctgtccggcgaatacattggcgtcgagttggaaaatgagcgcccaaaactgacggttagccttggcgcgcgaagcgtcgatgcggcccagttgcaaacgcccgtcaacgacatgcagtggcgtgagctggtggtcaagcgtgtgggccgcgctgtcacgcttgcgctcagcaaaccgagcacggacgagcgcgcggaggaaaaggtgcgtgcaattcctgcttaagaatttttaaaatccgcacaaattcaataaattttgattaaatatgttaataattattgtcagaaattttttttattaattttggcaaaatataattcaattatacaattaactgagggtgcaaagccataaaatatagtcattgaaaattttttgatttcaagtcttaattaagtctttttttgggggatgcattacgttttcacccccgcatcgctccgtattttttttttaatttacaaaaaatattttaaaaattttgttataagaatatctcttaaaaaaatttgaaaattttttcactatttaaaaaaatatatatatttaatggacttatttgtttgtaatttatcatcaaatattgaaaaatttgttagaaaattttgtttgtttttttttcttgaaattttcttttattttcattattttttaaaaaggttttaaatttggaaaaaatttttaatttttcgctcttcttttggttctctcattttccattcgttgtacttcttttaaatttttaataaaggtcaatgaaatttttgttcaaaatattataaaatatactaatttattcataaaatttaaaaaaaaaacggttaaacttttaatttttcctgaaattttttaagaaaaattttaaatttttaaaaattttcaaatctttattttttttaaaatttcagtcatttactgttggtggacctccacccaaatcggtgctgaatttgtttgacgattcgcgccgtttgtttgtgggcggcacgccgcgcgacttccgcatgcccgccacgctgaagcagaaccaattcacgggcgacatggacaagctgcgcatcaacggcgagctggtcggcttctggaacagtgagagaacacaggtgtggtaactatgcaatttttgaatatttatttatacaaaatttattttgccatggtaattattagggatggaatttcatgtaaatttgagagttttttaaggaatttttcttgaataccccaaaattaaacatttttaattgctactgttcgaattagcttgacaaattcaattcaaattttttgttcagctacaataaatgtaggaagaatatacatatttataataaaatcagaaatgttttttcgagaatttttataaggcttattaaaaattatttttattattaatttatatatatttttacattgtatccaatagggtgtcaccggagcggaaatgcgcccgctggcggacgcggagcgcagcgcggaaagcggtgtcagcttcaacggcaagggct

SEQ ID NO: 14723 - DNA, 1201 bp, Heterodera glycines
  unsure (1)..(1201): unsure at all n locations
ccccccgcccactttttccatatatggctttttccatatatggccctaaacttggctggttctgagttgacccgcttcgaccggtgaccggacatttggacagtggacatctggacagtgaatgcaaaattttgaaaataaaatacgtaaaacatacagtcatggtcatatttcaataaattttagacaccgaaactgaagttgccatatctcagcgagtataaatcgtataaatttttggtcttacataagtattgtagagtattttgtgttctttttgattgcttactcattatttccaaaaatttgccaattccctaggaattttttttttcaaaaatttctccgtttttcagtgtattttggggtgttcagatcatcatgacgaactgatctgttcaagtttgaagaaaatacttttgatcgctaacataagcaggaagttttcaggaatttgactaaaattgtctgttttatcaccagctaccaaaaccatgaccatgacagtatgatttacgtattttattttaaaaatttacattcannctgttcgtaaatgccnactgtccccaatttccacttctgtccatatgactttcattgtcctaatgtccactgtcgaaatgtccactgtccaaatgtccgggacatattttggcgtttggccatttaaaaaatgttttttttttcgccaaaatttgcctactgtagtttaaataaattataacgtaataataaacataaaaattaaaacaaaaaattccaggcctgcttttcttcatgggcaaagaccgtgatcagctgatggtggagcttgttggtggtcgaatcagtttgtcatttgaccttggctcagggcttggcaaattgttgaggtaaggggctataaaaaaaattttttttgaaaatttattaataactttttccagcaatggccaacggtacaacgatggaaaatggcatcttgtgcagatggatcggcaagaacgttcggccaaactaaaaattgacgacacggataaagtgaggaagaaataattttttgcatattttttgtttattattggaattttaggtctcaaaattttcttggaattggaaagataattgtgttttctatgattaaaaatttaaactttttactcaaattacttgatcaataaacttaggtatctattttaagtcatatttttcttgaact

SEQ ID NO: 14724 - DNA, 1101 bp, Heterodera glycines
cctcttagaagtcccagaaggaatttccaaggaccacgtgcatcattgctacttcggtgccttaacggcattttaacgtcaaaacgcccgacactagtgcatttctttagacaacgaaaattaattctcgaggaatttcccaaagccacgcgcagcttcgttagaccgacgccgaaacggcaatataattggaaaaggacagacaacaacgcttttctttatatcagctcgacggtttacaaaaatcgaaatacttcctgagtactttccaagaaccacgagaataaatatcgcactagcgccaaaatcgaacaagaacgctaatcatcagaatcatcttaattttcccccagtgatttgtgagtgataagaaaatagaagaaattcagggattaattcctgaggaatttccaaggaccacgtgcatcattgctacaacggtgccttaatggcattttaatgtcaaaatgcccgacactagtgcatttctttagacaacgaaaattaattcttgaggaatttcccaaagccatgcgcagctttgttagaccgatgccgaaatggcaatataattggaaaaggacagacaacaatgcttttctttatatcagctgatggtttatttacaaaaatcgaaatacttcctgattactttccaagaaccatgagaataaatatcgcactagcgccaaaatcgaacaagaacgctaatcatcagaatcatcttaattttcccccagtgatttgtgagtgataagaaaataaaagaaattcagggattaattcctgaggaatttccaaggaccacgtgcatcattgctacaacggtgccttaatggcattttaatgtcaaaatgcccgacactagcgcatttctttagactgtcgcgacaacgcgaaatcctaagataaaacccaaaataaaaaagaggaaaaataaaaaacaatagaaaataaaatggggaaaaataaaacataaataaataaaaatatttttacatttattttggaaaaataatattataaaaaactatcgaaaatataattacataaaaatgaaaaaacctttttgaatgaataacggaaaattgtttgaaaagg

SEQ ID NO: 14725 - DNA, 3510 bp, Heterodera glycines
ctgtcgcgacagcgcgaaatcccaaaataaagaaggaaaaaaaataaaaaacactagaaaacaaaatggggaaaaacaaaacctacataaacaaaaatttttcatttaatttggaaaaacatattagaaaaaactatcaaaaatataattataaaaaatgggaaaaccttttgaaatgaataacggaaaattgtttgaaaaggaaaagtgcatttcctcaggaatgaaaggaacgaaaattaattaatattaaatggcgaattctgttaaggattgcgttcgtaaacaaattattaataattaattaaatatattaaaggaattggaattgcaaaggaaaaagtggaaaacaaacaattaatgggaaaatggcagaacccaaacggatataacaaaaacagattttaattaaaaattataaattggagcgtactatggtttcaaaaaagccgtataaaaggggctgggttttcagtgatttcagatcgctcattggttccctccgaagtttccattccttgcccgtgccgtgctctgcgccttccctgtgccgtgccctgcgccttccccgtgccgtgcccgtccgcctttcccgtgccgtgccctgcgccttccccgtgccgtgcccctgcgcctttcccgtgccgtgcccgtgcgcctgccccgtgccctgctccttccccgtgccgtgccctgcgccttccctgtgccgtgccctgcgccttccccttaccattcccctttgtgcccattttatcatgtcggatttatttgttcattaattaattatggtttaattacccaagtttgagggtacaaaataaagtgaatttttggcgccttgggtctttaaattttgtcaactcgctctgaatacgtccgcccagcccattcaaacttttttgccgtcatcagaacgacaaaagtggtgccacgacccgggaccaacagaaattcgtccatttgctcatcaaaacctgaccaaacgtccgttaaacattcaacctaacaacaaaacacgagtgagctgaagcagttgacaaaatcaaacaaaaataaaccaaatcaatcaaaaaaaacacacgggtcaccaagcccaattaaaccaaacaagcaaaccaataaacaaaaaataaattccaaaatacttcagtgaaacgagtgacccgcgcaagttctcgcccaccagtgagcaaattgaatcaagaagtggcgaacaaagaattgaaccaaattttgaaaaattaaaaattttgcaccaaaaatggcaaaatttaatgaggcaaatgaataaaacagaatggaacagtgaatggaaactacaaaaaatattccgggaaaagcataattatttaaaaacaattaaggaaattgacgaaatccttgacacaattaaggatataaatttggaggtaaaaagaaggctgaaagcgctcaaaccaaattccccttcagaatccgacctagagaatgaatcaattgatgaagagcaagaaaacgatgatgaagaagccggagaagaagaagatgaagatgaaaaggaatatgatagtgatcaagaagacgaatcacaagaaatgcattcaagtgatcaaacacatcgtaatcgcataccatttgttcatcaacgatcaagaataaagcttccggcacaaactctaactcatttttcgggaaaattttcccaatggcccagtttttgggacgattttaaatcctcagtacataatgatccgaacatggaaaatatacaaaaacttaagtaccttcgtggactgttacatgatgagccttatcgaattgtatccccatacccccttattaataaaaattacccaataataataaaattgctgaaatcacgttacggtaaccccgaattaatcagagaaaatcttcacagtgaattacgtaacttgaaaaggcctagtgaatccacgattgaattaagaaaatttattttactaattgatcgaataattttgcaattaaaatccgaaggcgaagacataaatcatccccaaattaagcagtctatagaaacaaaacttccatataatctaagacttaaattgagagaaaaatttaaaatttattcaacaaagcagttaatggactttttaaatgctcacacacaagcgcgtgaagacatggaacgaatggaagacttaaatcgtcaaatccggaactttccttctaatcgaccaaactcaaacaggatacagagacaaccatatcaaaatttctctcaaaacaaaccaaaatttaaccaaagaaatcaatatcaaaccccaattacaccttttccatatacttctgcattaacaacaaaatcaaaaccattgcatccggcacagattaaaccaatacctacacaaaccaaaactcaatataaaatattttgtcgtttctgtgaaagagaaaaccatacaagtaaagaatgtaaaatatattcaaccccggagaaacgaaatgaacgagtacgtgaactcaaactttgtctcaattgtctaaataagggacatatggtcaatgaatgtaaatcgacctatttatgttataactgcaaacacaaacataatactctcctgtgcactcgtaaacaaactcagtacaaaacgaaggaacaaaaaaccagagtgaatatggctcaaaattacgaaaatcatgaagagactcagacattcatgacaatggagggtgataaaaatttaccaaattctgatgaagaagaattgcttatgactactgaagtaaactgcataaatcccgacaaatataaagtaaaaagggaaataattttgtttgataatgggtcacaaaaaagctatataaccgaagaatgtgctcagactctgcaattaaacacgattgaagaaaagttattagcaatttccacttttcaaccaaaataagccaaagatcattaaatcaagactagtcaaagttggtattaaaacattaaaaggtgaaatagagtacataacactacaaacagtagaaaaaattactgatgtcacaaaaatggttaataaagaaactgttgatgtacttggagtaaaaatcccaatcagtcatgcacgtcctcaaattttaattggaatcgactattactggcacttcatgctaccaaattcacaaattcaattacttccatcaggattttactcaataaatacaaaattaggaaaaatattatctggaaaaggaactattgaggacaccaattgtaactcagtgaccgaaaaaagaaaaaaagacgaaacgaaccaaatacttcagaaattttgggaattagaaaacattggaattatcgactcaccacatatgacggatgaagatgcagcaatgatacactttgataaaaatgttacatttaaaaataatagataccatgttcgatggccttataaaagagagaacccgaatttaccaacaaattttggattatgcatgggaagactaagaaatgttgttaaacaactaattaaaaacaagcaattggaaaat

SEQ ID NO: 14726 - DNA, 1515 bp, Heterodera glycines
  unsure (1)..(1515): unsure at all n locations
ctgctattcgatgggcgtccattttgcaaaaaaatttttgaaatggccatttacgaccacggcacgggagtcctcgtacacccttgcgcacctggatgatcaaacattccatccacctccccctcctgcgctttcaatttaatttttaaatccacccgtcgctctccgatttgcccagtcgccgccgcctgtggaactccatgccaaactgtgcatgccaacaatacacatcgaaagctggttttcggcctcatcgccttcatgcacagcgaatcgtccacaatttggcccttcaaaacacactcgacatgtcgcatgcgaacgccgttgccacatgacacagaacaatggccccatttggcggcacgccttcaaaaaatccaacgagttcgcccagttcagcacaaaccattcatttcttaccaatatgggcatggccccggactacacactttgtagctttgtggcttctccgtctgctgttgttttttgatgcccatacacttttggtccgaaacttttcgtccttccgaatccacgcattggacaaggcgcgtttggaagccgtcctggccacaactgacggaacatggactccacgtgccgagtttccttagaaaatgttcaaaaaatttagatgcccgttcattttgcgatacaaaattaggtcgactcgaaaacttattgactgatcaatggtgaataagcttttgttggataacaaaaccctgataaatgaaattggattagccataattaactgaccaatggggacaagcggccatttggcattgcttctccacaattcgttcccttggttcgcaatccttctcttccaatcgttgcccatcaggctcacgaacgcacatgccctcccgtcgctgaacaccatcaccacaactgaaaccaaaacgaaattcaattggtcggtcttgatcggataagggtcccggattcatgctctattccttttgaacggcttcacacctcactgagcaaggtgaccattgtccaaagtgccatcgtgtgcacgagtgttcattgcacttctctgagtccaatttgacttcagcggcacacattcggacgtccaactcgcgaccagcagcatcttggcacgacgcatggcgcattcggagtccaccaccgcaagagcgtgaacactgtgccataataatttttgtgccataataatttttaaacccatctgctgctgctcggctttcccctcctcaccctcacctggtaccattgtgaatacacccaacgtgggcaaggcgttcggttgcactccgtctcgatgggctcgtgtggcactccctcacagaaacgggcgtccaatttgtgcccatttctcgtgtcaatgcaatgcaaatttcgtctgctcactccaccggcaccacaactctcggagcactgattttaaatttaaaatacaatttaattcaaacgattaagtaatgtttgttaaaagtcacctgactccattgcgaatatgcccagntcgtctaaaaa

SEQ ID NO: 14727 - DNA, 1998 bp, Heterodera glycines
  unsure (1)..(1998): unsure at all n locations
ccacccgggcgcggcactttcagtccagccgctatacactccgtctcttccgcttgctcatccttgcccgcgttggtgtaagagcggacacagatgtactttaaaaccagcggggagaatgtcatttaagcaagcaaatatggataaatttgaatgaaaatacggctgggactcgactcccggcgggttgggaaaagccaggggtcgcttttcggggtcagcaaggtcggggcccggattggaagcgtcgggacaggggataatcccgaaaaatggccaaaaatgccagggtcccatctcccttgaatgaaatccttttccaacaaaaaacacacctgatgccatttttttcccgacgaatcagtgttaagtctctgcaaatatttgtaaaaacagtccacattgcacattcgcttttgtgtgttcggacgcacgaccgcggcacagtgggcgtccataacaaaattgttggagaatgcttccacacaacggacatgctgattctgtgtaccgggagatttaccgagtcggggacgaggaccgagaccggttagcaaaaaaaaaaaaaaccgtgaattccctgagttgggaagcgaatcaaaagaagcaaaacagaaaaaaaaaagtgagatttccctggacggggaccggaagtgcgaccatgaccaaaaaccgggtgattccccacgttggtaacggaactgcgaccatgatcaaatccgggaaatttccaagttggcaaccggaactgcgaccaccatgaccaaaaatccgggaatttcccaagttggcaaccggaactgcgaccatcatgaccaaaaatccgggaatttcccaagttggcaaccgggactgcgaccatgagcaaagatccgggaaattccctgggtcgggaaccggtacactaaaggctccacctgcgttccttggcacttcattgagcattctgtccaattgttttccgcctgccaataaaagctgttgctccctgcgttgtgttgctctgtttcgtttgaatttgttgtgttgctgctgcttcagattttgtactgcttgcaattggtgtcatgaaatggtagcgaatgttcggcttatttatgttgcncacactgagcacatgcaaataaatgtccgatcgcagcggtccactgccattgatgcgttcaatgggcagatcacttccggaatactgaaaaggagcgaacactgggactgctgttgttgctgacgatttagctaatccttgagcaacaaactaatgtaaaggtaagcaaacaaaggccgtaatcactgcaatccgtaacccaaaatttttaaatgcatttaattttataatgagacaattaatttaatagatatttaaaaaaattaatttaatattttccaagtgaaaaaaataaataatttgtgtttagtttaaaaaagcaatttagcaaatagattttcgctaaatgttattttatgagttttattttgtccacccacctcaagcacagtgtccaatattgggatttgttgacgaaacaccgacacttggaattgtccgttcaacaaatactctccggtggttgtgcgcaatgccaaataattgtcatcttcttttaatccattgtgtgccgtctgtgtgatgtcaatgccagcggcaccttgggaggggagaagataatatggcattttgtgctgaaatatcgagcccatggggtatctaaaaaaagaaactttttgatccccccccccaccacagcccgacgaaaaatttaaaaataaaattataattttttaaatttcatatatttaaaaattttgaattgaagaattaggttttttttaaatttttctctgaacatatttagtttaaaaaacaataaaaaatttgatgaaagaaacctgttttttaaatttttattttttattacaaaaaaagttattttaaagtaaaatttttgtcaggtgtagaaataaagcttctctaagcttcggcgactaatgtgtttcgga

SEQ ID NO: 14728 - DNA, 2328 bp, Heterodera glycines
aaaaattcttattgacccaggaatatgtggacgaagaattgaagaagtacggcgccattctggagaatgcgcacgagagtgccaagcaggtgaccgagctgcgcaaccgggactggctggactcgccgtgggacgactttttccgtggcaaaaacccatcccaattgttgcccaccggcattgagcgcgactcgctggagcacattgtgaacaaaatctcgcaagtgcccgacgggttcaacctgcaccggggactgcttcgactgctcaaaggtgagctggccagtggaatataaaaagtgaagaatttgtttctttatgggttcgttcttggaattttttttgcatcagaattccattggtcttacaattaatcagtactaatccatttttactaatttgttaacatttttttttgtaggacgaaaagaaatgctgagcgaaaacaatttggactggtccattggcgagtcgttggcgtacgggtcgttgctgatggaaggtatgtgggtttcctgttttttttggatttggttggagtaaattccgtcttaaattgtgccaggaattcacgtgcggttgtctggtgaggatgtggagcgtggcaccttctcccatcgtcaccatgtgctccatgatcagaaaattgaccaaaaaacgtacaatccgctcaacgacctttctgaggttggaattttttattttttgagcatttttatcattaaacttttttctatgccagacccaagcggagtacacggtgtgcaattcgtcgttgagtgagtacgctgtgctcggcttcgagttgggctactccgtggtcaaccccaactcattggtcagtcagtcctgtatcggggttgtcatgggactagaaaaaagacgtgggacgatacgacctaaagcctggatcgaaatccgggacgaccgaatttgaaatcgggtcaggatggtcaaaatttcggcattggaatttgggacgataaaaaatgtttgaattcagtggtaaccctggtcaatctgtaaaacgtcattatattaatcaaaaaaaaaatttgctaaggtcatttgggaggcccaatttggcgactttgccaacaccgcgcagtgcatcattgaccagttcatctccagcggacaagccaagtggattcggcagaccaatttgacactgttgttgccgcacggttctgagggcatgggaccggagcacagcagcgcacggccgggtgagtacagcttacttgtatttgtgcatcggatggaggttgaacggcgggttccgaactaaggaaatcccagacatttcaaggttcggaattccacattttttgggcgaggggcttaaaatggacatgatttggatgggttaatccacacaattacactatgtttaaggacaacaaaaattttgtccacaaatttcccaaaattaaaaaatatatattttcagagcgtttcctgcaaatgtgcaacgaagatgatggcatcgacttgaaggtgtgaaaaatggaatttaataaaaatttaaagaaaattcagagtgtcgctttggacgaggcatttgtggcccgtcagctgaacgagaccaattggattgtggccaactgtacaacaccggccaacttcttccatctgttgcgtcggcaaatttatttgccattccgcaagccgttgattgtgttcacgcccaaagtacgtgcatgaaaaaatgaataactaaaaaatttggaatttttttatgcctagtaatcctacgattttttctaaataaaataatcaaattaagttgaaatttgattaattaaaatttccagtctctgctccgccatccgttggccaaatcgccggtggacgactttttgcccggcacatcgtttcgccgtgccatccccgaggagggcagtgccaccaacaacccggcggccgtggagcgactcgtcttctgttccggtaagaaagcgttgattgatcaatcaagagtaaagttgttttactataaaactttgtggcgtgttattacggaaatgtttttttcaggaaaagtttactacgaaattttgaccgagcgcagaaaccaaggcctggatgataaggtaaatgaatattacgactgttgcaaattgcaattccaaatgtggtttgtcaggtcgctgttgtccgcctggagcagttgagtccgttcccctacgacattttggtgtccgagtgcaacaagtacagcaacgccaaagtgatttgggcacaggaggagcacaaggtgaacaaaagttgtatttatataagggtgtgacaacagaacaaggagttcgaaccccccccccccct

SEQ ID NO: 14729 - DNA, 1017 bp, Heterodera glycines
  unsure (1)..(1017): unsure at all n locations
cagaatggtagcgcggcatcacaacaaaagccaatccgtgccctgtgaagggaaaacgagggcgaacgtgccaaaaccaaacgaaacaacaaaactaataaacgaaaggaacacgatcgatcggaggaaggaaggggaaaaggatggggaaggggagggaaaaaggggggggggtagggaaccgaccgacaccccccgggggaacgacggatcggacggaggagcaacagcagggaaagtcggggaaatagacaaaattctcgggggaactggtggatggacggacggatgctgatcagagttagaaccagccaacacacaaaacaaaaccgaagccaactcatcccacccgtccgatcactcccccccccacttctcgctccgcatccagtgccgctcagatcagttgattgcgccttgcgctatgtcttgagtggagggagttgaccatcgtctgttcgatgtatttggttgcgtttttcagtgcaaatgtcggccagcggtctctgatcatgtcaaacatcttttcgtgcgtggactgcgacttgcacgtaagctgacaatgcataaccggaaacttccgttttccaggactgaaattaggagaaaaacgattgaaaaactagattggaaaaaaagtaccgcgccaatatgacgtatagttgcgaagagcgtcggtgcacttgcgaaagttccatcggcgtaaatatactttatttggtaatcccaatttccaaaagaaatccgaccaatagtcaaaattcttaagtttagaaaaatatgtgaaaagctccctttaaaacactgcgctggtgtccgtctcgaccattctcggtgnatgtttcataatacgccaaaaggaaaagctcctgggcttcttcggagggggttgtgcattcgtaactgttccggaagttccaatcttgaagggttggcggcactggggggggaattcaatttcatggggggctccctttaccagcttaaaaaaaaaaatgggaaaaaagaaaaaaaaaa

SEQ ID NO: 14730 - DNA, 2954 bp, Heterodera glycines
ccccctccctaatgagtaattaatttctaaattggcccggtggttcatgttcgtttttgatcctctcaaatgcttctgcaactctctggcgcatgtgctgctcgctgagttcgaaatcagtggccaaacggatgtagccttcatgaagggtcagcttaggacggatgaagcgaattgtatccttaaaaaacaaacaaattaaatgccttttaattaattgcccattgatcaatggctgatcggacagttattcgctcgattcactttgcggttgtcttacgattgatcgaccctttccccattcgatcagttgcttcttcttccgttccgtccggtttgctcacctttagcgggtacggcagtccctccttcagtccccgtgccaattcggggcccaaaaatgtcttggccagcggtgccatctgtgagatcacttccggctcaatgggaatcgcggagcggtgcagccgaatgttcaatttgcgcaatttgaggtctccggcaattttcctgtcgacggcattcagtcgaatgtccgccattccttcggcagatgaaacgagaatttgccgatctcgacgggtggcattgtccgagacaagggtcaaaatgcgagctgatcaatggccaacggggagaagggaggaataatgccaaggaaatgccgaaaaaataatgccaaagaaaaacgaaataccaaaagcaaatgcaaggccataagatacccaaccaaccgttcaagtccattgtgctgcgtccattatgaaaatgcatttcgggcagttcgtggggaagcatcacaaatttggtggtggagttggggaagtgtttggccatggccgggatcaatttgccaacgcaaatggacttaaacggaccatttaatcactttcaataattaagttattaatcctttcatttttgcacctgcagaaagtctccattgacctgctcaatgtcggggcatgttgtgcttaagtttacatttactttgcccgaataattggccaaattcaccgcacaaatccccggtacatttggggcaacgatgcctcgttgaccttgacaaattgggccatcaatttttgattgattttttaaaatttactcgaatggtcagccgttccatttgataggcatggtaaagcatcgaattcagcgtgtaatcggaggcgtacaaatacaacattcggtcagagtcctgcagcatttacccattcattggcaaaactttgaaaatggaaattttggcactttatcggttggaatgggacgagggtaaaagggaatcggagacggcgaatcggcgtaacgtaattcgcctgaagggaagcaaaagccgagcatgggcaaggtggaaggaagtagaaacggacgaaacacaacctcgttgctgcgtttcgaagaagtcgttggtgacaattgggtcggccacctaaaaatgggtggaaaagtgcctttggatggcgattgattaatttgcgagaatctcgaagtgcaaaattgacggcatttaagctggtgggcagggatggtaggggtccgaaaatttttgaggcttcagaataccattcctggtgctggtggggtgggatgaatgctaagcccgcggtcgttaaccattcctccgtttcccccttcctcagtttttcttctccccccccccccttttttggtaccattcgtccgtcgatgaacagtccgtcggtgaaccgttgggtgaatctaacgacaaaacggacaaatgcttcagcgtttggccaactcctcggcttacttttcgatcactccgctgccattgctcagcatgccgaagtgttccttcagcggaatgtaagtgagtttttggaaaagcagtggcgagttgcgctcgacgatgtcgcgcattgagcggcacaaaaggttggggatgcgttgtcggatcagatcgttgatggtcacctacaaagagcggactgatcagcgatgagcgattgtcatcttcaaatcacctcgaatattttgaggatgggccccaaaaggccctccgggttgagggtgaattgcgagtggcgaagctgagtctgacaattggtcaccgccaccgaaatgagtccgtcggcagaggcgcggaactgagtcatcatttgaatgctcagtccctgcagttggccgaacacagtgccggggatttgcagcaggggacccgcctcgcccaagaagcggcccgacaacctgaactcgttgccattctgctgatcacttctccgcccggtctcacgtgatggcggcgtcttggatgccgaaaatgatagaattgggcggcacaaattgcagattggagaaggaaggcggacgataggccaacgtttgcacgtcgctgaggaaaatgttgccgcgaatgcccccctcactgatggcatgctgaaaagagacaaagtgcagaagtcaatgggggggggggggggcagaagagagaagcggcacaagcagaccgaacgatggcattggccaacaattgaattgcctttatcttctcccttttctctgggcccacctgtgcccggaagccgcgcaaattggccaactgttcgttgagcaatttgaccgccacgtttttcacgtgctccgccccttttcgactcagccgaagtttaatgcccgggttgcctaagttttgttttgccgaacttttgccaaaattgtgaccaaatcaccgaccgtagtctctgttccaccgattgttgggctgtggctcaattcgggcctgaagcgatgggagcagaaacagaacaaagagagggaacagaaccatggcgagagagggcaaaaacggaggaaaagcccaaaaagcctttgggggaattgtggcaaaacgaaggcaaagggaagggaaggcggacaagggggcgggggcaaatcaaacgggaaagaaagcgggggagggaaagtggcgagggcgacggtgccgtggg

SEQ ID NO: 14731 - DNA, 3877 bp, Heterodera glycines
tggactacccaagaataaacgaaagtgaactcgcttctctatcccttcggggataattgtcagtgggccgtcctcttcgggcaagacccagctggtccttcgtctgttacggcatgccaacttgatgtttgacccgccgcccaaggcaataggtatgtgcaaatggggtttctgtgcagtgggctgttgttatttagtatgggcatatggtgagtactcgacgcagattcccgatctggagcggcagggagttgtcccccacgcaggtgccccgtctgacgagatgctgaaaaagctgccaaagccttgtctgattgtttacgatgacttgatgggtgacattgaggccaagaagttggccgatctgtacaccaaaaagtcccaccataacaatttttccgtgattttcctcacgcaaaacctgttcgataaatcaatgcgggtgccaaggtccaacgcccagtacatcttcctgatgcgggctcccaacgacatgcttagcattcgtaatttggccagccagatgttccctcgcgagcaggggttcctgatggatgcctaccgacaggcatgttccctaccgtacggctacctgttggtgactctccacgcgaacagagacaacattatacgcctaaggacaaacattttcccagacgacgaggagagaatcatttttgcccccaaaaatggttaagcgggaacagaagatcggtgagcgggttgtgcacaactacgactatttgaagaagttgggaaagacaacgtcggagaagaagcgccgtcatttgttgaacagtgccggttgtgaggaactgttaacgcttgtcgagatttgtctcaacgttttgaacgggagtttctgtctgagcaggaaacaaaagcagagacttgcgccatttgccaaagacatcagacagttggcacgtgtgcgaagtgagaggggtgcgcgaaaactagtgcagcagtcaggcggatcactttttgcccctttgttggcccccattctgattgaggctgcccgatacctgctttcgcgcagcaataatggccaataaacttattctgctgccgtacgagcactacaaggggctggttgcagcgagggagacaaagaatgacgacgacgacattgctgagcggacaaacttgggctttgtcaaacgacaggtgaccgctgcagtacagaagcggaagggaaacgtcagcgagcggaacgcaatgtacaaccagcagctgcgccggtacctgaagatgcgcaaggaacataaggagcggcccgtccgagtacagctcagcaacggcgctcaactgctaaataaaacagtggagacgggtgtgcaggtacggcctggtccggacgaaccgaaggacaagtccgtgatggttaccgacgaagatgaagaggaagaaattgaagtgccaaagtttttaaccccaacaagccagacgcagggaagcagccgatcacccaggaccaataagaaagcggctaaacagcaaaaattgatcgagaagaaggaccgcctgttggccatcattatgtctgatccgcagagattcggcgcaactgaccgtgggaaaatcattaacccaaagacgggccgagagtttatcgactcggacctggcctggtcaattgaacgcctggtggaccctcgcccggagaatgcgccatcgccaagcggaaccaaagagttgaagaggaaactcgcacagaatccgctcgccagtagcctactcaatcgactgtttgttgggtctgggttcgtcggacaagtcaaacaaagcgggcgttttattccctcaaaatggacaagaaaataaacaaaatatacaccgatccggccaatccgagcgggtatgcgggggcgagtgctctgtacgcggcggtgaaggagaagcacccgaagttgaagcgtgccgagtttgaggactttttgcaaaggaacaccacctacacgctgttcaagccaaagagagacaagttccgacgcctacgcactgtgcctacgggtttcatgaccggtaagttgtaccggggcttattgcgcacaattcagggttcagatgttcaggctgacttggcagatttccaagccctttcgcgcaagaacagcggctaccgttacttgctgttggcggtggatgttctatcgaggcgaatgttcggcgcgcccgtaaagagtaagcgcccggtggacatgaaaagggcgtttgaggagctatttgagcaaatgccaagggtgccggacacactgtacaccgatcgcgggctggagtttgtggcaaaaccgttgaaggagttttacgcggagaagggcattcaaaagtttgagaccagttcaaagaaaaaggccgccgtggcggagcgtgccatccgcaccctaaagactcggctgtacaaatatttttccgccaacaatacgtcggtgtgggtggatgtggtgccaaagtttttgagtgccatcaacaactcggtgtgccgcgcgaccggacttagacccaacgaaatcagcgacaccaatgcgagggaggtctggaagagggtgtacggcgaagggctcgcacaattggacaagacaccaaaaatcagagcaggggaaacggtcagaattcccgagcctaagcacattttcgagaagggtattgtaattcacacattttccggtcattttttaaatttttaaggaaatatcgctcatactgcgttcaacttcccccaatcgaggcgccgcgcagtaccgcgcgccatccttcatcccgaaccctctattaggcacgcaccccccacccctccccctcccaccacaccacccaataggcaccgaccccccagctgatcctctctcccttcattgggtcaaattcacttggaaaaaatgcggctttgaacaaaataacagcaatatgaattttcaaaaagagaaccaaagaattaggaccgacaatttaccgagagcaaaaattttcccaaaagtctccgcccctaaacgagcaaaggatgaccgaagcgaaagcaatttgtcgcagaaaccgatagagtcagccgatgtttcaacaatttttgtaggtctttttgcttcatttttggttgttgccaacgcgttttcgaatgtgaaggctaaaactcatagccgccgaatcagctctatggctagtagcagctcgaaattgccggcattatggaatccgttgaatgttgcatttgaaaaattgaggaaaagggaaaattccaaagaaaacggaatcaacagcaaagtgaaaacaccgaaagggaatggccaattgaggacaattgttttttcgaaggctggggaggaattggccgactcaacaggtccaacgacgaagttgttgaaagccgacacagaacgaaaattgtcagccgttgatggcacaattacgaataaagctgcgtcaagtcacgctatcaggcctgttcaaaattgtagttttcgttttttccgcacattttacaggtcaaattatgatgttggtctgtgccactgctgattgtccacccttactgcccctcgatggatttgaagcgctgacgacatcgctttgtagagggcgaggatgtcatatcattgttgatttgaattattttggcgttttgttttagtttttgtgaccctttattttatttttttttggtgtatgtgtgatatatgtgctcttcctaaatttgtaattgattgctgtgtgctgttttattaattggaagtaaaagaaagcagtgaaaagagacagcgatttggttttggatttgggatacaattcccctttcccattggactattctttttcctacgacgttttttttcttgccgttttggtttttgtcattttttcgcgtcctcgcgacgacgtt

SEQ ID NO: 14732 - DNA, 4107 bp, Heterodera glycines
atttcttctccacatttaactttttacttctcattttttagtctgtacggcgtgccaatgtttgtcggctgttgtgccattctttggctttattgggaccgcttcagaaaaccacgaggccatcacaaaaagaaaatgtaaaaaaaaactacaaaatttttttttaatttcaatttaatttttcagtttcatctccggcgacggttggctttgtgtgttcgatttgcttgagccttctcaattgggccttggaattgcacttgtcagccaccgttttgacttttacgtcgacgaacacttcaagacgcggcgttgggcgctcaaagccatggaaattaaagccaaatttgaagcggacggcacaaaagaaatggaaattgtcaattgcgatggaaatccgttgccaattccacaaaaagcattgccaaagaaagtcgtcggaaaaattttcgttgttcgacaaaaagttcgatttagggttatggtgtacggaattagttgaaatttacgccagattcttaatcagcgatgttgaaaacccccggaactattttacatgaatttagacaaaaaaaatttatgtcgggtaaagtgcattagtagtacacgaaaatggggcaattgtgaagattattggtcccacaaaaaaaaggaataaaagaccaaaaaacatgtttttaggggttatttgatgcgttgagcacgaatatgacatccatttcgaccaatttcgaagaggacccgaattcgaacaaaaagtcgaaaactcaaattttcgaattagcacttttattctaaaattgattaaaactagcagaaaataaatcacaggcaattttaacagcaaaaatgagtcattttatgcagattcgaacataaacaaagtaaaaatttaaaaaatttaaatttttgactttgttcgaattctggtctggggttcgaaattagatatcttattcgtgatcagagaccttgaaaacctcaggaaagacttattaaaaaagttatttaagtaaaaataaatttaaaaaaatgttcgtatccgggttcggggttcgaaacaaagtcaaatgatgatcaaattcgtgctcagcgcttcaaataacccttaaaaattggttttttaattatttttattcttttttttgtgggaccaataatcttaacaattgccctaacacagattaattagaagggtaattaagaaaaacgatttccatgaccattcaaaatgaacaatcagatgccatttccttattcccagcacaaaacatttacaaaattagagttgaattatttcatttttctatgattttttaaaaaattctataaagtgtcaactttaacgcacttttgtttctaaacaatttgcataaaacaattaaaaattaattataagaattatttattgagacaaaaattttataatattgtaatgcattcatttttcataaaaaggaaaacatgatggaattttacgaatcgggggaaatgctgagaatagaaaaagacccccaccctacgagggacccaacgacagttcctgcgcctcgggctcctccatgaacgtgctcagcttctccagcagttcatcactgaccacttcgctgctaatggcaccgttggcaaaggggtcgaaattcatccgttggaattggcccgtttccgcggtgaaattctgcactttgtcccacaaattcggcgcgttgtccagtctggcggattccatgtcctctgaacaacgttcaagtcaaacaaaaaaaaaacgtcgtcatggaacacgcctttgaagccgtcgtatctcatcagcaacggggccacaatcaaatccgagtcttcaattgtctgtcaatgaatggagggttagaaatttatgggctgactataaatttcaagtgataccaagagtaggcattgactaacaaagctaattgtaagcaataaaaaattgtggtctaatgaaatagccattgatttggcaaagaaactctggaatagccccaaattaagtgcctttaattttaaagaaaaataccggaaaagcagttttcataaaaaataagaattgtaatgccaccaactgggtttgtgctgcagtgtaagtgcgcctcaatgtcgcgcgaattttgcagacgaaattggtggcaagcagcgagaagaaggcaattggcacagttgcgcataaaaatgctgaaaaaaatataaacatttcatctaaagccgaattcgtcataaaacaatcatatgaccgctttgtatgccaaaatgccccccacggcggacctgcctctgcacgggccgcaaatgatcacacaattgctgcacttgtcaattgtgatggtggcagcgtggccaagcagtacaagcacagagcccttaaggagaatccgaagcgtaacaataaataaaaaaaaaaatgaatgcgatttgttaccgtgcattcgcgaattgcaaatgggttgccatcggctgaaaatactttattttctggggcatggtttaaaaggcactatgccccaaacagagccaaaacagtccgtcccatttgtactgcagtacctgaccctctgaacaccgtctgctcaacgatgccctgaaaggtcgtgtccacgtctttagctgataattggagcgcggaaattgcagccccaacgaatgagttcgattgcgtattgtgctcaaatgtgtcattgttctcatttctgtcatccttttttgggcgtttctcgggtttttgagaaaaagtaaacattctgttagaaaacgaaagcatatcaaattcaatttaaagaatcaaaaacgaaataaaaaatgagtgtaaacatggccaaaatataaaaacaaaaaaccattttgatatttatttaaatccaaacaaacacctaatttagaggggtttcgacattaatttgtattctgatagtttcgaacaaagcttatgcttccgattacaaagtcccaaaatatttgactaaaaaatgcccatcgaaatcccttttccatggtaaagaaacggctaaatgtgtgcaaaaacgtctcaattcgcttccttttcaagtttgttgtactgagcacgaattggcacccatgggaggagaaggtctctgtagggacgaccatagactgaaaagaattttcaaaataacaaaaaagatcaaaggttgaatggctcacaattgttcaaggtcaaatgctcaaagtcttcggggtgcgtctgaacgtaatgcgagacgacggcgtcgcgatcggccatcactcgggcgcgagactttgcaatgaaataagcaccgctgatcccggccgcaaaaattagaattttcatgttaagcgctgaaaaaaaaaatttgacaggaattaaaaacggacaatattcagttacgttaaaaaggccaaaaaaaaatatcgatgacttaccggcgtaccaaggctttcggtaccacaacatgtaataagtcaccttaagcaattaggtactcattctcaatttcataggcaaaacccaccgagcaagtcaaaattccggtgctcgtagcggctattttgcccggaaatgaccaggtgaacgggtcgaacacattgaaaggacgcgccccctccatcatctgcgcctccctgcgcttaatctccgcttcacttatgcgagtggattccatttgagcactacaaaacaaagctacttttgtacaattcatgtcatacaaccaaaatacaatcgtcaaaacgaatgttttcttcataaaacaacaatgtaaaattccattctttaatttacatcgccaatttattgacacacgaatttgtattaatgaatacaactaacaatgaatgtcaccatcacatcaaaagtgtcctaaataatcgccgaaaatttaacggtcgaacttcgcaggaaaacgtccctcctcacggagctcatcccatttctcggtccaaaatgatgggcaaatgtctttgtagacattctggaagaatttgcacggtttgtagtcttcgcccatcagctccttgcagcgaaagaaatccacataatattcttaatttgcaaacaaaaatgacaggatttatcaagcggaattttgaggcaactcattaactcaagcaaaaatt

SEQ ID NO: 14733 - DNA, 540 bp, Heterodera glycines
ccgtgcttcacaccaaaggctccgacttttgctgttccacccccttttcacctgcacattggcaccccgcgtctctccccatatccgtcagaattccgttcagttgggccagcgcctgcggcgtcaaccgtccctccgagtcgcacaccaaagatggcgagccgtcctctgccccaaaatggccagaagatttgcactgttcgtagtcatcgtaaaggtcggccaatgtcaccaacaactgagaaaataaattcataaaaccaattttatgttcaattttgaccaaaaaaaaattaattcccaaaaatgggaaattggcaaattcataaacattacttggccagagaaggtcagtaatagcaaaagatggagaaggtgacgaacacattccatcacagcagtgggtgaattaggtgctgatgctgagttgagaaatggtataataaacccattcgaagacgacaaataaatcagttgattcggtgtgggacaaattgcgcaaaatgcgtaagatgagacaaagcgaaaggaaaaggtggg

SEQ ID NO: 14734 - DNA, 2842 bp, Heterodera glycines
gggtcggggccgttttcgcgtggggcgagttttcgaactataacttttttctttgtcatccaaatcaaacattgttggtatcattcgaaagctgtaaatgtcctttattagccttcaaaattttgaaaaattatgtaaaggttcaaaaaattatggccataacaactcaaaaaaccagattttccaacttttatggccataaatttgtctagggcttccatttttaggcacaaaaatcgcgaaatagacacctaaaaaggcataaaaaatcgtaaataggggtgtattttctgaaaatttttcgggtcgattcttaggggtttatataaaagtcatcctacaccccaaactataacttaagagtagggttgagcccccgacgtcggggttggaaaattcagggttcggggtcgtcggggttggaagcgtcggggttcggggtcggggttgccaaatcgttcggggtcggggtttttcaatttttaccttatgccaaatagtcaaaatttttttaatattttttcggaaataatatttattaattttcataataatacatagttgtattgtttttatattttttaatttcttttttatcagaaattttgtatagaattatttttttttcttgaaattttaaaatttttattactttttttgttttccaaaacatcttttttcacggcgctcttttctaaagacttttagggagaaagggtacggcgtccggcggtgccgaaaatttggttagatctgttaacagattttgtccaaaatatgctaaatttttgcgattttgagccaatttttttaataaggtttatgaatttttgggcccggtgatgccgataggcagcgccaggcaaattttggaattaaactctattttctaagatttttcaccaaaaaaatttatgaatttcggtaaatttttgtttttcttcgatatgtattttgtcaaatatgccaagatttgtcgatttctatgagtatcaatttaataaaaatttggcaaaatggttaaaaaaaattcaaatttcgtctaacttttttgcgttttctcccacgaatgtcggggtttgggggcggggtcgggggcccgaccctacttaagagattgaaattttgtacaatttcaaggtttcaactgttaaaagatcccaaacccacataatatcaaaatttgattcaaaaaaattttttttgttgaaaaatcgtttaaaatgaaaattttagtaaaattttcgaaatttcttttctcagagttaaattaagggaaaatctaaaattccgcctattcggcgcagccggaatcttgtatataattagcactgtttatttgttatttcaggcgaatgctccggaaacttaagcatagtgctagttttccgctaatttctgcttttacacgcagatttagtaaaaatgtttccggctacaaaattgttgaccacactttcgatgccattgtggtgggcgcaggtaatcaacaacccctcaagttattcaaccttttatttatatattatttaaggcggcgctggtcttcgagctgcgatgggtctttcggaggggggaatgaaaacaggtcaatttgggtgtggggttcgcgtaatgtatttttttgtggttcagctgttattaccaaactgttcccgactcgttcacacactgtggcggcccaaggcgggataaatgccgcattgggaaacatgaacccggatgattggcgatggcacttttatgacactgtcaaaggcattcgatttgagggtctcccatgtcagtaattttcttttaggaagcgattggcttggtgatcaggacgctatccattatatgaccagggaagcgccccgggcggtcatcgaattggaaaactacggaatgcctttttcgcgcacggaggagggaaagatttaccaacgcgcatttggaggacaaagcaatgattttggacgcggtggtcaggcgcacaggcaagaaaaaaggacactttgggaagaatggacggggggtttcacttttgagtttaaagggtaggagattcccttcgggcactggggagccttcgccccccccaaccctcgcatttcctctcgcatcgtttccctgaaattttttaaaggtttttttaattaataattaagtttttttaaaagaatttattttccttttccggtgattttcaaagatttttttcagaaacccaagttttccaaaaagattttttattttctcctagaaaaaatcagtaaaaaatttccgtccaaattttctgtccgtatttcgtcccctcctcctcaggacgtgttgtgtcgcggatcggaccggtcattctctgctgcacactctttacggcgcttccctccaatataattgcaattacttcgtcgaatattttgcgctggaccttttgatgtcgcgagaagggcactgtgtgggggtggtggccataaatttggaggatgggtccatccaccgttttcgggctgccaacactgtcctcgcgacgggcggctacggcagggcgtacttcagctgcacttcggcccacacctgcacaggggacggaacggcgcttgtcgcccgggccgggctttgcaattcggacatggaatttgtgcaatttcaccccacgggaatttatggcgcgggatgtctgataaccgaaggatgccgaggtgagctttgagttgtccaaattctaaaaatcttggtacaggcgagggcggttttctgatcaataacgaaggggaacgcttcatggaacgctacgccccggtggcgaaggacctcgcctctcgggacgtcgtctcccggtcgatgaccatcgaaataa

SEQ ID NO: 14735 - DNA, 4179 bp, Heterodera glycines
ttttattgaagaatttggaaagggttttgatgccgtcgaaatgtttgtcgtggtggagagaataatagagaattggtattcattgacgtcagactttgtgatgggtcgggtttggtagtcattaaagatgaatattttatactcgcctgtaacaaataatgtaatttatttcattaataaaaatcaatataaaaagtaaaataatcaccgggatattttgtgctccacaatccctgcacttgatggatgtatatttcggcatcgtattccggttcagttgtcggaatcccggcatcgcggagtaaaagtagtactttttgacgaagaacagttgtttgattatctatgagccatctaaattgtttccttgaaattactcccctgatatataatgagtagtagcgcatcagttccagtgcataaaaaaggcaataattgtcgttgttgttaattatgaagatgtgtgattgggaagagtgaattggaggggcacttcctttggtcgttcgtcgtcgtggtaggccttcagtgtttagaacagttacggtgacaacaaaaggggccccataaaagttgacgtgtttggacttgcctgctccactttacaaaactggttgaaaacggcgtccacggcgtttgacgtaattggcgtaattggtaggatgatgtcaccctggtctaaaagttctgaagaaattataataccaaccttatttgctcctccaagagtgttttgtgcatcatgaatagcatcctcaaccgcagtgtgcacacatgaacggaattcatcctggggatttgcacatttttcaatttcatcaataacaaattttgattttgagcggatgaaatgatgtttaagacttttggaagtaaattggtcaattttacgaatgcatttatttaattgagatttttttggggagggagaagattgagggtttgaagctctcttcattataaaataaggtatgaattatgagatttgtattaaaataattaatatattattaaatcgtatacaaatttatatttaaatagtgttattagggtttattaaatgagtagtataagggtcagcaatggaagcaaatgctgggaaataggaactgaggtaattgaattctaagagcagagcgctgcggaggctttttggttagaagaggggagctggacgttgcaggagttgcaaatgaatggaagaaaggggcttttcgctgggaatggtcgggtatttatacccacactagtgagctagaagtacattttaattaaattctgaggttatatttggacatagcggtgtgaacattattaaattttgggccgtgtcgtgtttcctacatgaaatagatttaatgaacaaaccaaagtgtttacggtttaccttgatttaattaaaagcacggttttaagtgttcgaaggttccgcatctaaatttaattagaaatgcacaaacagaacggattcacatttatttaattatatggacagcgacagcaaactaaaaagagttataattaaatgaatctaatattattacatttattttacaccgacagttttaaatgaattttaatttttaggtaatatttaatatacaaataaaaaattgatagaccatgcatgcaaaataatttaatatgcaaaacttattggttatcgttgctaaccgaccataagccacttcttgccattttcggaagcaaaaagggagtgcgccagtgcagtgccaaccgacttctccgatggtcgctgatcctcctcgcatacgattttagcattgagtacatcagcaccaatgattttggtcaagccgatgtgctttcaaggctgatcgcaaagggaaaaagcgacgaagaccgagtgattgcatctctccgatcagattcggaaattgacgacattttgatcggatcaattgaagcactgcccattaaatttaaggaaattgtcgcagctgctgaagccgacaaaaccattcaaaaagtcaagaaatttttgacgaatggttggccaaggaacgtcggagacgaaagtgccgaaataaagctttttcatttgatcaaagaacagctttgcatcacgagaaattgcctgatgtacgccgaccgagttgtcatccccgaaaaacttcgacagaaaactcttcattcattccacaagggacacccgggaatcaaaagaatgaagcagttggcgagaaattatgcctattggccaaatatggacgccgacatccaacagatggtagaaaactgccaaccgtgccaaatggaagcaaaggcaccagttaaaagtaatcttcaaccatggccaaaaccatcacttccatggcaaagagtccacatcgactatgccggaccatttttcggcaaggaatatttaatcatcgtcgatgccttttcgaaatacccggaggtattcgaaatggccacaaaatcgacagcggcaacaatagaaaagcttcgatatttgttcagccgacacggcatcccggaaattttggtgtccgacaatggcgcccaatttacgagcaacgaatttgctaaatttatggccatcaacggtgtcaaccacctgttttcagcgccgtataatccaatgtccaacggccaggctgaacgtttcgtggacacgttcaaaagaacatttcgaaattgaaaggggagggagccccaagcaaagacggccgccaccagcacaaccgatcgaaagagacgtagaaatggcgagacgcttcaataagcgatttggaaccaaattaagggagttttcgatcggaaacaaggtctttgcccgccacagaatttcccaaaattggcaacagggcaagatttcaaagcgaactggtgtgatttacgacgtgacattcgccgatggtaagtcagggcgataccacgccaatcagcttcgtcctcgcaaaacatctgactctgacgaacagctctcggtgatgctcgaagtcttcgacatcccaagaccggttgctgttgaggagcaaagggaaatcccagtggaaatgccattggaggacccgcaaatttgggaggtcaaattgaccatggacagcaacgacggtaccctcagcgaaatcgccgtccgccgcagcgcttttcaccgtaacctcggaaccgcgcttaaggggggaggtgttcggggcactgccgccgaagtttgaatgacatgacataatgccaatcgatttctgttccatttcatgttccttccctcgcccataaatatgctcccattccattttagattgtattcccttcattcatttttcatttatatatttgttccccaaattgttgtgattttattttcttctccaataaataaatatttaattggacttaaacaaatccctcggaccgaacaaattccaaaatataagttgtacttaaattttaaaccattttttacttgacagatttatatttttatttttaaaaattttctagttaagctcacttgaaattgtaaagtcaatgattgccgtcaaagcatgcgttttatgtccgctacttactttaaatatatcttttaaattaaattataatattattatttaatttaacaaacgatgaaaaaatataataaaattatttagatactattatttattctatacttttttttatttgttaaaaaatttcttcggttgcaatgttgccaaatatataaatttcgattataaaaacaataaatttccgataagtgatgtttttgcataattttcatttttatttttcaaaccaatcaataatcaaatttaaaatttattttttattttagcatatatattctccaaattttttggttattttttcgattcttaaaaaaaagtaaatctttaagttgcgttttttatgaaaatttgcatattgaaacattattaatttttattttgtttatttgttttctttttcgttaattatatgtttaattatgttttgaatatcattattaaaatgtttgcagaatcgtagaaaaatttgataattttattttattattatttaatcaaatttaaacacaaaatggtttttctgcaaaagatagcctttttaaaattgagtgatggtttgacaaataaaaaaaatttgattccaaataaaaaaaggagaaataagaattaattcatgtattagtattcaacattattaattata

SEQ ID NO: 14736 - DNA, 2045 bp, Heterodera glycines
gtgattaaaagaggtacaatagtgattaaaagaggaagaacagtgattagaagaggtacaaaagtgatgagaagaggtacaacagtgatttgaagaggtacacctgtgattagaagaggtacaacagtcattagaagaggtacaaaattgttagaagaggtacaaaagtgattagaagaggtacaactgtgattagaagaggtacaaaagtgattagaagaggtacaactgtgattagaagaggtataacagtcattagaagaggtacaaaattgttagaagaggtacaaaagtgattagaagaggtacaactgtgattagaagaggtacaaaagtgattagaagaggtacaactgtgattagaagaggtacaacagtcattagaagaggtacaaaattgttaaaagaggtacaactgtgattagaagaggtacaacatggtttaaaattaaataaataatgaaaagtttttataaaaatcgattgcattttaatttaaaatttttttataataaaatactcgttttattcattaaatataattttgaaaattaataattgaatatttattttgaaatgaaattcattttttataaattcaaaaaataaataatgaaattaaataaattaattaaataatttataaaaatcttgaaattaattaaaacattaaaaataacccaaaaatacaaagaaaaataatgtacaccgcccgggtccgaaattcgcctatatgaaattctttaatcaaacaaaaaattaattttaaaaaatttttcacaaaaaaataatttaatttaaatttaaaaattaattaaaaaaacaaacactcttttaaatgaattaaaaacattaaaaataaccaaaaaagcatagcaaaaataatgtacaccgcccggattcgaacttccccccccccttcaaaatgatgcctcagaatccccaatcacacagggattctgaggtctgaacgatgtcaaaaaatcatggtttcaaaattaaataaataaggaaatggttttataaaaaaatataattaaaaattgaatgtgttaataatttttaaaaattataaaataaattccttctttaatttaaaaataaataagaaattaattttatattaaaacatttattcatcaaaaaataatttaatataaattaaacaaacaatattaaattaattaaaataaataaataattaattttaaaacaaaacatttatttataaaaaaaatttaattcaaataagaaaatttaatttattttaataaaataaaaaatattttcaattaattaaaatatgtaaaaacagcaaaaaatacaaagaaaataatttacaccgtccggactcgaacttcgccccccccccaaaaatgatgcctcagaatcccaaatcacacagggattctgaggtcttgactatgtcaaaagtaaaatctgatcacgtattcgtgatcagcggcccaaataacccctaaagacatgtttttggatggtttttgatggaaaaattttcccactcaaaaatcatgtgcacacccccctttggtcccgaatgccaaaatcacttttatttttttacaattcttaaaaaagtgataaaaatatgaaataaaatttatttggtagagcaaaaaattgcagatttttgttgtatattatttttacaaaatgacttttctgaaaggtagttaggaatttttttctgaaaaatcgaaaatttccagaaattctggaataactttttttctttaaaagataaaaaccccaaataaaacccataaaattctcctgatttttctccatttttaatgctttatttaatcaaaattggacaaaccttacgccagatatgaattttcaaatattaggccaaaatcctcgagggccaaaaaattgccaaaaaataaagaatttttaccatattccaagaaatctgaaactaatacaaacatccgatttcgagcttagcaccataatttaccccaaaaaaatatttttcaccctctttttccaaccaaaaaaaatttttgaaaatttct

SEQ ID NO: 14737 - DNA, 2058 bp, Heterodera glycines
ccaaaggccaaaactggaagggaattcgtggcaattcattttcccccccccccccccccccgcccatccatttaaaagctctgatgattttccgcggcggcgattggccaaggggcattgattgtgccacaatctgtggccaaatgtttggcccatggggcatcaaatcagcagaagcggcggcagatgtttggctttgctttgctggtttaattggggagatcggtccatattttttaaaatttcaaattttatcgcgaaaaattttgccctcattaaaataaaaatttcttatttttgaataaatcaatttaattagcaaaaagaggagaaatatgtaatattatttaccattatttgctttgtgttgtataaaaaatctttttaattattaataaaaccaatttacttacgcacaaaaaatgtttctttctttttggtgttaccactttctatgaaggaaattgagcacataaactccccaaaactttgttattttatcgccaaaattgtgaaaaaattgcaattttaatcgattttaatttataaataattttttataaaaaatttaattatataattaatatttataaaaagaattttatttattcattttaataaataaataaataaatatttataaaagaaattttaattaattaattattgaattatttttaagaaatttatttatttattcaattaaatttaattaattttatttttgcagatttatttagagcaatttatttgttttttttaaatcttttttgtgtaaatgttcccaatttttggccaaattccgcgttttgctccctttccattttatttgcccatttatttctcttggccacccaaaaatgtgtgctctctgtgaaaatttatgggcttttggccatccaacggcgagctgacgacatttattttattatcatcgacaacacaacagaagttcaattgggtcaaataatattattctgctgcaaagggacgattcatttagtgcaaaaaattatttatttgccaaattttggcatttaattaccgaaaaagtggaaaattaaattagaaaataattttaaaatcacttttaaagaaaattcaaaattttaaatcgatgcttatattaatttcgattttataatgagcggttaaaaatagatacacaatatttaatgttttaatttcttattttatttttaaattttcctttttatttttattaatctatattttgtattttagttaatcatttttcatttccatttgtcctttcaaactttacaaattgcttcaatggatgaacacatcgccgccgctggtgccaaatcgtttgtgccacccgcgccggcgggcacaactcatcaaaagacttcagtgcagcacgagttggacagagttgaacgtgaaaaattttggaacgaagtgagttggaatgggccaattttgcgctgccaaagtgccaaatggccagcttttgggttggctatgtgcccgattaaggcgggtcccgaacagggatggacgtaactgattttcaattacggaaatccataattatggggtccaaaaacgccgtagtttttgttttaatgcctaaagaaccgtaattttttatctgtgtaaatttaaaaattaaacatttcgccaaaagatgcgcgacgaggaggaggcgaggcgacgcgaagatgctgtacgtcgacaaaagcagcaggaactgttcgccaaggagcaacgtgaactgaccgacaaactgcacaaggcgcacttggaacatcagcaggcgaaaagcgcagtgcaacaggtggccacgtcattggcattgccagggagaaattgacccacattggcatttaacaatatgccatgccatccatccccagcagcaggggggtaataaacggaaattggccaaaattaaaagcatttcctttggagatgacatcacatcccctcggaggggggagggaagagcaaaggaagaatttgtaaatttatgtgagtaaaagtgcctgattatccgtcaccccgactccgccccaggatttttgaattact

SEQ ID NO: 14738 - DNA, 772 bp, Heterodera glycines
tcttgatttaattgtcagaaaaagaaagaattataaaaataaattcattactccctggcttgaaattaatgaaggtaggatgtcatttaatgtttttttgcatgctcttcaacttttcttgatgagagagatttcctagagcaagatatttctaacttataattcaactgtgaaaattggcaaaaagaaacctcgtctatattttatatacatataagtcagttcaagacttttatcccaacgcccccctcattttctgtccgatccgccgaccttttcttaatttgaaattatcgatttgatggcattccttcgaaagcagaaaaaagcttctccgaaaatgccttcgccctctccgacgtttaaattaatcggcttaattcgcaactttcattctttgttactttcctattattatgcaaatttattggcgttagatatgcctttgttgtgtcccctcaacggtcgaatttctcagtataaataattatatatatcacttttcatataaattccgtcactaattgcctttttaattaggggtattgactgtttaataagaaaagccgcccttggggttttgtgccggtgccgtttttaatttagtccaaaccacgtggatatgcgctcctttcccactttttgtagctgtgtatgtttaaaaatagaaaaactaaaaatggatatgctcgagaatctttggtctcgagtaccgaaatttctcttcgcggtattcggtcgtaaaaaaaaatccgcgtttctgttcgcttat

SEQ ID NO: 14739 - DNA, 1625 bp, Heterodera glycines
aagagaaaattggagagacagtgttggaagagagaaagaaagtcgctgatgagcagaaacaaacgaaaagcagatagaagaggagacaagcaaatgggggggggggggggaaagaacgggcgacaaacgaaaagaaatgctttgtccgccgctgcgctttgtctttggaacgcacgcgccacccacgcacaaagcgaggaacagagaaagcgaaatagggcgagagagagtgacaaaacgaagtgccaggtgaaaagaggagagcgtcagagaaacaaacgcattttccattcgttgtgttttatagtgcaaaaagtgagagccgcgaaaagccgacaacatctgatattcacgtgaaatgcagatgaatttcgccaggaaaaatgtgcggatgtttgtgcttatttagccaaaaggaggggggagagaaagagagaagggagagagcagatagttgagaggattcggagagaaagagaggaaatgggtgaggatttgggagaaacagagatgagagaaaaagaggaaatgggtgaggatttgggagaaacaaagataagagagaaaaagaggaaatgggtgaggatttgggagaaatagagatgagagagaaagagaggaaattggtgaggatttgggagaaacaaagataagagagaaaaagaggaaatgggtgaggatttgggagaaacagagatgagagaaagagaggaaattggtgaggatttgggagaaacaaagataagagaaaaagaggaaatgggtgaggatttgggaattgtgttttgggaggaggaaccaacaaccggctttttatttgtaacacatacataagctaatcagtttaaaagggtaacattcaagcccgtagtcagaaaaatttcagagggggaaacccgaagacctttttttttgcttttcgggccaaaaagactattttcgccattttggggtcaaaatttcagaaaataaggtaaaattgccgcgaatcgcgaatcgcggatcgcggtcgcgcatttttcaatttctataatcatttttttaatttttttatataaaaattaattaaaatcacgatgcatataaaatttggggggactgaataaggggggggggggggatttgcgaaggttcccagtgatgcaaaccagggatgggattccgaagccccaaaaattttcggaaatcggaattccgaccccaaaaacgtcggaagtcggaaatttttcaaaaaatataataaaaattttctaaatatttttactaaactaaattttttaattcttaaccaagtaaaaggtgatttcaaaaaatgttttatttgaatatttgcttgaaaaaattattcaatgattttcatcaaaactttttcatgtcattttacatttttagaatatttttgggaagagaatattacacctttttattgtgaattttatctaaataaaaccaaattgagtctttttcatttgtcatttggctctaaattacaaaaggaaaattgtctataaaaatgaatcatgaatgtataaatattttctgattgaattccatctaaatgcgctagaaaattggaattttagtcaagtttacaaaattttacgccttcaaatctaaatattcaa

SEQ ID NO: 14740 - DNA, 1204 bp, Heterodera glycines
aattattttgaaatttttggcgacagacaaaatcaatttgatatttattttattaaaaaaataagttttgataattttcataaagcattttcaaaaattatcattttttaatttgcaaaagggagttttggagttgcgtttcttttcattttgattttttgttgtatctattaaaatttaattatgtgagtgtatgcacaaattttggacaattttcaagaaattccatcccaaataataattattaattaatgtttctcgtgcagtgagtaattccctctcgcaaattaatttttagcaatgattactcattttgctgcttttcattggagcaataattcattccattgcttccatttttgctatgagaattgcgtcaagaatttggaaatttgttgaataatgccgtgggggcggcggggggaggggcgattcgctcgctgctgatttttgtgtgggaatgaatgggggcgtttgtgtcgggtgtttaaaagcactcccgtcacaggtcacaaatgaatgcaaaagcggtgagacatgctttcttcacgtgaatcttccaaattcagtgccgaattcacgtgaatttgtgaaaatgtttataaacggcagaaaaaggcaaaaacaaagcaataaaaaaacaataaaaacacttctacttgaatgtttttgtttatctaagtacagatttttattaattggtgagaaaaaaagaaaaagaaatgaaaaatactttttttgcattctttcgttaaaatgccatgccatttgaatcatttgactttgaattgcacggctttcatttgcttttgaatactttgcacattgacattcgtccccaaatatgatgaaagtggtgcatttgaccaaatgcaattggccaaattatttgataacatttcccgctgaataccctcgagaattctgaagcaaagcgaagggtcaaaaggcatcgaataaataaataaacaaataaataaattaattaattggcaatggaatttttaatgacactgataaaacaataaagaaatggcaaagaaaccaaagttttattttagttcccttttcaatttataaattaatgaatgattcattggatgcattgtgtggaaataaattttagtgaatgacaaattgctccacaaagaaagaatcctataaagaaaaatataaatgaatattcgaaatttaatattttgtt

SEQ ID NO: 14741 - DNA, 3412 bp, Heterodera glycines
aaacatgatagtgcttgacgaatcgggtcaagcgcctcttctggcggtctgctcggtcctctcaccccttcaggaagctcttaagctgttcatcactggtgatcgttatcggctggccgtgagcatgaaggacatccctgaacaactccgagtcggcttcggctttgacacagttttactcaacacagactcatctcctggtgtggacaaaacaacgttggaagtgaactaccgttcacatccagaaattgtcaattgcgttgaatatgcggcatacacaccccatggtgaaaggctaagatcgggaccgggaatctttaggatgttgacgagttttgccaaaatgccaattgctgaatctccaattgtgctcattcaccaagattcgccaatggaagcggaagaaacgagtttttctgcgaccaattctggtcaaactcggactgtcattgaccttttaaggagctggaggggttttcctggttcagtccggatcatttcactttactcaggccaagcagcacaaattgggtgtgaactgagagcgaatggcttggagcggatggctgcttcagccacagctgattcaatgcagggtcacgaggcagaccttgtgattgtgacaacgacagtttcgcatgcacgtgaccaagcagtgacaaggaacagcagacggaatgatttctggggggaccccgcacgcgtcaacgtctcgatcagtcgtgggaagcacggcctcgttatagtggggaatttgttgggattgtcggaggccaccatttggaaccgttttcttaaaaaagccttggaatatactgttgtaacttcgccagaatttgttcagatttcggcacagcggcgttcacattatgttaggggtattttgtcggatgaagatggacttagtgtccaaaactttaagtttcacatggaatggagtccatagaaaccccaaaaaccccaattccaatctcaagctgtgaatttcccaaatccctcccgtcaggttctttccagcaccgccacttccgttactacagtccaggcgcgaacaatggccaactccggttcagagcaccagtcaagccaatcgtccggggagcagcagtttttttgagcccaccaacagccaagctgatcagaggcaaccacagcaaatccgatgttggagatgtgacgaacttgggcacgtttcgagtcaatgccgggcagcattttctccatcaaaaacgaacatacgatgaagtttggggacaaacttgtggaaggatggacgtgtaaagcataattcaattatttccataaccaatttcttttctgctgttgttccgcccctttgccttttcccttcacatttgtctatttaaactgatgactttctacactcaaggatcagttggccaaccagtgcattatccgtcaaccattatattttaatgctattccaataaagcactgatcattctccgccgatttattattggtccggacgcggacggatttgggcttgggacccgggaggttgggagtccagggcccggattttcacccatcaattcccgcttctctttccctcttccattcctctggcactacctccatggtccttaatgggcatctctcttaagctctgggttggacacccggccgttttactataataaataattaaaattaaatattgatttatttgccagaaaactttaaattacttctttcactgtccaattagtcatttaaagattacaaagaaatttagccaaattgagaaaaaccaaattttatagatgaaaaagacccaaaaattttttgtaaaaattttaaaccatttgagagatcaaaacaattcagaaggaattttaaaagtttaaagcgagttttgccttttggcatttgttgtcattatttgttggacgaaatgccaaatgaaatcaacaaaatcccagaatctagtgaaaatgaatacgtttcttttataattggacaatttcttaatgtgggagaaaagtatgagcaatgggtcccccccccaaccccaacaaaagttccttggggttgtcctccgacatttggaccatcacaattcgcccgcatgctcaacagtgccatcatcaacaccgaaattattttttaaaaaaatcgatgcgatcagttgttaagtgcctcccagagcacctgaatgagacggactttgttaagcaaattgctgaggaatgcggattgcagggcggtgacctcaaaaatgttcacagacacccgcggacggcacgtgagggaaatacaaagccgagaattgtcaaaactcctttttcctctcaaaaagctcgaaatttgttcctttataaattccggtctacccttttcaaaaagcctgtgatcccgcataatttgaccgctagacgtgatattacacacttcaaatataatatgacatcagaaaaaaggcttttgaggcaaaccaagccgtgggcatgttcaaatacatagtcgtcgacttggaactcaaaaccctgtctaacccaaaaccactcaggtttagggatttataggggtgcgcgagcaaaccgcagaaaactttttaaacaatatcaattaattgtctatttttttaatgcacgttcgcttcctaacaaaatccctgaattatattttatgacacaaaataaaccaaatattttgataatttcagagacctggttaaattcaagaaatcgaatttattcgatatatcaataggtggtaaatatactgcagttttagcaaatcgccaaagtaaaagagttaataaaatttttgaaatttagcaagctaataacgcaattcaagggctatcgaatgataccaagatttggcagtttagttgcgaaattctatttgaattaaaaatacaaaacggatcgctcatttctcaaataattccttcattcattccactgatcagtgctttgccccgctggactctagaactctttttcgtcaattttttcgtcgagacaatgaaatagatacaatttaattgtataaaattttaacaatggcaaaactcactgatgactagggatgcaatttttaggacctaaaaaagcccccaaaataggctctaaaaaaatcgaaaataggtactacaaacctcaaatttatgggttataaaatgacaaaattcattcaaaaaggtaacaaaaagacaacagtatgtattgagataaacaatttaaatacaaattcatgtcaagaaaataaataaattagttttgtagatggaatttattttttcatttcttaggggtgtatttttcgtttttattgcatttattcaataaattttgtgaaaacgtcagatggttgcatgacatttgcggcctgctgaaaatcggacatttgcggcccgataaatgaggtcggacatttgcgg

SEQ ID NO: 14742 - DNA, 1675 bp, Heterodera glycines
ctccgtcttcgggatgtccacccactctgcttcttcccgataattgcgcccgtgggtgtggttgtgcattcgatgaattggggacagccagcggaggaatcgcaagtgggcggggggaggggctgagccgtccacccccagccagcagcttttcgccaaatcgggaatatagaaagggcaaatttgggagagagatgcgattgaaggggaagcagagtgggaagattgggatcaaagggggggggggggaagatggatgggaaaagagaaagccatttttttgggatacagatgcaatttaaaaattcattaaaaaataaaaggggcattacgcaccgccctccctctcatgatcgagagtatttgtattatagaaaattacccaaaaaagagaaagcccattttttgggaaacagatgcaatttaaaaattccttaaaaaataaaagggccattacgcaccgtcctccctctcatgatagagagtatttgtattatagaaaattatccaaaaaagagatagccatttttttgggatacagatgcaatttaaaaattcattaaaaaataaaagggccattacgcaccgtcctccctctcatgatcgagagtatttgtattatagaaaattatccaaaaaagagaaagccatttttttgggatacagatgcaatttaaaaattcattaaaaaataaaagggccattacgcaccgtcttccctctcatgatcgagagggccattacgcaccgccctccctctcatgatcgagagtatttgtattatagaaaattacccaaaaaagagaaagccatttttttgggatacagatgcaatttaaaaattcattaaaaaataaaagggccattacgcaccgccctccctctcatgatcgagagtatttgtattatagaaaattacccaaaaaagagaaagccatttttttgggatacagatgcaatttaaaaattcattaaaaaataaaagggccattacgcacagtcctccctctcatgatcgagagtatttgtattatagaaaattatccaaaaaagagatagccatttttttgggatacagatgcaatttaaaaattcattaaaaaataaaagggccattacgcaccgccctccctctcatgatcgagagtatttgtattatagaaaattacccaaaaaagagaaagccatttttttgggatacagatgcaatttaaaaattcattaaaaaataaaagggccattacgcaccgccctccctctcatgatcgagagtatttgtattatagaaaattacccaaaaaagagaaagccatttttttgggatacagatgcaatttaaaaattcattaaaaaataaaagggccattacgcaccgccctccctctcatgatcgagagtatttgtattatagaaaattacccaaaaaagagaaagccatttttttgggatacagatgcaatttaaaaattcattaaaaaataaaagggccattacgcaccgtcctccctctcatgatcgagagtatttgtattatagaaaattatccaaaaaagagataagccatttttttgggatacagatgcaatttaaaaattcattaaaaaataaaggggccattacgcaccgccctccctctcatgatcgagagaatttgtattataaaaattacccaaaa

SEQ ID NO: 14743 - DNA, 4316 bp, Heterodera glycines
gaaaccaaagattccaacatacatgtcccttacaaattagagttgtttatttcttttttttctatccttagctattagcaaatctgctttgttttcctcctaatttattctattttggtgttgtttatgtgattctgatgaaattgttagtgaattttatttttttaattttttgaccatttcgctagtttttagcttagagatattttgacagccgtgttggctcggacggcaaaggggggcaatttggcaaggacaaaatgggagagagtgcgggaggaattaaggggggaataaattcctaataaataaacgaagtttatttaataaatataatataaagatgtgagtaagatgtgagaaaacgcggatgcttatatggagagagaaggcgtaggtggagcaattttagcagagcgacaaacaacaaaaaagagtgactaatactaagcacagaaatcacatattaaatatggaaatatcacagaaatataaaattaatcacaattattcaaaattatccaaattaactcaattaaattactcttccacaatttccttccattttctctctctctccctctttttccctcatttcccatcatttcttctttttctccactttcttagtcgctttggcgacactccccgccgaagatggttcagctacgattgtgccttcatcggacgaggcaccgacaaagtttcgacatctggtggcgggtgcagtgctcggcgcaacgatcgtaactcaaccgtctggcgatcgacttcagactgcaacagtgtgatggcaatgaccaagccatcactggtggaattggccaattcgttcactcccatggccatttgtcccacactctcttggacgtcgtccagtgccgtcctcaggcgtttaacaccgccgttgtatttcttgagtgcttcatggatggggactgccagatcgcgcttcttcttctggaggaaatggacggcctcttcccgctcaatcgcccacttgttcacgtgaccgtgaagaagttaagccatttctgagtcgacaggtggcggtggcacaacattgatcggcgaatgggatggctgcgtagtcggggaatcggatgaagctgccgcctttggtccctttttttcctgttcttcccgtggggggggggggctcgtcagggttttggcacttctttgggcgtcgggccttcccttccggcttttcgttcgtagctgaagcgatcagcttttccagttccattttccttttttccaaatcggcgagctcctgcgagagagagttgggcttggcgggcatggcacagaatgtgtttggaattggggaggcggagggaaacgaatgatggcccattcttgcgacccatggcttaaatagcggccaattgtgaactaggccagagagcaaaaatggcagaatggcagaacacagcggagagatgggtgagtcagctgatttggaatggctttcagcaaagtgttcgctgccgggaagtggtgaataagccagcggagcaaatttgttcacgatttgcacaaaatcggaaggtgaaggaccaaaaagcgacgaagaatagggcaacaagaagtgcaccagcatagattcataggatgagggggccagagatcgtgagttctcgaccaacaccgatgcggtattcctccgcggcacctcgactcgttgaatcaccatggggcataacgttgatcaccaattctcgggaccggggcggatggtcaattctgtcccagaacacgaagtgagacggccgggggcgtggatgtgggcatgttgacaagccccgtggtgtggaaatttggtcaggggccacgacgcggatcatttcgattgggaaaaaatcatggtgtccattaccgccgggctccatcaagcatggggcagaggggtgccgaagagtgatgtcatggcgagagcggtacagctcggagatagttgggccacgggcacttccattgtaggcaccgagacggttcgcaccacttcggctcagctcagatccctgaagccgcacattcctctcacgtgggtacagatgccttgtcttgagttcgtagccgcgactgtgcagtccctctttgtagaaatggtgaattgagtggcgcagaaacagcttttatagagcagccatgtggcaatttttgatctttggcgagatgaattcatagaaatatttgaaaaataatgaggatgagttggaaaaaggactattgaaacagttaaataaagacgacaaagaaaagattcaaaaaagacgaaatcgaagattgtacaaattgggtagcattactctgataatttttctcattattaatacaattatccaaataacggatggagcagcagaagttgtagtaatacaatcgaattccgaagattgtgaaagaaagtcaaatggatcagtatgcagaatacgcggaactgcagaattaactatattaccggctggacaaaaaatcactttagctttaaaagatgataatggaaaattagcaggttccttggatttaactttacaatttttacgacttcactgtaatcaaaacactgtaaaatggttacggtcctataaaataaatgttgtgtctaaaaaacggtgtccaactatgggatcatgtacaaaaggcaaatgcaaacacacacgaatgagtgatcaattaccggaaatgaaagattatgaaaaatttccaggaaataatttttgtaaagaaggcgaggctatttggggccacaaatgtgctttaccttccgcgggttgtttcttttatcggacttatgccaaaccaacatcagaaaaattatgggaattaatccgatacacaggatgggattacgaattaaaaatgaatttgtcgtttaccatgggaaatttgacaaaaaatacggaattaattatgtttcctggattaacaaataattggaatgaattttcatttacgccggaggcaataactcctccaatttctccaattttaaatgattattttattgtatcagaagatgaaatcatttatggtggaaaagaattaaaaagtgatttgttttgcgcaggccctattgaggcaaagaaattttcgtgtaatatatctaaagaagcatgtcccgaatgttggatagatagagaaaaggatatagttgaatgcgcatgtcatgattcaattttagaaaaaatggagccaaaattaccatttacaacagcaaaaataaacttaagaaaagaaggaaagaaaattttaagtgagacggaatatgcaccggttaaattagcaattagaattcaagggttaaaggcagtagctataactgatggcacaaaatgtgaaataaaaacaagaaattttaccggatgttataattgtgcaaccggaggaacattgaattatgagtgcaaaacagagtttggccaaacagaagccgaaattaaatgtgaaaacggtctctattttctagcaaaatgcaatgaaaaaggatatttgcaaaaagatgttttgccatttgatagagctaaaattaataccaattgcctggttgaatgcccattaggataactgcactaagccatttgtttaaacccgaaaacgaaatattttttagcccttttagaacttttccaaaaaaagaacttttttacagcatatttcgtacagaccccaaaaaggaaattttttattctaccttttacaattaaatattaggcatcaacgttgcataatttgaaggtcatatatttttttattggaataagtaatttattaaaacattttctgtggttgatgtgcccacaacgacgaaaaagaaaaaatattttgttccacctaatgttattccgttgaaaaaatcttacgattgttatgccctaaggggacgaagaatgggctgatgtgaaaaaaataaaaaactggaatgtcgtctcgatcggttatgattacatgggagatataattggttaactcattagggtctcaaattcggtactttagccctagaaggctatggtgggccttcagttctcaagtggcacacaatgggggctgaagatgtcgttggggcggtctttttgggcggctgtccttttttctcggtaaacagagaaccctttggtaatattatcccttccccattaaatttttattttaattttaagtcattcaggaagtgtttttaaatgataagcactttgtctttagagctgtttcgatgatgggcgaaaaaattgttgggatcgctaatgccggcccaatattctcatttaaagttaacacgttatttatacccatagcccaataggccc

SEQ ID NO: 14744 - DNA, 1931 bp, Heterodera glycines
aaaattggcttaaaaatccacaaatcgacctttttagcgaaaatttgttaacaaatcatgccaaaatcatcaccgacggcgaatattggcaccgaaggacaaatgttttttattttgtttaaaaacgcttcaagaatggcattctttcggagctaaatctttaaaaagtttcatctaaaacactcaaaatgataatttattgagaattgttaggaaattttgataatattttattttttgttcaataatatgcaaattcaggctttattattgcgtttcaaaaaagctgcttattttgacgccaaaatctaattttcaatcagtgatttgcttattttggaaaattttcgatgacacctctggttttaaggtgctgttgttctgctattttttgacttattaaaatagggttttttgggttctatggttcaaggctctaaaaaccccaaaaataggcactaaaaaacctcaaatttatgggtgtaaaatgacaaaatttattcaaaaacgtaacaaaattaagcaaaatatgcattgaggtaaataatttttaaaaccaaaaattcttgtcaaaaaagtaaataaataaattttagagataaattttcgtttcttaggggtatatttttgaaaattttagggtcgattcttagtaggctatttttctgaattttggggtcgatcttaggggtgtatttttcgttttattccatttttcttaataattttttgcaaaacgccaaaattgtttaaaattgattttttccaacattttttacatagtctttttcggctctaaaaataaaaacataggctaaaacctaataatcgtttcctataataacgatttttggcaataatagcaaaagtatcatttcccgattttttttgcgagttaataaaactcttcaactgtagtaatttgaatttttttaacagattaatattaggaatgagaatttaagtcacaaaaaatctccaaaaatttgactaaatagccataaaaaaccgccaaagtcacgaaaaatgcaaaaaagtcatgaaaaacttacgcaaagtaaaaaaaaaaatactatttttgtaaaacaaattgcaaagaatgtagagtacaattttgtcatatgtagtacataaaacgcattcgaagaatagatttgtaaacagagaaagatcgttatacgatgaactatttgtaggaacatgaaaatggggagatttcaaagtcaacagttttgccatgaaagaatttgacaaacttggatgattgtctcaattctcggggtcttctcaacaattattgaatgtttttgccggatttcatttgcctgttcaccttgaacgttttttcggtattttcttcgctgaatttcaatttttgaattaaaaagtgaaaaaaagataaaaatcccaaaaagtagaaaaagtctaataaaaacccaagtttgaagcttgtaacaagtgtagaacaccttttaaatttcggaatttttaggacttccattcccctgttacattatgttttcttacaaaaagagaatgtcctaatgttaaagcataaaaagattgtcaagaaatttatttatttatttttaaattagttttcgtaattaaagaaaaaagcctgggacccgacaagcgctcggccaaaatttgagaccatccccgggacactcatttgggctttctttggacaaatttttttactagtatgaccaaatatgcacgaaaaaggcacaatgcctttttatcttttgtgcctttttgcgttatagtgcctttttagtcttttttgatgattttgggtgtaaaaataaaatgccctagtcataaatattcatttttcatttatttattctttataaacaatattcctttaattgaatccatttccaactttttttttgcttcttttattttgtctacaaattccc

SEQ ID NO: 14745 - DNA, 1050 bp, Heterodera glycines
gtaaatctgaacggtctgaaaataccaacagataaaattggtaaaccaaaaacgacacaaaagtgtcaaaaatttggtaaatcagtcatttcctaaactggtcattctcaaacaccaaaaaagtttggtgaaataaaaggtcacaaagccagttttgcctggcggtgattgggatacggagaagttcctatcatcatttaaggatcccgtcatcgcgaagaagcaatcgaagagatctacaatcaatctcaccaaagaagggaaattggtaaaaagctcaaaatggttgaaaaaacgccattcaaaaagttccaaacaacaatacaaacaacggtggagcaaaaagaaaaattgctccaaaaaatggaacttttggccaccaaaagaagggagtcaagaagccacaacgcgatgacaaatcggtggcaactccttcttgccatctctgcggccaaagtcattggacgtcaggctgtagccgtttccgggatgccaaatccagagaagaaaaggcaaatgaagtgaaattgtcatcaaatgcctcggcatcaaccactcatcaaatgagtgtacagcaaaaatcagaaattgctgatactgcaacaaatgggggcacaaccgagtgttctgtccacaacaatttggggttatcaagatgtttgccgggtcaaaaacaatctggcgcatgcatggcgtcagttcatccggaagaaggacaaatgccgactcgccgacctcggctttcgatgcccaagggacgaagacttaggctggccacgcgcgagggttcaaacatctcgccaagagcagctggacttcggggagaaggagttgggccactctgacttcgacccggacgaattagttttcgaagtgccaaaggaaggggagtcaagcagcgaacgaagagtagcgcgctggcccgaaaacttcccacggcaaattcacgacaggtcaatttcaccagattgaaaaaaccaacccttttataatcatcgtatttattcggattcgaaataatccgcggtaccaaaaaaggggtcattaatt

SEQ ID NO: 14746 - DNA, 1398 bp, Heterodera glycines
  unsure (1)..(1398): unsure at all n locations
agtgtatgtacatatgtttatgttccgggacaacccaacatttttatcataaaattttcctccaaatttctgttgtgtacgcaattagtactttcncnaatgaatcaccaatccaaatgataataaaaatatttcaacaccatcactttctactgaatcacatagaaagtatgtatgcttttttggtttggtaaatcacaagttctttcactttttaatattatcattccttatttttaaaaataaacgattataaccatcatcagacattttctttaattgttaataatggcatatcaagcggcacaggcgcgacagaacttctcgccttctgtggaggaggcagtcaacaagcaaatccgaaatgagctcaacgcttcctatgcatatctggccatggtttcaaatttcaacttttctctcttgtttgagttggttttttccattttcaggcaaactatttcaaccgcgtggatgttgcgttgtccggggccactgagttctttggcaaacaatcggtggaggagagggcacacgctctgaagttgatcgactacgtgaatgcacgtggcggacacgtcaaactgatgcctttgcctgtgagtcacttgtttatttaggtattcatgttcgatgttctctttgttttcaaggcgcccgctcaacaggaatgggtgaatttgcactccgcacttcttgacgcattggaattggagaaggcgaacaacgcgaatctgctgaaactgcataagttggcttctgacaacaatgaccccgatgtgcgacgtagggagcagaaaaacccattaaattttgcttttagtttaccaacttcctcgaagagttttacctccgtgagcaagtggatgagattcagcgccttgcacgcatggccaatcagctgttgcgcatgggtaccagcggactcagcgagcacttgttcgaccaggaactccgaaaagggacggtgctttcggatgaataagcgatggaacacatgggaccaaggaataatgcgatttaatgagtctatcaaatgcagttaattataatacctaattagaaatggaattttaaaaagcacgaagagggttaacaaataattttttgtttatgatcattgtttttgaaatatagaccaaatgacaaaacgccaaaatggatcaggaaaagcctcaaaattccattcctaatgtgacagttttattggtcgatgtctgtttaacaaaattaatccccaattccactaatgtaatgtttaatgatacccatttattaagtataaaaataaatcttttaattaacatgcctaaatgggcaaaggtacagttttgtggtttcttcgaaaaataaatttaaaaattttctttgtattttttctggggtagaaaaatgcgc

SEQ ID NO: 14747 - DNA, 2101 bp, Heterodera glycines
  unsure (1)..(2101): unsure at all n locations
agtccgcttgcctgctaatttattttttagtcatactggctaaaaatcatagacaaaaacattgatttaacgaaatcaaggttcagattcatgaccagctcattttattacccttaattcataggaaataaaatttttaaaaataataaatttttggaaaaaatcatttacttgacgaaaaaatcatagataaaatcatggattttccaaaatccgagctcagatttgtaatcagcgcatttttctaagccagaattaatacaaagaaaattttttaatttatttttcgaagaaaccacaaaactgtacctttgcctaaantgggtgtgatttttgtaaaaatttaaaacaatatctcaagataataatatagatgagcttttcgatgaatgtgcaatggcaccattaaaacactgttttattttaactgaatttgttgcgaataaatattacaattttaatcggaccttataaaattcttcacccatttttgccttttatgtcgttggattacgcaaaatctctttctttttatgagaacaaaggacgacttggccttcccgaggttttatgcatttttttatttgttcaacaaaatctttagaaatttgatgtcgaagattcgctcgaagagaaatgtgtgcttttatcggaattgttaaaaaacagcaaattttgtgtcgtttttactggcgcggggataagcacaggtaaaaattctgtaaaaatgccgatgttggcacaaagccaaaagtgagtttaatcgcaattgtcgggacggactcaattcgattttattttttggttgggtaatccaattaagtgttttagacaatttaccttatttttctttctcaaccaacaaaacactgaaatgatttcaaggggcccaaattggcacagaaaatgccaacggttttttcctttcattttgccaatttcgcttcagctgccggcatccccgactttcgggggccccgcggcgtttggactttggagcgacagagtcgcgaggcggacagtgtccgctttgagtgcgctcggccgacctttgcgcactttgcgctcaatgcgctggagaggcgtggcattgtcaagtttctaatcacccaaaatgtcgactctctgcacgcggccgcgggctttccgatcgatcggatggcggaattacacggcaatgttttcgtggagaaatgcgagcggtgcggcaggtggaaaaaggggaaacagacagagttagacacacagagttagaattaatccaaaacttctccaaaagggaattcccaattccatcggcagggctttttctcttacaatttgaaccattctttttttatttacataaatttgacttagttttaattaagttttttttgctggtgacactaaaatttacaccgaattgtattagagacttttaaacgattgaatcactgaaaaacttttatttttgatggaattccgttggaaaacactttaaaatttgggacagctcgtcctcccgaaaaattttgtggttttcgccctttatggaagtgataaataaataaagaaaattaaatttaaaaatatttctccgactctcagaaaattcttccgtccgtcgcccattccgtcgattggcctcaaacccacggggcgaagttgcgactcggctcgcccgaggggaaaatgccgcggaaagctgcgcgacacaacgctcgactgggaggacgcgctgcccaccgccgaattccaaagggcgtgggaatatgccaagttggccatggcaagcggataatttgtgcatgcatttgttttccttcagaagggccgacctcgtcctctgtctgggcacaacgctccaaataaaacccgtgggcgacatgcctttgctttgtcacaaaaacgggggcaaattggtcaccgtcaatctccagcggaccaaacatgttcggacaatggcattttaaacacccaactaattaccccccccccctctaaaggagcaaaaggcagatttggtgatcaatggtcggttggacgacgtcttctcacgactcatgccaaagttgtgcagcgacgaagtgcggcggagggaagtgaccgccgctgaggg

SEQ ID NO: 14748 - DNA, 2200 bp, Heterodera glycines
  unsure (1)..(2200): unsure at all n locations
taaaagttagtggtcaaatcgcacattgaaatgactctccccccggtttaaagtgagtttaatttatatgttcaattaactttattactctatgattttttttgcaatctttttaaaattatttttgaaaatcaaattaataaaattgttattttttaattttgaaacaattttcgcaaaaataaaatttaaattatttttaggacgacaagcccctgaagggatcagaccgattaaaaatcagcagccaaaaggacgaaaaagatccgcagggaatggtgttgttgttggacattcacgaaccacagaaggaggaccaggccaagtgagacaaacaaatggggtgggacaaaatgccgacaaagacagaataaaatgctgacaaaaatgagaacgtgacgacaaaattggacataatattgaaaaaaatgggacaaaatgtcgacaaaaataggaatgtgtgggaaaaatgggataaaacgtcgacaaaaaggaacaaaacgtcgacaaaaatgggacaaaatgaaaacaaaatgggacgctgtgtcgacaaagacagaataaataaaatgttgacaaaatggacaaaatgatacaaattaacagaatgttgacaaaaatgagaacgtgtcgacaaaatgggacaaaatatctactaaaaggaacaaaatgtcgacaaaaaatgggataaaatgtcgacaaattagcagagacaaaaggtcaaaataagtagacaatttatagttgctaaatactagaaaattataataaataatagaggaaacaatgggaaaaagtgtcgacaaacacgcgaaaaacgacatcaaaaaaacaaaatgtcaaaaattgtttgtcgtgaaatgcatagattaaacaagaagacaaaattgccacattaagagggcacaaatggcaaaatgtcccaacaaaattcaaaaaaattgcaaattcaaaatttaaaatttttaaatttaaattttcgaaatttttttaggtacaaatgcgtggtgaaaaacgcggagggtcgcaatgaacagtcgctgaacctgcagtttgaataacagcaccagccaggcgatgaaaatccgatgaaaattttgagaaaaaaaaattggcaagaaattttcggcaattttttcttgccaaattctcgtgccaacctttgtgtatcttttaatttgcataaccattattcatacaaataattagcttagtaaagcatgaaatttcgaaatggtatttgaaaaaatcttttaaaattcgagaaaacgtggcacaaaaaatccggcatctccgaaaattcaaaatttttttaaaaattgaaattttaagacaatttttttaaaaatgtaaaataaatttggaattttgccgaaaatttatagaaaaataaacaaaatttgtccaattcttgatcaaggctaaaacggaaattcgatccaagagcccaccaagacctcgactcccccgtaatccgtaattacgcacacagaacttttgcataaatttaaaaatctggcaaacaaaaaattcccaaaactttttttttattgcctttcgtatgtcattatcatcatccaccagaagcccagacagcagacaactttttgttggcgtcaacctccatttattcttcacaattagccttcttctttccgctttgtcccctcccgacgccccggnggcgccgccccccgcctccccccgtgtgacattgtgccaaaataaagtgcacaaacacacattctgtgccaatgtgctgtgccaatgtgccgtgtgtgctgtgtgtgcgctttaactcggcgtgccatcgtcagaaaattgaccccgcttttaccccccgcggcgggtgccacgaccgccgccgacccatgagaaangtgngagagcacacaacacaacggcacaaaatttattgaaaaaaaaataatttgagcaggggcaggaggggggagggggcgaacacattngcacacnaacatgggaaaattgcggaccaatagccaaggaggggatggacggcacggcacaaaaaagtgaagtgacagtgatatgcatccaaccaccctcaaatgaagaggccctttaaacatgatactacctaanattttttaaatttgctgttttattatggncgaaggatgggaaattatgaaaattttaaagcatgcacattttagaattttaaaacaaaattttt

SEQ ID NO: 14749 - DNA, 2395 bp, Heterodera glycines
  unsure (1)..(2395): unsure at all n locations
aaattcaaaaaatttttaaaaaattgaatttttaaaacaattttttaaaaaagtaaaataaattttgaattttccggaaaattattggaaaataaccaaaattgtccaattctaatcaaggctaaacgggaaatcgtattcaagaatccaccaagacctcgactcccccgtaatccggtatttcgcacacaggactcttgcataaatttaaaaatctggcaaacaaaaaattcccaaacttttttttttattgcctttcgtatgtcattatcatcatccaccagaagcccagacagcagacaactttttattggcgtcaacctccatttattcttcacaattagccttcttctttccgctattgtcccctcccagacgcctcgggggcgccgacccgcccgcccttccccccgtgtgacattgtgccaaaataaagtgcacaaacacacattctgtgccaatgtgccgtgtgtgctgtgtgtgcgctttaactcgccgtgccatcgtcagaaaattgaccccgcttttccccccgcggcgggtgccacgaccgccgccgacccatgnagaaagttgggagagcaccacaacacaacggcacaaaatttattgaaaaaaaaataatttgagcaggggcaggaggggggggggcggacacattgcacacaaacatggaaaattggggccaaatagccaaggagggaatggacggcacggcacaaaaaagtgaagtgacagtgatatgcatccaaccaccctcaaatgaagaagcccttttaaacatgatactacctaaaattttttaaatttgctgttttatttatggccgaaggaatgggtaaattatgaaaaattttaaagccatgcacattttagaaattttataaacaaaattttttgaaaaatttaggtgccaaatttaccttgttcatgaattatactgtgctaaatttaaagatactgtaaaatttaaaatttaaactaatgagtaagcttcagagaaaacactcaattaaaatttaaccttttgaaaattttcatgaaatttttgtgattcgtaacaatacgtaaatttaaaacaaacatttttagaggaaaatactctttatttgattaaggtaaattttacatgaaattttcagaatgaatgttcagccttgctttgtgttagatttacgaacagagcgatacaactgcttgacataatgcaatgtttttaaaaaaattttgagaaattaaatattcccaacatttccggggcaaatttttggtaaaattctttttaaaaaagattaatttttaatacaaataccagagaaaatattttttttttaattaaaattaaaaaaatataatttcatatctaattaataattaattattatcaaattaattatatctagtgtagtagaccggttttttttaatttttggcggtttgtccattcgctaggcttatgaaaatattagtcccataaatcccaacaatttttcttcctaaatcctgattagccttccaaatatatataataaaaaagaagatttttttgtggccctcccaaagttttctttcccccttttttggcaaattattgtgccaatgccaaagcaggaatttgttgcaccccggggaattcgtatattcttactttttggacgggccatcaattatttgctgctggcggacttcacaaagacaacacactcatctctgctctaggcccccatccgattttggcattttttgagtccaatcttagcattacatcaaacatggcattaaatccaatcttggcattacaggagcattgatttttattttgtatttgttttaccgttgatcaaaattagagcacggaaatttcaaagttgcggatccctctgcgggattagaactcaatttgttttgtttttttgccgggacgggatctcgcgtgattaatccagcaaatcccgcaaaatcccgcaccgggctctaatccaaattaaacctctcatgttgttttcgtttttttgtatcgtttcacggcaggaaagttaccactctcgagtgttaaaagttctcaatttctcgggtatataatttttttggcatttttgtgtcaggtgcccggtcttaattctcgggtccgttctcgggctcgactcggttctcgacacttttgtcaagaaattactcgggattgcctcgtgattgcacacacaatttttcggtctaagttctcaactttcggtctttttgtgcttaatgcctatttgcctattttttgccaattttgccacttttggcgcctcataaaaactaagaagcaaccggcaaatttttttagaaaatatacccttagaaattgaaaaaatttttaccaaaaaatgattcctaagattttgagtttaaa

SEQ ID NO: 14750 - DNA, 3582 bp, Heterodera glycines
attctgtatagcaattaaacgaaaacactcttgcgatcttcaacgagagagagagagaaaagagaggggaaaggaatgcgagagagagagagagaaagagagtgagaaagggtgaatgagagagagagtgaaagagagagagaaagggtgaatgagagagagagagagaaaagagagcgagaaagagggaaagggtgaatgagagagagagagaaaagagagcgagaaagggtgaatgagagagagaaagagagagacagggggaaaggaatgaaagagagagagagagaaaagagagcgagaaagggtgaatgagagagagtgaaagagagagagaaggggggaaaggaatgagaaaaagagagagagaaaagagagcgagaaagggggaaagggtgaatgagagagagagagagagacagggggaaaggaatgaaagagagagagagagagaaaagagagcgagaaagggggaaaggggtaaatgagagagagagagggaaagaagagagagagaagagagcggacagagccttctggccgttttagtctggccggtttagtcagagggtcgttttagtctggcaagctgtctttgtcctacattgatccaattctgatttgtttctcgaaaattctttaaaattaacaccataacagatttatcaatgtgttaacaacaaaaaaataacgaaacattaaaaatattacgggcgcatctcataattccgagaaataccaaggagaaaattgatgatgttataggggttattgataagggcatggtaattgtgatcattttggtgagcctggttattgttgatggcactgtagctctgcaagagtcgaagaattctcgcatcggcggcacaatatttgggcgccttttgaggagggagttcaccagcgatgcatcgtgagatttctgcatcaatagacttttgctcacatcgaattgtgttgatgaagcggaagacagttggatgtgtacaatcaaatgcccgttgaagttttctatggtatgcttctgcgtaattgttggttctgtctcctccatccaacgtccgttgatgcacactccattcatccgatgcgaaccgaggcactgtcaaagcccattgaacatcggccttcaggtgtaattgtacatgaacctttaaaataatttttttaatttttcgttcctaaaaagtcaccaatttaagatgcccataagttgttgaggaagttgtgcctgcaaagcattgagggcagcagggagatggtggacaggaaaaaacgccatagaagtgatcattttgcttttttcagcaaagacggcatcattgttgtatgtcttaatatgaaaaattctattggaaaatacaaaaatgcaatcaatgcctgtgttaaaccctcggaagcaattcgtttcttcatacttctcaccaagtgaaaaaagcagaattgcacacgacaaagtggaaagactgtgcggacagcagcgaccgtcgcttgctcgaagtccaacgatatggtgtcaggtgcaaaatttggccatctttggacaatcagttaaagcatccgtgtgtatatatcacttcacattttgaagtgagaaggcagtacgcaatcggaaaaccccatttatcacgcctaaaaagacaaaaaaaagtggtaaaaattaaggttttactttgtaagtagaacataaatttgactgaacaaaggcggcgccaaactgaaagtgccatctgcgtacacatttttcataataccggcccattccgaagtcgaagcgcgagcaaatatcagaattcttaacacggaattttttaaaaattaatggttttattttttttacctttgcggtccagcctgtccctgaatttgaaaaacgccggtgtccgccaataagaaattctcctcttcagtctctgttcgattgtacattctgtattcaggcggcaattccaatgcttccaaactgagtggtgcagcaggtggtacatcttcgtcatggcgaacacgttttataacctaaaataagtgaacaaatcatactttggcagaaaaattcgtaaaagttgaccttttttgtcgcagctttggtagcaaaagcagccaacacgggggttgctgtattctgcaagacttgcgcacggattgttgcaggcgcttcgcacgtctcaactgcacgccgcttgagctgggtcacgcgtcgctgacattccacttgtgcggcactcatgtcgcatgtgtggcttccaataattttgaggacattaccattaatgtcagtgtgaagtcgccctgaatttaaaaaataatctatattttattttttgcatacacctttgcatttgttgttaggtccgaaaaactcgcagcgccaatacttccgaagtccatcgtcactgatttggtgaagaacataaagtgcaccttcatgttccagcttttgcttgtttcgctttgtctttatttcctgattgcgttgttccccattcgtgtttgtagctaaacatagtattttaagtttttacttgtaaataattgacagaaaaaaacatttgtaagaattatgggcgaaaaggcgaaaacgacttgccagactaaaccgaccctctgactaaaccggccagactaaaattcagaagggttctctctttgccgcttttgcctcccgacattatcagaagagctttctcaattatcgttgcgtcttctcctcctggaatgccagcgttcttcctttacttctctcgaacatacatcggcttgacacagcgccagttgttggatggtgttaacgcatttggagataattcactcaatttttcacccatcggcaaccattgtttgtttaaatttatgcatttggtttccaaaaatttgaatttttagctgcactcgggacaacaatttcgaccatcaactcggaacaagctatgcggctacccctgtacagttcggcatcggctcaccggcaccatcaactcttacatggccaaccactgtgagtccacgggagcagcttgttcaatattcgttgagcccgctatcgacttcgacagcaccttcaggcagaattctttaatcaattcatcccatggacggtaaaaaacgaaaaaaattgccaaaaaataattggcgtaaaacaaaacgccaacacacgcaaaaacaaagtatatgcacttacactggtaaatgccttttttgtattttttattttgatcagccataacacgcttcattcccaacaaaaatgaacaaatttggtatctaaaaaaagattttgaaaaggagaatctttttctaagtgaatgctaagcaatttgacatctcagaaaaaagttgtgatactttcaaatttttatcacgttataactcaagtcctaaactgctgttttcaccaaaaatgctaaaactattaatttctctattgattctaaatgtacaaagtgattttgtatccttataaccaaaattgttagcatttacgaatttgatgttttttcatgtgttagagacatgaaaatagtactccaaaaggagagaaaaagaaatgcgaatttttttcatccccatttttagtaatgt

SEQ ID NO: 14751 - DNA, 2073 bp, Heterodera glycines
  unsure (1)..(2073): unsure at all n locations
agagctatctgacagaacagctctcctttgcttcctcgccagatcgctcgctatgctcggctacgcggatgcggagagcgctagtgataataagagactgaggtatgtgctcttcttatctccttttgaagttgttgctcttattttaaacaactttgcggtgttttgatgactttgcgattttgttgttgctttgcagtaaattgcaagatttaataaaaaaacgcaaagcaatgattaaaggatgttcagaatgaaactcatggaaacacttaaccagtgcataaacgctggtcatgaaatgacgaaggctatcgccattgcacagtttaatgatgacagcccggaagcgaggaaaataacccggcgctggagaataggtgaagcagcggatttagttggggtttcttctcaggctatcagagatgccgagaaagcagggcgactaccgcacccggatatggaaattcgaggacgggttgagcaacgtgttggttatacaattgaacaaattaatcatatgcgtgatgtgtttggtacgcgattgcgacgtgctgaagacgtatttccaccggtgatcggggttgctgcccataaaggtggcgtttacaaaacctcagtttctgttcatcttgctcaggatctggctctgaaggggctacgtgttttgctcgtggaaggtaacgacccccagggaacagcctcaatgtatcacggatgggtaccagatcttcatattcatgcagaagacactctcctgcctttctatcttggggaaaaggacgatgtcacttatgcaataaagcccacttgctggccggggcttgacattattccttcctgtctggctctgcaccgtattgaaactgagttaatgggcaaatttgatgaaggtaaactgcccaccgatccacacctgatgctccgactggccattgaaactgttgctcatgactatgatgtcatagttattgacagcgcgcctaacctgggtatcggcacgattaatgtcgtatgtgctgctgatgtgctgattgttcccacgcctgctgagttgtttgactacacctccgcactgcagtttttcgatatgcttcgtgatctgctcaagaacgttgatcttaaagggttcgagcctgatgtacgtattttgcttaccaaatacagcaatagtaatggctctcagtccccgtggatggaggagcaaattcgggatgcctggggaagcatggttctaaaaaatgttgtacgtgaaacggatgaagttggtaaaggtcagatccggatgagaactgtttttgaacaggccattgatcaacgctcttcaactggtgcctggagaaatgctctttctatttgggaacctgtctgcaatgaaattttcgatcgtctgattaaaccacgctgggagattagataatgaagcgtgcgcctgttattccaaaacatacgctcaatactcaaccggttgaagatacttcgttatcgacaccagctgccccgatggtggattcgttaattgcgcgcgtaggagtaatggctcgcggtaatgccattactttgcctgtatgtggtcgggatgtgaagtttactcttgaagtgctccggggtgatagtgttgagaagacctctcgggtatggtcaggtaatgaacgtgaccaggagctgcttactgaggacgcactggatgatctcatcccttcttttctactgactggtcaacagacaccggcgttcggtcgaagagtatctggtgtcatagaaattgccgatgggagtcgccgtcgtaaagctgctgcacttaccgaaagtgattatcgtgttctggttggcgagctggatgatgagcagatggctgcattatccagattgggtaacgattatcgcccaacaagtgcttatgaacgtggtcagcgttatgcaagccgattgcagaatgaatttgctggaaatatttctgcgctggctgatgcggaaaatatttcacgtaagattattacccgctgtatcaacaccgccaaattgcctaaatcagttgttgctcttttttctccaccccggtgnaactatctg

SEQ ID NO: 14752 - DNA, 1401 bp, Heterodera glycines
tttttttgttttggggggcattccccccgaaaccgatgcgcccagatttatggggaggccgaattcttcgggaatagcttcccctatagtctgtactttaattctgcggtgggatttttgcttcccataaatgtttgagtaccccaaacgggcacttgaaaaaatcgatttttttgttttcggggcagtccccccgaaccgatgcgcccagatttatggggagaccgaatccttcgggaatagcttccctatagtctgtactttaattctgcgttggatttttgctccccataaatgtttgagtaccccaaacggacacttgaaaaaatcgatttttttgttttcggggcagtccccccgaaccgatgcgcccagatttatggggagaccgaatccttcgggaatagcttccctatagcctgtactttaattctgcgttggatttttgctccccataattgtttgagtaccccaaacggacacttgaaaaaatcgatttttttgttttcggggcagtccccccgaaccgatgcgcccagatttatggggagaccgaatccttccggaatagcttccctatagcctgtactttaattctgcgttggatttttgctccccataattgtttgagtaccccaaacggacacttgaaaaaatcgatttttttgttttcggggcagtccccccgaaccgatgcgcccagatttatggggagaccgaatccttcgggaatagcttccctatagcctgtactttaattctgcgttggatttttgctccccataattgtttgagtaccccaaacggacacttgaaaaaatcgatttttttgtttcataaatatttttttcagaaagtgctctaaagcgcaccaaattttatttacaacttaattttagcactctgatgctttagtatcaaaaaggaagatggagaaaaaattttttaaaaaatttttccttatattttggttatatcgttttgcttttggtggggtgcttggaacagtggaatcatgcgcacccgtccgatctggcaagttaagcaacgattgctgactagccaaaaggttcggtgccgtgatgaaacgaaccagcactgcttaccccgcggcacccggcacggtcccccgaaggaatggatttaattaaattctctccttcggggatttttttccattaggtcgtccgttagcgttcgattgctctagtcaatttttaaaaatttttgttgaaatatttgtcgtgctctgaagggcgggggggggggggggggggtgcagatttggttcgccggtattgtaagttatgaaattttattggggatctgttttgatagagttgcatatttgagaagattattaatccgtcatagaacaaggttagtttataaataaattat

SEQ ID NO: 14753 - DNA, 790 bp, Heterodera glycines
cagtaaatacatacatgttcagagataccatggaaaacaaaaatatttcagcatattttggggtaggtaaagcttaattatctcgtatatttaaaatatgtcaatgcaatgcaattaattaggtaggtggttaaaattgattggacgcataaaaattgaatggacgcataaactggacttgagcctttcccttttttgacaaaaggtgaattaatgattataaggaatataagtcaaacattgtgtctacgcataaattttatttaagttaaccttgtagtagcatttcagagcgatttggctgcaggaaaataactgatgatttggtgacccgaatcgaaaatctgacggggaaaaaagcacatgcgatgttacggcgtcgcctcttcttcgctcaccggtccaattggaactaaattttgttgcttttggtggtggggggggggggaagggcgttggaaaaaagtatatccgatttcaaaaaaacttcatttttctctttagtgaccttacatcaattttggaccggtttgagcagaaaaagcccttctatctttacaccggccgtgggccgagcagtgggagtctccacctcggccatctcatcccatttttcttctgtaaaagtttacaagactcttttgacattccgctgatcatccaggttcgtatttccatcgtcaaaaaggggcgtacgccggcacttcgtcaggggatgaattttctattggcagattaccgacgatgaaaaatttttgtggaaagacatggacctggagcggtctaaaaa

SEQ ID NO: 14754 - DNA, 1424 bp, Heterodera glycines
  unsure (1)..(1424): unsure at all n locations
aaaaaaatgttttcaatgatttttttcatgaaattttcttataaaaaattttctaagatttttttcttgaaaatttcttagtttgaaaatttttctttttaaatttctgcggcgatattttgtctcggcgatatttcgggcggcgatattttggggtgcaccctaattattatagcgaaagttggagaaaagctaatcattacgtgcattgactcaaatgacaatttatgattgattttttgagataacaaattgggttttagatcaacaaatatgcgttcagtggcgggagggacacaaaggaagaacaccgccaatttgggggcgactgtaccgtggacacttccttccaattcctgcgctttttcctcgacgacgacgaaagattagaagaaataagagaggtttaaccacaattcattatcatagacttttgcttatggcacccaaaataaggcccttttagttaattatttaaatagaaatagcaatccatcacaattacacaattatttgtacgcaataaattttgttttaagcaatacgcaagtggtgctatgttttccggcgaactcaaggcgattgctattggaattgtgcaaggcattgtgtcagaattgcaaactcgaaggaagacgatcaccaacgacgtggtgcgcgagttcaccacgccaaggaagttggcatatgacttttagctgatttcgtgagaaatactgtttttgaacaaattgtcgaaagaaaaatgaagtgatcgttcttcaaactgttgattttttaatttattttgtttagaattacaaaaaggagaaccaaaatcatttgtgagattgttttgactagttttcgagatcactctcacactttgtgtgttctcctcccggcagaattatggtcccgataaaaaacaaggttaaatttttattttgggtaaaaatgccgtttaattatctggttgtgagctcagagtttgcaaagttattgagtttatttttgcaccaggaaaaacaaaaaaaaattttaatttaatttttaatagggaccacaattctgcggtattaccctcctctctccctggtttcagtcctcttcgctctcctccccttctttcacatctttgatcagttccgccacgtgcttcgcttgtctcagttttccgtcctctccaatcactcccggtttgatcattccctgttcctgtagtttctgtttattacctgtttaatttcttcgaataccatcattttgtccatacaatcgacaagtttcatcatttcatattccttctgctcctcactcattgaatcgatttgcctacgccattcttctagctganagcgcgggtttgatccatcgtgggagtgacaagtaaaattctgcactagaatcgtgtctgtgcccacctgttcgggcgggggaatgaa

SEQ ID NO: 14755 - DNA, 992 bp, Heterodera glycines
attcctaaaaaagcgatttcgacgttggaataataaaatatgcttacatcgctagcttctgccacagaattatcccatgcctctgaacctccattaactttttcaggatttagttgatgataaagcgtcggccatccaaatgccatattgtcctcagagacataattgctgccggcaaaatcacgaattataccttgtcaattaaatgaacttaattagtaattatccgcttatctccttttctactcaaaaaatataatcaatttaaaaaactgcagctttaaatttaatattgcaaaaaggaaagaattgtttatacctttgctagttgcaataccaatgtgtccaataaagggaaataaccaactgatgagggggattggcgtccaaacaatgcaaaaaggataccggtgctggtcagatcgaatattcatggtgtattagtaacaggccattcacaaataataaaattaaaaatgactaaatagtgccatcagtagggctcgaaattatatggactaaaaagctcagaaatggccaaatattaaccaaaatatggactaaaaactgacaaaaataaaattccagtaactcattcgaaaactctttttgaactctgcaaatctgtgtaagttttttacttatttttgtttttcgtcggagcctcaattctgtttattaccgtgaaaccaactcgcaatcaagccggcaatcatttaagaattggtgtcccgaccaaaaaaaactattaaaaatttgtcgggtattttttctaggctaaaaaaatgtgctgatcacgaatctgagctcagattttgaaaatcattgattttatctaagattttttggcaattacttgaattttttccaaattaaagaaaataagtccgacataaaactgatacaaaaaaagctttcaaatgctcttattaacggatgggaaagtcaaggtttgaatttttttccattttttgaaattaatttttaacccc

SEQ ID NO: 14756 - DNA, 1784 bp, Heterodera glycines
  unsure (1)..(1784): unsure at all n locations
ataaagggaaataaccaactgatgagggggatggcgtccaacaaatgcaaaaaggataccggtgctggtcagatcgaatatncatggtgtattagtagcagcccattcacaaataataaaattaaaaatgactaaatagtgccatcagtagggctcgaaattatatggactaaaaagctcagaaatggccaaatattaaccaaaatatggactaaaaactgacaaaaattaatttactaaaattccaaaaatattcaatatttgcttaaacaaacttaaagaatacacaatattaccaaaaaatggatttaaatcttaaaaacgccaaattttttaaacaaattctaacttcataattccaaacggctccctgatatgccaaatattttataaattttttgaaccaaaaagcattaaatttgtgccaaatggtatgaaattaatcccgtaaccccagactcccgcctcatattacctaatttgcaagggaccaataatttaatttcaaaaatcggaaaaaaactaaaaactttacttccaaagagtagtaactcattcgaaaactctttttgaactctgcaaatctgtgtgttttttacttatttttgtttttcgtcggagcctcaattctgtttattaccgtgaaaccaactcgcaatcaagcctttacttccttaccaataacctttcatatttagatattttcagcagcttttttgtattccgtaatgacttcacgaaaattttttgtcggtgggaattggaaaatgaacggcacttttacgtcaatcgctgagttggtcaatttgctcaaccaaagtggtggtaattctgacgtggatatcgttgttgcgcctccaggtcagttggatttactgtggaatatatattcaattatcatttctttaattaagcaccttttcttcaccatgtgaaacaaaaattggaacatggcatccaagtagctgcacaaaactgttacaaagtaagctaatacttggcaaatttggtaaaatgttcagttacaaaggttgccaaaggcgcttttactggagagatcagtccagaaatgatcaaggacgtaggcgcgacttacgttatcctcgggcactctgaaaggcgtcacgttttcggagaagaggacgcattgattgcggagaaagcggcgcatgcactcagcaccggtttaagtgtgatttattgtattggagagaaattagaagagcgtgaagcggagaagacaaaagaggtggtagagattttaatttaatctattatactaattttacgcaagatttaaggtgaatttcaaacagttggaagctttactttccgtcaaaaatttggtctggccaaagatcgtcattgcttatgagccagtgtgggcgattggcaccggaaaaaccgccacccccgaacaggcgcaggaagtgcacggatggatccgcaaatttttgagcgagaaagtatcgcaagaaattgctgagaaaactcgaattatttatggaggtagtttattcaattctctgatatatattcagcgtttaaatgctttttttgtctaggttctgtgacagccgaaaattgcaaagatttggcagctaagcaagacattgatggatttttggttggcggagcatcgcttaagccggattttgtgaacatcattaatgcgaaatcctaaaaaagaaacgaacaattggtgaagggaaagaaaacattgacttacgactactactaattgtaagatgataaaaaggaatcatttatttatacgatatgac

SEQ ID NO: 14757 - DNA, 1130 bp, Heterodera glycines
  unsure (1)..(1130): unsure at all n locations
atataaattaatattgtgctataagaactgactatttagtcaacagaaaataaataaatcataaaattagaacaaaaaatgattttattttagattgcacacagaagatgcataataagctaatatattcgaatttattttgaaataactgttcaacagattattagttgtttctaagaaataatgataggaagcttatctgaaatgtgtgctcacccaggttggaatttgtcatttcctgcaataaatgttttcatataaaggtttaaaaaatttgatcgggtttaggaacattcaacaaatgcatagataaattttttgaatattatacaatcgtgctttttgctctctatcaatttattataaaaaaattcacttcccttcgaaattgaaggcagaatgctcatttgaaactacgcaaatataaattaatatttgctataagaactgactatttagtcaacagaaaataaataaatcataaaattagaacaaaaaatgattttattttagaatgcacactgaagatgcataataagctaatatattcgaatttattttgaaataactgttcaacagattattagttgtttctaagaaataatgataggaagcttatctgaaatgtgtgctcacccaggttggaatttgtcatttcctgcaataaatgttttcatataaaggtttaaaaaatttgatcgggtttaggaacattcaacaaatgcatagataaatttttgaatattatacaatcgtgctttttgctctctatcaatttattataaaaaaattcacttctcttcgaaattgaaggcagaatgctcatttgaagctacgcaaatataaattaatatttgctataagaatcgactatttagtcaacagaaaacaaataaatcataaaattagaacaaaaaatgattttattttagaatgcacactgaagatacataataagctaatatatttgaatttattttgaaataactgttcaacagattattagttgtttctaagaaataatgataggaagcttatctgnaatgtgtgctcnaccaggttgggatttgtcatttcctgcaataaatggttttcatataagggttaaaaaatttgatcgggtttaggaa

SEQ ID NO: 14758 - DNA, 2537 bp, Heterodera glycines
  unsure (1)..(2537): unsure at all n locations
tgttttctataaaggtttaaaaaatttgatcgggccttctaacattcaacaaatgcatagataaattttttgaatatcatacaatcgtgctttttgctctctatcaatttattataaaaaaattcacttcccttcgaaattgaaggcagaatgctcatttgaagctacgcatatataaattaatatttgctataagaactgactatttagtcaacagaaaacaaataaatcataaaattagaacaaaaaatgatttttttttagaatgcacactgaagatgcataataagctaatatattcgaatttattttgaaataattgttcaacagattattagttgtttctaagaaataatgataggaagcttatctgaaatgtgtgctcggttggaatttgtcatttcctgcaataaatgttttcatataaaggtttaaaaaatttgatcgggtttgggaacattcaacaaatgcatagataaattttttgaatattatacaatcgtgctttttgctctctatcaatttattataaaaaaattcacttcccttctaaattgaaggcagaatgctcatttgaagctacgcaaatataaattaatatttgctataagaactgactatttagtcaacagaaaacaaataaatcataaaattagaacaaaaaatgattttttttagaatgctcactgaagatacataataagctaatatattcgaatttattttgaaataactgttcaacagattattagttgtttctaagaaataatgataggaagcttatctgaaatgtgtgctcacccaggttggaatttgtcatttcctgcaataaatgttttcatataaaggtttaaaaaatttgatcgggtttaggaacattcaacaaatgcatagataaattttttgaatattatactatcgtgctttttgctctctatcaatttattataaaaaaattcacttcccttcgaaattgaaggcagaatgctcatttgaggctacgcaaatataaattaatatttgctgtcgccaaaagcgacacaaatttcttggaaattttcatttattttttaatccttttcatcgatcaattttgcattcgctcgctcgttaattatgagtcatcttctctcttcctcatatttttatggatttttttctatttgtttgtgcacatttttcacgtgcctggccccgcccccattgatttgtgagggtataaaagcccggcccattctccattttcctgacttcttgaaaaccttttgaaatgaataacggaaaattgtttgaaaaggaaaagtgcatttcctcaggaatgaaaggaacgaaaattaattaatattaaatggcgaattctgttaaggattgcgttctaaacaaattattaataattaattgaatatattaaaggaattggaattgtaaaggaaaaagtggaaaacaaacaattaatgggaaaatcgcaaaacccaaacggatataacaaaaacagattttaattaaaaattataaattggagcgtactatggtttcaaaaaagccgtataaaaggggctgggttttcagtgatttcagatcgctcattggttccctccgaagtttccattccttccccgtgccgtgctctgcgcctaccctgtgccgtgccctgcgccttccccgtgccgtgcccgtgcgcctttcccgtgccgtgccctgcgccttccccgtgccgtgcccgtgcgcctttcccgtgccctgctcctttcccgtgccgtgccctgcgtcttccctgtgccgtgccctgcgccttccctttaccattcccctttgtgcccattttatcatgtcggattatatttgttcattaattaattatggtttaattacccaagtttgagggtacaaaataaagtgaatttttggcgcctttggtctttaatttttgtcaactcgctctgaatacgtccgcccagcccattcaaacttttttgccgtcgtcagaacgacaaaagtggtgccacgacccgggaccaacagaaattcgttatgatttatttgttttctgttgactaaatagtcggttcttatagcaaatattaatttatatttgcgtagcttcaaatgagcattctgccttcaatttcgaagggaagaaaatttttttataataaattgatagagagcaaaaagcacgattgtataatattcaaaaaatttatctatgcatttgttgaacgtttctaaacccgatcgaattttttaaacctttatatgaaaacatttattgcaggaaatgacaaattccaacctgggtgagcacacatttcagataagcttcctatcattatttcttagaaacaactaataatctgttgaacagttatttcaaataaattcgaatatattagcttattatgcatcttcagtctgcattctaaaataaaatcattttttgttctaattttatgatttatttgttttctgttgactaaatagtcagttcttataacagatattaattttagcttcaaatgnagcattctgccttcaat

SEQ ID NO: 14759 - DNA, 1178 bp, Heterodera glycines
ttttgtttggatttttcacaacaaattttacgaccgatgtttcccttcaattgaaaatgccataaagccagacctttgtcgtccaggagcgccagaaagtgagcgagcgaacgggagaaaaaagtgtgagagaaagcatcattttgatgggcatgcccgcggggggagggggatggggggggggtgagatggaaagctgtggaggggaggagaatatgctgagtggagtgaagatgagatagtgtgatagagagaaagagagacggaggggggggggggtaatgctcgtcgctcattatataaaaaaaatgctggtccatcgattgtgatgaccaccgaacgagtcgttggtcatctccccaaccccattttatttatatatattttgttgttcattttttcattgtaataatatttttttttccaatttagcaaaaaaatgaatcaagcctgtgtacaacagaattgtgtcactcccgtggaggcagatccaaatgttagcaaaaagtcgtggaatcgccgccaatcaaaaggtgggttttatttgaaaagggtgggaaaatcagtttttacactgctgacataaattttcatcgcctttggcaaaattaatcagccgaatttgatgatttagggggcgtaaattttgaaaaattgtggttgtgcgataggggctttgaaaatttgataaattttcaaaatttaaatttttttggggggggggcttgagtttgctttgttttttaccaaaattaaacaaaacatttttttttttgctttagaaacagattctcatcaaaaaattgactgcaaacttcagcggcacacatcaacaacacaacaccaacacaaatggacaaaacgatgatggggacggcactgacaatgagcaaagtttcggcgacggcacatatggacaaagcgatgatggggacggaactgacaatgagcaaaattttggcggcggcggcggcggcacaaatggacaaagcgatgatggggacggcactgacgatgagcaaagttttggcggcggcggcggtgacaacaatgttgagggagagcaggaggggggccagcaacaacaacagtccactgagtttacccgacgtcaaaaaattaaaaaaatatttagaaaattaaaaaaatccttttgaaattaaattttaaattctttg

SEQ ID NO: 14760 - DNA, 3626 bp, Heterodera glycines
gtaattatctgtggataattgaatatgaatgagagaaacgacagatggagggatgggtgaaaaagagggaagaacaaaagtgagacgagagagagagaaacaaaaatgaggtgagagagtgagagagacaaagtgaagatagagtaggtggagaagcgaaaatgtaaaaaagattttaattgcattgggcaggcgaaatggagaaaccccccgagagcggtccagaaaaaacatcaacaacaacaacaacagttgcaattgatgcagaacggtgggccggatgcttatgagctgaaagaagtttttggttattataacaatggatgccaagaggcgtactatgtgtcgtggctcagtgagtccaatttgaaagtgatcaaagtggagcggtggagggggggggggggggggggttggaggaaggggtaatttaaattttaaaatttgacgagtcaatttaaatttgcaaatgattgaaggggagttgtgaggggagggggttacaaaaggatttgaaaatgattgaaaggcagggaaggggtaataaattggacccatcaagagcatcttttaaatttccaaatcattcccgtgtgaaaatttcccttattggtagtcttttcttctatattcaccatttaacattattaggttcccgtttctacagcacttcttctccctcattctatcgcctgggttggtggctgaggtcacttgtgcttgcacatgcagacctccccgccttctcgtctggtggtagaatgcctttccccttcctcattctatcgcctgggttggtggctgaggtcacttgtgcttgcacatgcagacctccccgccttctcgggtggtagaatgcctttccacgacccggttctaacccccagcttcctataaacctatgatgtaaatggtcaataaggaaaaaaaagtactaccaataagggaaatttataccactccttgtttttaagactttcgcaatcgcgaatgggtcaatagcattgactgttacggtctcgaattgaccaaccaattttcgagagaagcctccacccatcagacgataagggcgatgtgcggaaggagtgcgccgcatgagcaaaagaagctgatagttgaggatccgtattttgaaaaatgtatttttttcaaaatttttgggaattagtttctgattttcagttagagaacggtacggggtaggggaaaaattgcttggaggcgtttgaacgggagtgcatgcagcaaccacccgaggcttaacattttgctcattttttttttgctgtccgaggcttgaatttgccatccgatacttaacatttacccatttcttattttttaataaaaatgcttcaaatcattttttcatttatgaattaaaaatggcattactaaaaaatgaaaggaaaatgcgaaagtttagggggatggattaggcccaaaatagacaaacttattacatgtagtttgacaagtcaaacatttgcactgatcatcccctgaccatacgatcgagcattcagcgcacacattcacatgtgcgcaccattcactcccaaacatcggttcgtcgatcagacaaaacatgcaatgtggctcccatttgggagacacatcggaggtgcgaacggatgttggttttgtcattgttgcggcgcggtagctttgcagtgcgaggtgtcggcagcgcatatgttgctcctctactacagagcgtaactgttgttggcctctttcacgttcagcgtgtattgcgttgttcaaactttgttccattttgcgctccgcatcagcgatggcaaattctgccaattcttttgcctcggccaccttctcttccacaagtgccttcattttggcctccaaaaaatcttttttgaagctttccattgccatcccatctgaaaaagcgcactgttcccagtaatattacactacccttaccggaagttgcggccgatgttgctggctcgtcgtccacagaaaatcgtttgttgcgtgttggtgaacgaacaaactttttgtctttaccttgttaaaaactgtgatcacaaaaaacattgaataccttacttccccggcccaagcctcaagttgctcaagtctgaagcggtagttcacaaaatgatgacgcatctgcatcaattttacggactgtgcgccaataatttgtttcagtgacgcaatttcactttcaaccgatgcggaatttgcactcatttttattaaccgtgaagagggtgggagataaaatgcaaaaataaggaaggaaaaggatgagggcagagtgtgtgaggatatttgccgaacaacacaacaacaacaacaaccatgcgatgtagctgccgacagatggctaccttcccccccccatccccagccaccattgcgcaaattgaattaaattattttttattagttgagggcaaatcacataataataataaaagaaaggtatcatgatatcattaggcttgatcggttgaaagttttcgtttctttgacggagtcaatatgtccgttccgttgcaattcacacgagcacaattttcgcacatttcgaagtttagggccacacggtcgttgtccattcggcgaactttctctttgttctcgaacagattccgccagtcatcatcgcagagataaattgccaacatatatttgcctttgaaaattttccacagagctcgctcgtccacttttgccttttttgggcacgaaggttgagccaaaattttttcgggagatgatgatgatgacattttgtaaaaatgattttggggcttgagcgggtaaatttaatctgcttaaagtgggcggagtcctaattctcaggtatataaatgatgccgagtttaaacaaattatcattttatgaatctgaaatggtactcgtcaatgtgttttgtgctcagctattagactgtcccgtcaagtcactgcgcgaccgacttaaccaccccgaagattgtgtaaatgcgatgaatggattgatggggaagaaagttcgaacaacctacaaagatcgcaatgggatgcacaaaaccttttttgtcagcggtatcacggagcgcggtgcagctttcgttccggcttatggcaatctacgggcaccatacaacgtaaatgtggccgcttacttttatgcacggcatcccataaagctccatttcccttacgtgccttgcgtaattgaacgcttttccgggagaggtgaggaccgtttctacccaatggagttgctggaaattgtggatgaggaaaacaaagggagattgtttggacgaatgtttatggaaattggtgaagatgatgatgatgataatgacgaggatgtttcaacatcctttgactcaacactacgatttgatatgggacgcgatgagtgttcccaattatggcgatgatcaatatttgcaatattcatcttctattactaaactatgcacttttctacctaaaaatagcattttcacactcttaattatttaatcaatatattagtttttcactctattaattcggcatttttctacccaaaacagacaacttcttttttttcatttattcaaattcacaaaataaataagaaaatgtttacaaggtggaccaaagtt

SEQ ID NO: 14761 - DNA, 1525 bp, Heterodera glycines
cctcgttcggaaatgtgccaactccgtccaaagtgccaacccattgacttccatcccgtacgtccccagcagtgcaatggcactcgccggatttatcagcgaaaaattgagcctacagtatgccttgttgaacccggcgcatttacggtaggttgcaaaagtctttttgaaaaatcaagaatattctctggaatttaggcgttgagtgaattggaaccgtgcccaccgtgtgcgcttgggatgtaccgtaacccgcagagcggcgaatgccaaaaatgcgccgagagcgaagtgtcggaggacggaataggcaattaaataatacccctaattagcaagcacaacaattaaaattaattccaatcagtgtgtaagcgatgccctgctgactcgcagcccgagttcgggctgttcatcaaccgatgggattcgtttccccccggcgtgacgcccaaattcgaatgcgaattcgtttccgccggtggttttaaattttcttttggttttaattatatttaaatggcccattcgaattcattcagatgaattggccggcgattgccgtgtctctcccgcttggatttcgcgcggcgaccgtctcgaaagtgtgcagacgcgtttcacgggagtggcgctggaaatgagcagtcagtcaaacaattaaatgaatgaaatcagccaattcttgaataatttaagtaaaatttacttcttttttctctaattctttaaaaattactcaaaatccttaaaaattaacaaattttaacaaaatgagcggcccttttggcgctttctctacaacaaatttttttgccgaaaaatataacggaaaaatgcagcaaaattttcaaaaaaaatattttaagcttttaaatttatttaaaaatccattttaaggcaccatttttgaagtcttttgtgcttttggaatcttctagattttttaaattttcatcttccttagttcaccttggcgatggctttttcgctccgctccattcgggccgcgtgtccgctgacaatccgcttgcgctgatatcggtggagttggagctgatctgtgaggacgactcgtgccaattttacatcgttcaagtcagcggacgcatttaattgaattaattttaatgttaaattaattaccgtatctgagaacgatacaaaacattcgtgccaacattaaaaggaactcgacccgcccgcgtcccccgctttgctcgcacccgccgcaaatgcaccgcgtggcgaactgcaaatgttggcactgctcaacggcactcagccgcgccgaatgctgcaggtagttgatttgaaaaattgatcataatccccctcgctgtatgtctgttcaaaaccccgttccgtccgtcccttttgggtcgccgctgtgaccaccgctcgtccgcgtcgtctcgtgttcgcgttcatgcgctccggtgcggtgttgggccgtgacgcgctgtccgaccgtgcgattctgtacgcgatcaacgcgacgaacacaggcgacgcgcaacggcaa

SEQ ID NO: 14762 - DNA, 2098 bp, Heterodera glycines
tggggacaaaagggcggacgacgggggaggaggacgacgaatgcattttgacatcagtgcattgcgcgaaacggcacttaccgcacgggtgggagaaagggggaggcggggggggggggaataaaaatgtgccgaaaaacgataattaggacaaaattttcgaatggttcggcaattttggcactcaatttttcggcccaaagtcattccgacatagacagaaaccccaatgagaaaataggcgaattttgaattcccgagtcgagtcaacaaaaaaaatcgtgacggtcgagaatttgacatttccaacggggttttcagggcattcgtgtgttctccagagacggccagtcctatgtgcacgtgttcaacatgtcgctgttctccgatcggcacgtgcaatgccgtgacacacttttggccgaactgtccaatttagtcggacagacgccggcaaataatgacgaggacagcacaaacacagtgaaaatgccatctcttacattttttaattctaaatctcttaaattgaatgaaggatgatgaggcgatgttttgccgatgggctgctgttccgattgtcccttcggccgatcagtccaaaaatgagacgccattgggcgccgaactgttcgtctcctccacaatgttggcaaatttgcatttaaccctgtgctaattttagttcatttaatttacagaatttcgcgcaaattggcactgatcacgcgccgaagacaattcggggctttccatttgtcggatgatcagttggaatatggtaaaagaaaaattggaaaatgatttgaagatatatatcaattgactgattaaaccgccgctgatagggctttttatttgcccaattatcagtcctcgtacagtatttataccgtatcgtatgaccaattagggcatggtaatagacccctaattcgatcgtaatatgactgactatccaattataagtttgggtacggtatttataccgtatgactaattagggtatggtaattgcccctaattcgatcctaatttgttgtttttgttttactgagtctctctggctaatgcccttgctcagatccggccactcctcgtgaccaccttccactcgacgtgcacttcttcttccacccttcctccccttctccgtcttcttctgccgccgttttcctctccaattgtcccaacggcactttgggcgtcgtcacagtgcgctgcgagccaagcgttgtggcaaaaccattggttgctttttttattaattaactttatttaattttaatttaaaatttaattaggcccgcctttcacggcattgccccgatgggacgtgcgacgggtgcctttaccacgtgctggtggagacagtgcacggctgtccgctgtgccgtgctgatgattttcgcgaaattcgcggcgaatgtaacaaaaatggaggggggggggaagggataatggttagagatcgacctggaaacctgaatccaggtctagattttcctgaaaccaggtccaaacatggaatccaggtctaggctttttcaaaatgtcaatctttaataatggataaccgattgatcggcccgaaaatggaaattttaattttaaattgaaattgaaatttccaaatttaatctttgccaggcatcgacgggtcccaaagtgtccattcgctgccctccaaacattgcgctttgtcgggcgcccaaacgcgcgaacggacggagccgtgccgggtgattctgtcccaaaatgtgcgccttcttttggcggttgccattgtgctgatccttttcctcagccttatcatcgcggccatttaccggcgaaacaaagcgtaaaaattaaaaacatttaattaatttatataattttaattgattttagattggaatatcgttatatgcgtttggcggaagggcgagaaactgatcagagcgtgaggacgagctgtgcactgatcgaaagtgatgtggacggatcagaggaagaagaggaggagggcgtaaaacagcaagggcaaaaggtgatcagtgaacaaaaataaagagattgatcagccagcaaaaggcaatgaatgggtagaggaata

SEQ ID NO: 14763 - DNA, 2251 bp, Heterodera glycines
ttttcatttattttgctaacagacaatacaatggtggggtcctaaaataagatttaaatttaaaaaaaaattgaaaaccgtttagccaataactgaagcgagtgcaatcccattatcgtgcggcgtacactccccttttttatactccatttaaacggaataacaacaaaccacttgtttttcttggttagcatagcgaataaatgcaacatggtcctttccaagcaattcacttgaatcaattactacctcattagtgttataaacatggagcggattttgttcgttgttgacaattaagaaataaataatatgtttatagttttggttaaatttgaatgttatgggatcgccgaaggtcattttggctaccagtagcagaacaagagtggttacagtcattaatgataatgggagcatttttttgaaatgagtgaaatgaaaatgaaaatttgttggcaatttattggggaaaaatattatgctttctatatatttgtattgatttatatttttcttgaatttaaatattatttctttctatggataatattagtgaggattgtaatattattttgtgaaaagaagggttgagtgaagtggcagatttaaaaaaacacaagtctcaggttaaaatcgaacacgaaacctttttttgggggtttccaatttccgtaaaatgtaagaaaaaagtttaaccataaagttttaagtcttaacttcaggcgcaaaattttttagcaaatttgtataaatttttaagaacatatttaaatttaaagaataaaccagcttcgttaaagctttagcttttttaacattttttcacatttctgcgatttgtttttcgttttttagtaggaaaatttcactcaaaacatttattttatatataacaaaatgttaatttatctcaaataaaataataatgtcttctcgaatttggtatctgttgattcttttcgctggaggcttatgcggtggcggaggctgcgggagcggctggtaacttggcggttccggtgcttcttaacttggtggggcaggctcataggctggtggcggcggaggcggtggtggcggtggaggaggcggtggtggcggtgcggcaccgtagcttggcggctctggttgctcatacgatggaggtggcggtggtggaggaggcggaggtgggggaggtggcggtggagggggaggcggcggctttattttagaaaatttaagcggtagccgaaaaaataggcaaattaggagtggtatcagcttacatcactgatttcgagaattattatttcataatttttgggcaaaaactcatattttctgtcagtgatatttttatttctggaatttttgttggtaatttccattgcataaaacacttttgtctggtgttttaaagtaaactttttcagttttattctttattaatttagcgcaaataaaattaatttttgaaaatgtaaaaaaattattttaaatgaatttaatattaaataatttcataatgcatttaaattgtgttatctacatcttaaaactttagcgtttgagatttataattaatatggaatttccgcttcaaattcaaaaattcacacgcaacaccgatttctcataagaattgtgttaataaatgaaataaaataaactataaagatcaattttgtattaagtatcagacttccggcgcaaaaaaaaagaatttaaaaattttttctaagttttttgaacatatttaaatttaaagaataaattgtttgttaatcaactttgttaaagcataattattatagataaagccttttttaacattttttcacatttctgcgatttgtttttcgttttttagtaggaaaatttcactcaaaacatttattttatatataacaaaatgttaatttatctcaaataaaataataatgtcttctcgaatttggtatctgttgattcttttcgctggaggcttatgcggtggcggaggctgcgggagcggctggtaacttggcggttccggtgcttcttaacttggtggggcaggctcataggctggtggcggcggaggcggcggggctccgtagcttggcggttctggtttttcatacgctggcggctgcggtggtggaggcggcggtgggggagggggagggggaggcggcgccggggctccgtagcttgggggctgctgtggctcattgcatggcgcttctggtggctcgtacgctggtggtggcggaggcggtggagg

SEQ ID NO: 14764 - DNA, 865 bp, Heterodera glycines
ggaggcggcggcggtgctccatagcttgggggctgcggtggctcatagcttggcggttctgctggtggctcgtacgctggtggtggcggaggcggtggtggcggaggaggtggcggtggaggagctggctcgggtgctggcggtgctccagacgcgtcgcgttttcctctgccgtatttgccgtatcctttagatggaggctgcggttgaggccttaaaataaatataaattttaataattatttatttttgagtgtttttacggctgtttctttccgcaatcgcttgggtagttgcacacttggtttgcctggtcgaacacaagccctttcgggcagttcagcttcgtggacacaccgcctgagcatgcgtagtaaacgttggacgcgcaatatttaggcgccgacagtccctctcctttgcctaaaatataattaatggctgctttaataatcaaaagaaacaatttacatttttgtggtggtgatggtgggtacggtcccggtccgggcggcggcggagctccatagcctgtagtgggtcctccgtagcctggcggtggcggaggcggaggtggtggtggcggggctccgtaagttggtggaggtcctccgtaacttgacggaggcggtggtggaggcggtggtggcggaggcggtggcggaggcggtggcggtggcggaggaggcggcgccgctccataacttggtgggggtccaccgtaacttgacggaggcggtggtggaggcggtggcgcccctttcccgtcactgagcacgacaggaatccccacaaaaaataatgaacaaatgaccaatggagccaatgaaatcagtttcattttgactaaattcaaatataattt

SEQ ID NO: 14765 - DNA, 1709 bp, Heterodera glycines
  unsure (1)..(1709): unsure at all n locations
aaatggaaagaggatttttggtgggataaagaaattgaaattgcctttttgccaaaaatgaaaaaattaaataaaaaaattgggtacgttatgaaattaacaatttttataaaaataggagcgatttttcagatggaaaagagtgaatttggatttaatggtcagccgaatctcaaactaaaaaaagccattttcatttttaaaattcaaaaaaagattaaaattaaataccgaattacgtaaattctaaatcaaaaaaaaaatattcagaattacaaaaccatttaaggcatgattataagaattttttgtaggaataacgattcaaattgattttttcgcataaattaaaaaatcggctacattaagaaataagcaatatttcaattttcttttttgacgaatgtgaaaaaagatgaagcaaaaaaaatgccatgcctttgaatcgatttatgacaaagtgaagaaatatattcaaaggcaagaaaaaatcatttatctatcataatatccgctgacacacaaaaatgcccaagccacgaaaattttcaaaatttttgtaaacatataaaaacgcagaattaatttcttagggggcgtaaaactgaaatgacaaaattttattcaaaaagcaacaaaattagccaaattaatattgagattcatgctgcaaataagtggcaattcgagttgttcgggagatagaagacgtcagcgattgtcagttaaaatagttttgtaaattgaaaatctaaaaacattcaaatttaggggggtgtaaaatgacaaaattttattcaaaaagcaaaaatttaagccaaattagtagtgagatacatcgttgtaattaagtagtatttcgagttgttcgggaggtgagcgattttcaatcaaaatagatttataaattgaaaatgacggtctacctcagttcggccccgcacggttcggccccagccgattttttgactataacttttttctttgccaaccaaatccaacatagttgctatcattcgaaagcttaatgggtttagaagctttttctaagctattgcttggcaattagacaaatatcaaaaaagatataacatgaaaactaaaaaatcaatatttttgaagttttttcttcataaatttttttaaagcttgaaatatttttgctttttgtaaagctaatagagcatgtgaagagcttttttagaatgataccgagattgttggatttggttggcaaagaaaaaagttatagatcaaaatgatcattcggcatcaaaatgccaaatagatttttaaatttttttttggtttttaggttctaaaaataaaaacctagaaaataggttctaaagactcgaaaagtaacttgttttcgtgcctttcaggtcaccgggagctcaggtaaaaataagttaaaacctaaaaatatactgatttttttcagcccgatgttctgattcgagatttttcgatgacaccactgattacgtgctgggtcgtttcttaaatccgccaaggggtaggaaaacaaaaaaatgtaagacacataaattcataacctggctctatctcaacncaaattaatatttcatggtatcattcaatagctcttgtgttctctatcagaatattcaaatttccaaaatttgcttttattttgccggattcaattggataagtaaagaaaaatgtaaaaaaattaaatgcca

SEQ ID NO: 14766 - DNA, 2048 bp, Heterodera glycines
aatggaagaacatgaacattcgtccgtcgctgagcccagcggaattggacgcacgtcgacagctgcagaaagaatgtgcagagaagcgaaaagacggaggtgactgggtgatctatgctgggacggtcggacattcccaatttccgcaaaatcaattgacttatccccaaatcacttttgacaaatacatatttttcaccaaataagaatatcttttccggtcttaagcatgttaagcccaataaaccaatgatgaaaataggggaagttaaggtctgcttagttaatataagatcaatccacaacaaaattgatgaaatcgctttaaatttggtaaattaaaacatagaaatttttctgttaactgaaatatggacaaaggaggaaaaccaaatcctctttagtccatggataatcgaaaactataactttatttttttgtcatagaaaatctcaaaaattaacgcgtgggggtgattgcggtgttttaattaagaaagaaattgagtttttttattaaattttctgaaacaaaatataattgcgaaattttggtttttcaattacaaaaacgtaaatcaatcagatttgtgcttgtttaccgacgacccaagacaacatatagacaaaccaaagaactttttaaatttttagaaacattctatagccataattgtgttgtgttgggtgattttaatttcccgaataaagacctggtatggaaggaagggcagccctattctatgagtaaatttggtgaaattttttgccacttttttagtaagcttccttttttaatcgccacgaatggactcaccagggaaaattcgtggttagacttagttttaccagcgaatgatcaaattgtaaagcaatgtactattgaaggtagtgttttttcctctgatcatttagcgcaaattttcacattgactattccaaaaacactacaaaaaacaaaattcttttacactcgacgcttttctccgtcgaatgtgtccctttttaatattatgatttcttctagaattagcgctttatccaataagcattttactgtaaacgaaaaatacaacgcctttaataatacactgctagaaaccttaaacgagtgtattccaatgaaaagaattaccaaaaaagatatgaccctaaatatccaacgcatttaattgcatcaatcagagagaaagccagactgtataggcaatgtaaaactgatccatcaaaaaaaacactatatgatagcattagtttacacataaaaatacaaacaaataaatttcattctcaaattgaaaaaaggctatttcaaagggaagaaattctatctttaaatatatacaaaaatacgatgttaatccctttgaaataccaaatttagtttttgaaaacaaatgctatcatgtgtttttccacgataacatactataaattttttctttggcatccaaatccaacatttttggtagcattcgtaaagcttaacatgattagaagcttttatacttcgaaattttaaagttttttcttaataaaatttttctaggcttgaaaatcttttcgctttttgtaaagctaatagagcatgtgaagagctttcgaatgataccaacaatgttagatttggatgataaagaaaaaagctatagtggaaaagcatgctggggcccaaccgtgagggccgaactgacgggttccggccaagaaaccttctctcatttacctaaaaattcatgattattttgccgaaccaagtcaataaaacaaatatagccagaaagaaataccaacagtagaagcaatcaaattgaagaagtttattttttttaaagtcaaaatcagattttttacctttctatgttttgtcatggcacattttaaagttaattccatgattttgctattaaattttcataaatttatcacaacagcaaaaaagatgaagataattttaaaaaataataataataatctcacgaaaaattagcacccgtctcataaatcaatcataaaattgaagtgaatttctttttccatctgaaaag

SEQ ID NO: 14767 - DNA, 3635 bp, Heterodera glycines
  unsure (1)..(3635): unsure at all n locations
ttattttcgaaaaatntaagaataaatgccaaaattattcattaaaaataaaaacgatattgcacaaaaattcatttggtatttttcttctctttctttttcttatctgtgattatatttcagcttttaccagaattaatacacattcattcgaaaggcaagtaaggaatttggcgcacttttctttgggcctaatttttttttgtataaaaaattttctaccctatagacctaattattcttttggaagaatggagcctgtgttaaggattttttaaatttttctaagattttaacatttccgtttttaaattctttgttttggttttttcttatgctcaaaagcattaggataatctaaaatataataaaaactatagtaaactctggtacccgaactccgagggcaaaaaaatagtcataaatttgattaaaattcactcactcttagtttccaaaatattttttcaatttaattaattgattttaagaaaattctcctatgttcacattaattccttcaacaaaatttaattattatttataattacaacataaaaagcaccaaaagaaaaataaaaaatgggtagtgaatcattatttttgttcagaaaaaaattcctgtattttttgtatacatattctttatttacacgaaagacttacggagttgtctaatttttttaattccttccaaaaccctttgataatttatcctaagaaataaatatttctaaaagttcctatataaatcgggaacaaaaaataaaatatatacaaaaaaaaatgatttttttgtgcacactcccagtctatatttaacgcattaaaaattaccgtaggacaaaagaatagaagagggtggtttattttcctaaaattattttttatttttggttcatcatttatgtggttattaaaactgcttcttattccaatcatttcattcctttatcgattaagttggaccacaacaaaaaaaacggcagcgtactgcgcagtaaaaatagcgaaccaatcaatacctataaggtacgggattgatgcaaaatctcgagtgccttctcgagtttactgtttagcgggagaggcctaaaaatacgaaccttttaattggggagaaattgcgaaataaggaaccaatcaagcattttattgacaggttgtcagctgacacctggcacgtgactagcgtctcagtgaatatttcactgacagtgcggaatatttcgttgacaaatgttacattttcgacgcacgggcagaatgtcacgtgtctattgtgaaatatgcaacaaaaaaaaagtcacgtgcagattgagaaatatgcaacaaaaaaagtcatgtgcagattgcgaaatcgatggggaaaatgcaaaatagggaaccaatcaatcaattttgattgacaggtgacctaattttggtcaatattgcgaaatcgtgaagtcacgtgtaaattgcgaaataatggaagagaaaaaaagaccatcaattatttcagaaaattcaatttcattaatttaaatgaatttttatttattcaactattgtccaattaatattcctatatcatacaattaattcgaatttcattgacaattttggtgcttatcgattttttttcacgactcggaatcgcggcgcatcgacagagcgatgagagtggcggtctcattatcgattatttttttttgcgcggcagcgacatcgatagggaggacagtgctagtgtcattatcgattaatttgcgcggcgatgcatcggcggggagggatgggcaaaaaaaaagcacccgtgcggatttgggaattggattgggtgggcggcaacttcaaagggatgcacccctctcataggcacgggtgcttgcgcggcagcgacatcgatagggaggacagtgctagtgtcattatcgattatttttatcgattaatttgcgcggcgatgcatcggcggggagggataggcaacaaaaaaaagcacccgtgcggatttgggaattggattgggtgggcggcaacttcaaagggatgcacccctcccataggcatgggtccacgggcggcaatttcaaagggttgcacccctcccataggcatgggtccacgggcggcaacttcaaagggctgcacccctcccataggcttgggtccacgggcggcaacatcaaagggctgcacccctcccataggtacgggttcgtgcggtaaacacccgctcggaacccgctcgcttttgacgctctatactactaatgatcaaattttgtggtttttatcatttttctaatgagaaataagagttttggggcgccgctgagaacagtttttcatcaaattacaaaattttgcgattttgggccattttctaagaaaaaataggagttttgggggcgcggcggtgccgataggcgccgccggggaaaaaaaaatggaaattttgatcatttataaacaggttttcactgaaaattagccaatttataggtaaaatttttaaaaattttatgggaatttaatccaattcttaggggtgtaaaagtcgcatttcgcgccaaaaagcgaaatgcgaaaagcgaaatgcgaaacgccaaaaaatgcgaataatgcgaaaggcgaaatgcgaaaagcgaaacctcggcccatccctggcctgtacctattttttctgtacataagtacaggaaaataaatgtacaggaaaaatccaggttgccgaaaaatggcctgtgcctgtacctggctggatccaggaaaaatacagggctggatccaggtacatgttgatctctaatctacacccataaaacacagtcaaaatcgggaagtttgaaaaaaaaatctagggggttgtgaattttttgaaaatttgaaaaacccattggaaggtaaaagtttttcactttttttgtaaaatttttgatcaaatttttaccttttttaatttttggcttcgcgcaacgagcggcgccaaaacgaccctggcgccaaaacgtgggcgccaaaacgtgggcgccaaatcgtcggcgccaaaacgtgggcgccaaaacgacccagtccccattttagcgtactatttctttatctctattaaaagtgaaaatagaatgtgtttaattgtaatagccaatttaaaatttcccacgccagtagcttttttaccaagtatacaattgctttgacaaatcttctcctcatcaagatatattcttgttgtgaataaattcatcattacttaaggtaatattcaacttctattaagtcaaaaattgatttggacaatcctgctgatgatcaatcaccgttttgaataattacattgaaattgccaatctttgggaagtgtgataattaaataatgacctcatttgacttttaaagttttaattaatttggcattttgttttatttttttgtgtctttcattttcattttatgtttttttcactcgtggcccggacttaaattggtgatgcggattgtgtgtggtaattttaattgtgcttttaattgttgtgttgtttacatttaattgatttggattgctgtggctgtaagtgatttaaaaagtcttccttctaattcttctcccttcgcccgatttgggaattcggcaaagagcaaaaaagacc

SEQ ID NO: 14768 - DNA, 3101 bp, Heterodera glycines
tttctggatgtaaaccgaacaattcagggatagacgccattatgaaaaattgccacggttttttttggactcaactgatatgtcaggcgtaataaataaacacctgaagaatgtcgccggagaacagctcgcgcggctcgttctcctccccgctggcgctcaaccgttcgttgttgatgaatgtgccgtttgatgagcgcgtgtctttgatcatgaaatgaccggcgccattcgcccacagaacggcatggtttcgtgacaaaaccttggtaattaaaattttttgtttaaacagtaaaatttatgaatgtacgccgataaatctgggtccaggtccagatttgggcaccaaaaacctggatttcctggatgatatcttaccaattagaatttgttgtttcaactgaccaacgtttcatttcgagttatcaaaaattgtttaatggatagttcgagatatttcaattaatttttcaaacaattgtttgccttttaaaacaaattaaaaagaaatccaggtccaggctaggcttggatccaaggtggggttaggataaaaataaatttccaatcactttgcagtcaaaaatcgcgttgttcgatgacggctgcagtcggaccaccgatcggccaattttcaccgcgtcttcctccgtccgtgtgaccaaaattctgaccaaaaaatgatgttattataactgtacgaataaaataaaatttagcaaccaattcaacccgggcggatcatcaaaatgaaacagcaaaaacacacctccgttcctcaaaaggatgtgagttgctgcagggcgtcaaaatgcaaacaggaaaaccggtggcacttgtggccgccattttgggtcaatttagcgctgtttcacaaacaaaattaaataaaataataaaaatccaaatccatcattgatgacagaacaataaaaagtttaggcaacaaaaaaatttggcagatcgtaacaaattttgaaaaataatttgtaacaaatttttgagaccaatgaacaaaaaaaaaataattagaaatgaatgtaaaattgaaattgcatgaatgtgccaaagtgtgtgtcttaagcattctcctcatggtacgccgaatgttccactcgttgcagcgtcggataatacacttggaactcaaaatgtgtgcccagtgaaaaggggcccgggtttattgtcagtcgtcgccgttcgtccgctggctcaaaaaaggctttgaaacgatcagcgatcactaaatgtttggaaatttgaatttaaacaatttactgaacaaattgcattgatttccaaaaaaaaatttcccagcggcgcataacgccaccgcggaaccatcattttttacaaatattttttgaaaatttgacctcaaaaaagcgccaaattagtaattttttgtcaaaaaaaaacactacaaattcatgctttttcttcccagcaccgaaaattttgaaaaacaaaaccgataaatttcatgtatattcaaaaacattttctgtctgttgcctgaacccaaaattttgttaatacacataaaattttccattcaagatatgattggccaaaaaatgtaaattttggcaaaagtaaaaaaaaaattgttgtcctaagaaattgaggtttggtggtcattgatttgattcgtgtaaacaccaattggaacatagtaataatgtcaccaatctgaatgacttaccaagagcatcaggagacgggaacagttgaaacagtgggtcaaaatggggttgaattgggttgatgaacagtggcaacggcgagaaatggcgttgggcccaaattgtgtcacagaactgaagagtagagccaaaaaaatacaaaaattgggtgataaaaatcccatttttgcaccaattttggtattcggctggccatcgcgttttttggcatgaaaactgctgaacggcacaccttctccaccacatcgtcacgaaagatgacaatgtgccggtccttgaacaccaatttgcatgggttggtggcaaaatgcacatttttagcctccttaaagcatttttgtatcaactgcaacaaagtgggcctaaaaatgggggaaaaccggtaaaaaatggctaattgtttttttttgtaatgcctgggaaaaatttgcaacggaggcgcatcgtcagcacttggcacaaaaatgaattcggtggcgtggtaagcgtgcgaaaattcggacaaaatgtttgcaaaatgcctgaacgcgttggccgcctgctccatgtaactgtgcgcccgttgaatgccgagaaaagggccacaaaatacgaactttttttggggaaggggtttaaattaagaaatatagacatgacagaaaatgcttacaatgttcggtggactggctgaaaagccttgtaaaagatggtacagtgctttcaataccttaaaaataaaaaaatgtttttctagcggagcagattagttttgctgacggcgatattttgaagtgcatcggttttctgggcctaggcatcatcattaattgactacttttaattaagcctcgccacccctcccctgcgccgtggatgaaaaattcaattgcaaaaactttgagaccacacaaacccgctcattgtccaaatgcacatcggacatcagcacaattcggtcattcggatcgccgcgtgttcgccgtgccatttcctgtgtacgtgttgcaagccccggggcaccatcaaccgattcagcggattccaaggtggtcatcgtcggcaacgccatccgttccacgtccaagcggtcgccacttggggaacaaaggccctcaaacacaaaagtgccgccttcaaagtaaaggccgtcgtcgtatgtgcaagtgccgagatggagacgaacactgccggtcaaatcctctgcaaaaatttcataaaattttagtgcattccgtctcatccttggttctttagggataaaattgttttgggtgtgaattgtggattggtcttggaaaccggaacactacaactcgccaacaaattttttccggcgtccgagccaggcctgataattaaaaaaaaaaacctggctgattattgtgttgccctgggctggtatttccgtaa

SEQ ID NO: 14769 - DNA, 3144 bp, Heterodera glycines
ttaattaattacttttagatttctgtttcattttctcgtttagaattggttgtgacgaggacaacgatgaaaattgtgctcagctgaaaataaccatcaaaaattgcaacggaagagacgacttccgacggccccaagtgatctccgtcccggtggccccctttttgccgccctttccgccccctcccccgcctcatctccccccgccgctgccacttccggtgccgtttgcgcctctgccgccctttgcgcctccgcctccgctccctcctgccctccctccccctctccctcttccgcctcccgctctccctgcccctcctttccctctccctcccccatttcttccctctgttcctcctccttccccttgtgttgtctccccattctttgttcgtccgccacatcctctcacaacttttctaatatctgtcagaccatattcgaatcagttcatccctccccctcccgctgctgcttttctaccggcctctcctcccattccgtcgccaatttacgcccctcctcctcctcttcctcccattgttcttcctccttctcctcctcttcctcatcctgctgctgttcctcttgctccgccgcctcctctccccctgccagtagttgctcctttcccttctcctccgcccatcgccccgtcgcccgaacaaatttggcaccctcctccgatgccgttgcagcccccactcgccccctccgtgccgccttgccaatttcggtgttgccgtcgttgtgacaattgctggtcaccggtggctttgttcccatgcgagggaaggggagaagccgaaagtattaaagtggaagacaaagtgagagaataattaattaatgggaattaaggccaacgggacgaatgctgtcaaaggagaaggagaaaaaggaagtgggaagagcaaaaggaagaggaagaagaaaaggagggccattaaaaaagatggcatttaaacattctaatggaaaaggaaaaaaggacgagaaaatcaggaaaaagcacccaaaaagcggcagaagaagaagaagcgaatcgacatttaaatattatatttcaaactttattcatctttttgtgtaagcagtgcatataatttgctgccctaattagaaaatacaaattaatttttgaaaaccagtgccctacgggcactgaaagtgacgattttaatttatttttaaaaaattgaaatagcttcgctattaaacactgtctctatagggcgctacgcgccaaaaagctttataagagggcaattagatttttttaatggccgggaatatcctctttctcttcctcttttcctttctattgccctcctatttctctttctgttcgtcttttgcttctcttcctcttctgatcctcttctcctttcccttctcttcctcttcgcctcccttcctcccttcctcctatcttctcctcctgttcctctgtccctttcccttcctctttgccttctattcctcttcgtcttctgtcttctcctcctgttcctcttccccttctcttcctcttcctcttcgcctttcccttctgttcctctttccctttatcttcctctttaccttctattcctattcctcttcgtcttctgtcttttcctccagttcctctccccctttctctttccctttccccttctcttcctcttctcctgttcctctttctctttctcttcctctttgccttctattcctcttcgttcctcttcgcctcccttcctcttatcttctactcctgttcctctttccctttatcttcctctttaccttctattcctcttcgtcttctgtcttttcctccagttcctctccccctttctctttccctttctcttcctcttctcctgttcctctttctcttcctctttgccttctattcctcttcgttcctcttcgtaaaatttttgatctggtgaagctttttagtccatataaatccatattttgggggtttcgggaatattttgcgttttagaccatattttgaccattttttggaaattttcacaaaaaaatgcaaaaaagcgaaaaatatacccctaaagatagactttttagaaatttttaaaaaatacacccccccccccgaaaaagagaaatttttcgatattttggcaaattttcaaatattttgttcgcttccaaaaattgagggtttaaaattaaatctttttcaatttttaatccatgttttggtcgtatttggccatttttgagctttttaatccatatttcgggcattttagtccatatttaatttttttataaattatttagatttgtataattattgttttatttttttatttgattaatatttaaacttattttaaaatttaattaaaataaattattttttattaattttaaataaacgattattttattttataaatttaattaattgacaaaaacaaaaaaataaattaaaaaagcaaaataaaggtgaattattttcattcaataatgagtagaaacacacaaaattaatgggactcgaacccatgacagcatatgaccgacggcaacacataaccacttgaccaccggcgggtcgcacgccgtaatcccctttaattggagaaaattgtttcattttttgatttgacccgttgtaagacatgcaaaaagcgttcaaaaatggggtattcaaaaaaagtgcaaattttgccccatttttcgaatacagttcgaacagttctaaaccaatcggaactgctatagtttttccttatagcccttgaaaaactgcgtcgattgacccctctcgcgacccgtaaaactcgctaaaaactctcaaattagctcagaagcttgaaacaggggtgcaaacttcttataaggggaatttgaaaacaattaattaaaatacgcgttaatttattagtatcaatttttagaataaaaaaaagataatcagagaagaattgagaatgtattttctgcttttaaaaatttgtcatttacaagaatatattttttgttaagttgtttcctgattattattgcaaaatgttgatttcaaattaaagcattagtgaaaatcttactttaattgtaaaaataattaccgaattaaattaataaaaattcttttttttatgtaaaaataattgcaaa

SEQ ID NO: 14770 - DNA, 4780 bp, Heterodera glycines
  unsure (1)..(4780): unsure at all n locations
aattcattaaaattccgttcttaaaaaccatcatcataaatttcatctattaaattgaatcgttgcctatgatccaattattaggtaattgaatagactcgccaaaagttccattaccattttcaagtatctgttcagcgaaaattggtctttagcccgattatttattgttaatttcatctgctcaaatttactccaaaatattgacttttttattgtcaggtcaataatttcgcttcttactgcaaatttttttacaggtaacgtttgtctaaaatcacctgcaagaattattgttttgccaccaaataattgtttacagttagttaattcacgcaattttttctcgatagcatcaagtgcaaatcgtggtgtcatcggcgcttcgtctataacaaaaaaatcactttttattatttcttcggcagctttagtgccttgaacaactccagaaataatatgagcattaagattaagcggaaatttaaatcgattatgtattgttctaccattttttaataatgtagcagcaattcctgaaaatgccatgtttgtcatatgttttttataactataaatgatataatgcattcaatgtaaatgatttgcctgtgccacccgggccatcaatgtaaattaatttaggattaagtttgcctgatgctatttgttttatttttttgtaaataattttttggtcagcgttcatagacttatacaaattttctgcgattttcttttcttcttcatagtttatattctcgttttcttctgttaaagaggtttcttggggtaaatttttaaaatctttcaaagatttcccctcttgtaataaatttttattgatacgggtcaaagccaatacataagcaatgtttggttgctttttaattaagaaatcttctgataaattatttttaaattgttcccacaaaatttctggttgttttgggtcaccatacaataagatacttgtgaacaaactccttaacgctgctggaaacctgaactgacttgcttcatttaagcaatgcttccattcatcatcgtctttagttaatccacgtgctaaacacgcctttgaaaaatttatcaattgcattatacgactctttacagatttctttttgatgtaatcttatgtaatttaagctactccattcaattctggcagcctggtcgacacaccattgctgaaaaagtctattaccataatgatgaggcaaaaattttccttcatttcagaaaaataatttatattttgtaaaatcgcacaacgatatttttttattgtttgtatctttcatattataatgccaccctcggtaattattaggataaaataggggataacacataggttccaccaatggacttaaagggaaaatggtttcaatttttttgcttccttttatatgcactacaatatttgccgctggaatatcatcatttgcatctcgccaaagaattgcgcatacttcgttagaccttggaatattataacgccttagatctgtaccttcacgaatatcaaataacatcataatttcggggatatttgtgcccatgttttttgtctcttctaccgcattttcatagacatttttcatcatttcgtatgaatgcgagtaaacataattttcacgaacataattttcaacatatgcaattatttcaattatattatcatttgaatcagaggatttttcacccaacatgtttaatcgaaaatcaattgcttggtctgtgtcaataaaatacaattgcccgtttgtcggtaactcatcgttattcggctgggcaactgcattataagaatgataaatatttccttgtattttaaaaatcggaacatttttatcaggaaatttagacctcatacaacccaacgaagcacatgaaaaagaagaatttaaagttcttatattttttataaaacttttgtgtaaatcctttatttttgtgtaattattttcgtcgatttcaggttgaaataatacccttaaacctataggatattcttgcagcaaatcctccaaattacttaattttccataattgcaacattcaaaaaattcgtttaaaccctttggtttgtttcgttcttctggaaaatgaatggccggacaatgattacactttatattcaattctccaagaccataaacacctatatgtagaacatcggattcggctgcttttaaatataagtcaccttctttaattctatctctacgtgctttaacaaccttagcatccatcgctcttagttcatttctctgttcctcactcatttggatgcgcggtatttttctatttctatcatactctcggtttctttcatttttttctttgttcatattaatagataagaactcatcagggagattgtctaaatcaataacttcttttatatatgcctttctttttatcgcatgtttttggataaaattttcatcactttcttgtaaaaattcaatccgcttttgaacggagcttggaaccgtttctatcactttaccgcttttttttacggagctttgaaccctatattcaggtatgatgatgtggttggcgaagaatcatcaacttttaaattctgtttatgtcgaaccattttagcacaaagaaaatttcacgcttaaaaaacacaatgtttaaaaagttaattaaataagcgaaaaaacaaacaaaaaaagatatataccgaaataaaagattgccaaaaaggaattaaaaaactaaaagtgccaaaaaggaattaaaaaactaaaaggttacatctaattttttaacaccaaaataataaataccattttatacaaataaagctttttagacgttggtgagagaatttttgcatttaaatgcagaatcaaaaagcatattttcccaattctaaaaggttttaattgatggccaatgccttttaataaaggcaagtttaaagataaaaataatgaatgaaaaatttatgcaatataaacaaatttcagtggtgaagaaattaatgccttttgttgtttttaatatcgcacgaatttctttcataacaattttttgaaagaaactttcgtttcaaaaaaaactcattttttcattcggaaaaagcattatttttcggaaagacattctcaaataatataatagatatcggcaccgccggaatcttaaaatccttaattttcttaaaaaatgcctcaaattttcaaaaattggctatttttggacataatctgacactgtattgtattcaaatatcaattttttctcggcggcgcctatcggcaccgccggctccctcttcctccctggtcaccaaaaagttttttcaaaaaataagccgcaaaaaattgttaaaattaataaagggagtcaacaaataaattattaaaaaattttatttgaagcaatttgaaaaaatactgattttcgacccataaatgtgatttttttatttcaaatttctcctttataaatttttttatctattttttctttaataaaaggattttccttcaaatttgtgcattaaaaatatttttgttagtttttaattaaattttcgaattactcccgctcccgcccgggactcccgtaaaatttctgcgggattttaacgggagcgggattttcacgggattcccgatcccgctcccggaaaattttgaactcccgatcccgctcccgctcccggaaatttttttttaccggactctaataatagataattatgggtgtcaatttatgatactacacaaaaatacaattttaagggaaaaccccttgttttaattagtgatgtacattcgagagttggactcccaggatgagcgtgctctggttttattgagtgcgcctcgttcttgcgttcgtcttactaaagatgttcgggcatattaaaatttgaatttaggctaaaagttttgttgtggttgactaagaaattaatttcaatatcttaatgaaaacatcaaaatttaggaatgcgttatgcggtttatcgtctgatcgggtccaacgagcgtttgagagccgacactgaacggatggagcgtacaaacgcacttctttttcaaatatatgcacgcctttcaggtttatttttaaaacgatatcattatatcgaacagaaaatgcctcgatttagctggaccgcccaatttggaacagcagaatcttcctgttgctggtgctaatcagccgaatcttcctgttgctggtgctaatcagccgaatcttcctgttgctggtgctaatcagccgaatcttccggttgctggtgctaatcagccgaatcttcctgttgctggtgctaatcagccgaatcttccggttgctggtgctaatcagccgaatcttcctgttgctggtgctaatcaaccgaatcttcctgttgctggtggtaatcagccgaatcttcctgttgctggtgctaatcagccgaatcttccggttgctggtgctaatcagccgaatcttcctgttgctggtggtaatcagccgcagcccgctggtttgtcatttctcttgattttaccaatctccgctcatttcttagcattagcacgttcttattggcaaacaaaaaaaaaatgaattaaaaattggagtttaaaatttcattttattatgatttgtcagtccatccaatttggcgtattttagtccaagatgctggactagtggccgctaaccaatacatgcatcttctttatggtgtatgtttgtacatattgtattattaaataaacanagtatacgaattggaccnntgcag

SEQ ID NO: 14771 - DNA, 1636 bp, Heterodera glycines
  unsure (1)..(1636): unsure at all n locations
tttcattaaaaattgttaattttgcggatttttggactttctngcgaaattggaaaatttgagtgagagaggtcttgggcgtgaagggggggctactaataagcaaccgaaaattttcagtacacatctccctgctgggaccgtccctggcctttttcacatactttttgaaattttggtggcttttaaagagaggtttaatcagaggaggacagtttgccaagctataaaaagaatgaattttaaacagatttagaaatattccccaaattctttttcaaccaaactgatcgataaaatatttactaaatttaagagccaccgatcaaatatgtgttcttgacaccattgccgaacaccatggagatttaccgcaccaaacaaggcgtattgacatgcaaattgaacagtgccagggcaccgttggtttggcaaagggacggaaagccaatcgatgtgtaagaaaattttaattaaatcattttaattgtattaaattatttatttcaaataattaaataatccaatttcagtgatgatccgcgctatcaaattgagaaggatgcggccgggcgcttcacgttgaccatccgtgttgtggaacaaattgaccaaggcatgtggaccgcatttgtcaacaaagacgtgaccaggtgggattttgcgaaatttttaaaatttttatttattgcgcagagcctaattttgtacgaaagtcctaaatttactcctgaggctatcttttttgccttttttttgctattcgcacaactttttttttgcctttttttgcggtcattttttccataagccttatggtgaatatggagtcggcggtgccgataggcggataggcgccgccggggaaattttttttttttggattaatgaatttgttaacagatttcttccaaaaatacctaaattttgcgattttgggctatttttaaatatggcaacaaattttcagcaagtgccaagtgtatgtggaggagccccgtgacacatttgttgtgccgttgaaatcgcagcgtgccaatgaaaaggaaaatgccacgtttgaatgcgatgtgaacgacaaggacatcgatgtggaatggtttcatgacggtgccaagatcaagatggacgggcggcactttaaggtggggaggaggaggcaaatctcttttgctaatcaaagaatacattcatatttttgggttatgaatgatttattttcaaaaaataaggagttatttttttaaatttttgctattcattaaatcctaaaaatccctaattatggatatattccaaaatccaaattaaaaataggtcgaaattcttcaattcaaatgtctatcattgaaataaaaaatataatattagaaaatcacaaataaaacgagtttttattaattttataaaaattttttatttaaatttttttacattatttaaaaatttactttttttttgccaaatttaattctgttttttcctatctctgttttattgcgctgcttcttttacaggaagaacgggctggacgccgtcgtcgtctgctgatcaccaatgtactcattgaagaccacggcgagtacaaatgcaccaccaaagacgacaaaacaatggcccaactcattgtggaccc

SEQ ID NO: 14772 - DNA, 1523 bp, Heterodera glycines
tggtcatcagatttgaattttaattttataatacaaatttcctagggtccagattttcttttaatgttttatgaaacaaaaatatgtcgataaaattttatgaaaaatgatcaatcaaatattttaagaaacaaaaatggtcgctcagcttttaatttaaatttataaaaattttgttgaaaaaattcagttccatgcccggctcaaagtacgagtgccagtcgcgcagcggtgtgcacacaatgaaaatctccaagatcgagatgaacgagggggacaagtacgagattgatgttgccggactgcgcggcgcatgccgcatcaccgtgttggaagcggagcgcaagccggtgatcaagtggaagccgcagaagtttgagtgcgaagcgggcaaggagaagcggatcaaagtgccgtttgaagtgaagggcacgcgccgaggcgacccgaagccgattttgttgcgaaacggaaagccggtggacttgaacaaaatgaaggaccttgttgaggcgagtttaaaaaactctgggcaaaatcgctattttgtaagaaaattggaccatttattttgaaattttaccaaaaaaaaatgtttgttaatttagcgtaaaattttttgaaaatttcggaatgattgacatgttctgagagtgttgataatcgatgccccggtgaaattttgaaaatttataccgtaaaattttgaattatttacaaatctaagagtcttgataagcgctggcgaggaaaattctgaaaatttttacgaaaacccaataattttttctgctatttttgaaatggtgaattattaagagttttattcttttcttgaaattttcttataaaaaaatttttaattttatttttacatttctatttaaaaaattgttacattgcgttatactgcttgaatttgttgtatgtttgttttgttttcaggtgataatcaacggcgatgtggcagagattgtgttcaagaatccgcagaagagtgaggcgggcaaatggtcactgcaattggagaacaccggcggagtgtcggcggcggcaccctttgaattggtggtcaaaggaaagccgaaaacgcccaaggggccgctggacacattggacgtaaagtcggacagttgcgtaagtagtttttgttaaaattttaagttaatttaattatgaacatcgattaatgagttaattaatttgcctaattaattgattgattgaacttgattaatttggatttcagtctactaattgataacttcaattacgtttaattgattgtaaatttgcctttgaatctaatataataaagtatgaattaattaatactatcaattcattattaattaattgattcattaaatttagatttgagtaaaaattattcaatttttaaatcaattttttaaattttttgaaactatttataaaattttattcaaagcggaatttaataatatttaaaaaagaataaatataaaattttcaaacttttttctaaaatgattttaagaaaa

SEQ ID NO: 14773 - DNA, 1527 bp, Heterodera glycines
  unsure (1)..(1527): unsure at all n locations
aaaggagcaattcagtctcaataattaagtgnaatataaattntatgcttgattaggccattaaaattaaattaataaaccacaaagattggacagatttaaggcttttaagattatactgccctaatttggtaaaaatcgtttctgcaatgcttaggttttattttcgaccagaaaaaaatttgtgaaaaattagtgtgcaaatgacagtctttggcatggcccgcaaaaaatccttaaaaattaaaattgagtgaaaaatagagcaaaaaaaaaagctgaccaattaaaacaccctgagccatcggtttttaagatattacacattacaataaaattttacgacaaaacaactaacagcctaagtaatttttcataaattgttttgattacgcattttgatcaattgatagttaatattgtagagattttgccaatcttatgaatatgattttgatcattacactgatctgctacacattttagcccctccggcgtttaccgctggtggcattcaagaccaacggctccgtgtcggtgagacaatcaaatacgaagttgccatttctggcgagccgttgccggctgtcacatgggaggtcaacggaaagccattaaaggcgtggttttgttgaatttgttaaatttaatgtatattttaattttaattttttaatattttaaattatttaaaaaaatatatatttaattttgaatttatttaattaaaaaagtaaattaacttttttaaataacttcaatttgtttaattcaaaaatgtatatgttttctttaatattttgaactttttataatttaattatgtatatttaattatttttaatttttaaatattattttatttgagaaaatttatttttttcttcaacattttgaatttatttaattttaaaaaagtaaattaaaattttttaaataatttaaattagttaaattaattaaaaatgtattttaaattatttttttaatgttttgaatttcaaattaaaaaatgtatatttttttaatgtttaaaatttatttattattattttttttattaaggccggtggacgtgtgaaaatgaccacggagaagggcaaaactgtgctgaaaattgaagacgctcaacgcggcgattccggcaaattcacgatcaaattgaagaacaaaagtggcgagtgcgcatcaaccgcaaatgtgacggtggtcggacggcccgaaccgcccaagggaccgctggaagtcagcaacatcagcgcagatggagcggtgcgttttttaagggataaaattggcatatttgccgcgcttctttgggtcaggggtggcccaacatttcggaggtaaattttcgaatttcatttagagttggcttcacccgtccctgattttttccaaaaatttttcgggaggcaatccgcgtgattaactcaaaaatcaaaaaaaaaattgacggatgtccgactgaattttcaattatttattggatgggtttcgcatttttccttttttaatttttcttaa

SEQ ID NO: 14774 - DNA, 2816 bp, Heterodera glycines
actctcgccgccctactcccgccgtgcccaaccgccctcgtccccaactcgttctgccggccaaccgctctccgattcgccgtccaactcggcctgccccgcctttgtcctttgtcccccaccgccgccgtcagctttcaccctcgccagcgccggtctgtcccgtcatgcgctcgtcaacgccgtcaccgccaaatcggccgctcgcccgtcgccgtctgctgtccccctcgccagttcgttccgccaggcgccagtcaactccgtctccctcctcatcgtcctccgttcgtttcgcctcgtcgcccagccgtgcctccgccttctgtcgatccaccgccccccaaaaaacggttttcgtccggtcaactgcgcacattgctttgtcaacaatcgccaatatgccattgagcaaaaggcgttgatcgggtggactgaacagagaaagagagaaattggagaagctctggacaaggctccgttagccctcagagaggcggtcctcgacagcatagacgtctcggttcatctgatcaaccgacaagcggtccaacttcgctccataagaagagccttgttgtcgaccaatgccgacgaagatgaggatgctatgtccatcgtctcagcttcctccgccgggaactcaattgacgccgggaatgtcggcacagtggccgacgaaaaaaactgaattggctaattgccctttgatcgattttgggagattgttgaatttgtggatttttggttttttcttaataattttctgtcctttctgtttttctgtccaattattcatcatgttttttcctcttttcctaaaaagtgctccacctacgcctcctcccacttattgttccccaaaagtgctcctcccacgtttctttttctgctataagaagggaccaaaatccctcaatcatcactcacctttgtgcctttcatttaaaataaatatttaaattggatattcgtctcgcccttcttcaccctgcccatattcggtgccgttccctctgctccttttgtccattcttagcccaaattcccgtggtcaccctttgcccgcccctttgtcctaacagcttaagcgacaacaagccatttgaataaatattaaccatttttcattgcaaataataaaaattttaaatgtccttggatttcatgttttttaaaggaacattcattcgtatgccttagcctggagcggttcatacggaagatttttggattctaagtctttgaaaattacataaggggcatgcgggagggagtttctcagtgtcgcattttcttgaaaaactctctcggtgtcggattttcggccggtgtcgcattttccagtgtcgcgttttcagggagccgtgccgttgacccaaactccccgcccatcaataatatgaggcaaatataaatatttgatttatttttgatagttaaaaattaacgatttgaagcaagttgcaaaatatttgattttcgctttaaatctgatttgttgagctctggtttctaattttgtgaaattttcaatcgaagccctgacaaaggagaggtacccaagtgacggtgggacttccgaatgaaacttacagggaaggtagattatcccgcttttgtattataaaattttttttatttttgctaaatgaagcttctggccgagatatgaagcttttcctttttgccttttcaatatcattttcaaagaatgtaaagccagtgtgagcgtcgtggcctggtggttatgtcttccatccttttttttcttctaaagttcaattccccaaccctgcaaataattatttttgtaattttgacacatgtgataatcttggtagaaatgagtgaagcaaaggaatttgtcacaccatgcacatctgatcattataaattccgaacaaaaagtgatttggtagtgatcatgaaaaattgttgggaataaatatttaatgggatgagaaaagttggaaaattcatcattttgtgattcaatgtacccccccccccccttatgccaagaatatcgacgaaatgaccgaaattttggagcacaaagttggaaatggattaaactttgaaatttattaaagatttacatgcagatagatcatcaaggacaatgcgatccgaaatttttctgacaattgacttccaagttctttaaataaattaaaagtcagatctgtttttgggaccccagttggacatttctaccaaaactatcactgtgtcaaaattaatgtgaataaaaatgaaaaaaaaataatgcaaaattattaatgttaaaaagcttaaaaactattttggatatgaaaaaaaacaaaaataattatttttgaaaaatgcgggacttgaggttttagtccatgcgggatcccgtcccgcagtcctgctaagttttgaattaataataaaaaagaattcatttcattttccaattcatcttcattagagaatgtcgggtgtatgaataaataatcaaatcaaaagcgattatcttagcgttttgcagggcttcgatctctgttctagtcagaaatgttctgttttttggtatagtgacaattttttgtctttataaatccatcacaaattttgatttttttattggtatagttcacaaaactatcctgcattttaaaatttaacccaaaaattggcaatttgtgatgtaaatgtgttaaaaaatgagctaaaatttcaaaaaattttgctgccgccgcctccgggcccacctattcaaaaaaatcttttaaatatagcgggcagaaaacaaaaaatagaataaagaaaaaaaaagtcatcatttt

SEQ ID NO: 14775 - DNA, 2141 bp, Heterodera glycines
tgccgattttgatgttttaaattaacatattttgacatgaaaaatttaaaaaataaagccaaaacagcagatttctttattgaaaacattataaagtaaataataaatgctttatttcaaaaagataaaatcaagacaaaaaataaatttcatgattttaaaaatcttttgcctaacttgattagatcattcctttatggtgatctgtacacccaaaaacacattgaaaattggaaaagtttaggaaaaattcctatgtgttgagaaaattttcctggacaaaaatgagtaggccaatcaaaaagagcacataatgctctacaatatgcaaaataccgcaagacttgtcggactttaaagaatttttttaattgcttaaaaattttattagttaaaaaatttaacgtcaattcaaatttaaaaaattaaccgctatgagcgggaattgaacctgcggaggaaatgaaccaaaacaatacccactaggccacggtggcaatgctcagatattaattttactttccctttacttaatgataatttggctcagacttccctcattcataatagtgcatttttggaaccagttacgcccgaatctaccggtagggtaccgagaaaggtcgagtctgggtcccgggtcttaaaaaatatcgttggtttattacaatttctttgattattcaacaaggaatgaggggccctttgaacagagtaataaaaatgactaaaatgaacatctttcttttatcattgcattgttccgtcgtcatatcatttgaatatttgagtcattataaagtaaagaggtcaaaattgacctctctcatttgtccgctatggggaaggcgctggatgtgaaagttagagagatttgacactgaaaaaagagactaaagccaaaatgccaataaaaaaaattatattaataaatataatggacgttcgaatcttgtacttaacagatttatttttcaaaaagcttgaatatgaactagagaccgggaatttcaaattggcggatcccgatgcggcattataatattacacatatttatttgagaaattttaaattagaggacaaaatggtagttgaattttgtctttttttctctcgcattctcttattgttcgtggcacatgtttttttttctggcatagttttttcgacctatgatcattgatcctctttaatcaccgatccttctgctggaagtgccatctcagcaacacttgacaattttaagccattcggcagccgtcccgggataaattaattaggccgcgacgtacagaaaaatgccatcaacagacctttgcggatgagctggactgattgatgtgtggtaaaaatgaaggatctattagtaaaataaaatttgcatccaaaaatactaaaattcaaaatttggccacttgaaatttattgatgcacaagtaaatttttgttattttgacgcacatacgtaggaaaataaaacgactttaaaattattatcagaaaattcataacggcacaatttaaaataaatatataaatttcaacaaaactgttaactgatgtagtataaattcatatttcattttctatgcacattatataaaaaataaaatatctacaaaaaataattaagcaattccaaatttgaaaagggattcgaaagtataatataacaaaaaaattctcagaaatacacttatatatttcttttcgttagatgcagtcaaataattcaacataaatatggtcccacttaaagagaataaaccaacgatttaaaaagtcaaaattatcaccctatttaaattattaaaaaatttcatctggaagcgccatctccaagccaatgccaatgcaggagccagagatagcagcaacgatcgaaaaataaataaaattaaaaacattaaaatccaatttatcgataaagccaaaatgagaggaaattaagccaaatgataaagggcacgtaaaaaacattagtaaaaaggttaagaaattgataagccaaagaatgaatagtctttaaaaaatgacaacaatttgtcaaaagggccaatgttgggccctcgaatgccaataaaattccatttgatttccttaattgcctccgccttcatacggaggagaattgtttttt

SEQ ID NO: 14776 - DNA, 3935 bp, Heterodera glycines
  unsure (1)..(3935): unsure at all n locations
tgcctttgccttttactttattcattttgctgcttctcttcactgtttctttcgcttctccttcaccttttcccattcgaagttcttccgtccttttttctttctttcattttcattttctttttagcggtcagagggatgggcgaagcattggaaagagccgttgaaaagaccaaagaatggtttgtcagtcggtcgaccatttgtctttgtttgttttgtccgtccgtttggacattttaggcaatcgacggatcgcgacagacgcaataagccaaagttcacccaaagtgcgctcagagcgaacgccaatcgtccgcttcgggtggcggagatggacgtgcaaaggctgaaccgactgcttaaagtggtcgaccgcgcgtggactttgcccaaatttggctcctcggagcccatcgggtccaatttccaagtgaatgaatggaagggtcactttggaattccatacgaagcaaatgccttaagtacaagaagacatgtgccagcatttacaaggcgaggtgagtgagaggggggggggggagggacaaacggcatttttgaaacgaaggcacaacgcatgcgagcaggccgggtttggcattatgtgcttcaatttttggtgggttggggggggggcgaagtgtgtactgtttgaaaaagagggccaaattcagttatgagaaaggtgcgttgggaaggcaatgaatggcattcgattgttttttattgtgaaggcgaaaagttggcgttcaaatgcgaagatgcgagtgaaccgaatttttgcaaaaacaacggaaattatgacaatttcctgaacaaatacaaaaaggacgcgtacagagtgagaattcattttggaaaattcaaaaaaagcgaatgatcgaacccaaaaaggcaaagacgtacatccatcaacagctgacgaggtgagcccaatcggaaggaaacggcgaagaaacccaacacgaacagatgctattcatcagcaatttgtgagggcgcacttttgaacagcaaattactgcccaatacaaatgaaaggggacaaaaattgcagagaaaagtgagggattggcagagagaaagagtgagggagacacaacgcaaattcagcaggaaagacgacaaaggatgtttagagagacggcggaagatggcgcggaaatgggcgaagaaacaatcacaaaaagagtccctttctggcagagacttatggtgaggaagagaatggaagataagggacgaagggagaaagagggggacgaagaaagggcagagaaagagagggaagaggagatacggtggatggagaaaagatacggtggaagaagggaaacagaagtgaagagtacggaggaaaagagacagacagagaaagaggaggagatacggtgggcggataaacaatacggtgggagaggggaaacggaagtggaaagaacgagagagagcgctgattgggacgggcaaaggtgggaagggacaacgggcaaagttaatgcgaccacttttgagttcgttggaaagcacagccttctcacgcagtttgactcagttaacgccagaaatgcacgatcacttacaaatgaagcgaccatcgcttaatccccggactacggaacccaacgaagtgttgtggaggaatttccaaccgggaaaatggtttctctccgagtcctcactttcgattaaatattttgttaaggtttcaatccgtacattatatgaccaacacaggctgatcaaacagttcaccgaaagaatatcagaaattacttattccccttacatacgggtggaaacagaagaaccgagcaaaaaagcattaattaaaaatacaagtttatcgacttctgttcgttattattatttttttggaaatcatttttatcacacgcttctaaactaacaaacaaacaaaaagaaatcatcaaaatttagaattattgggggaaggggaaaattgaatttggatgcgattatttgtcagctaacggttgctaaatcccaaaaagtgacttttccgataaccaacaattgggccagaaacatcgaactcgaaataatcactgttatcataaataaatggaattcgtaaggcatcagcaaaaagaaagcaaaataaagcgaaacgaatcgcacttttccgccggtgattaattttctttaagtcaagcgaaatcggttggtttaacggatggatttgttgtgaaaaaaggatggttgtagaagatggaagaaccaattaatctaacagtgaaagctgagcaaaaccggtcaaagaacgttcgtcgggaatttcattggatgcaacgccggaactaaagcgaaattggaaggaaaaagacgttgggcattgcttcacttgagagcgaaagtgatcgtccttctttccgcctttttctgggccaagtcgatcagtttctgaaggttggccgcgactacgacgagatcatggccatctatgagttcggcggtgacgagttcgtgagcaattctggaagatttggcttaaatatttaaattcggcttgtcagggggagcgtattccgttattcggtttgatttttaaaaattgacccgtccacactgtccgcattcggagagtagtcgaatttgatgtcgttcagttccctttgctggttccgaacccgcaaaacctttaggaaacggaaggtcggccccttgcaaaatgcttcctatttgtaaaccaagttcagtgtttgaagcggcggcatttgttcctcccctttgccttcgctcgatgccctggagacagttggtctttccccacttgcgctttgctgaatggtcgcattttcggggtccgacgaattttcctcgtccgaagtgtcatattcgaactcccaatttccatccttgtccttcttcagcttgccacttgcaaccttcaaaacccatcgaattcaattcgctactggcatttttctgttgttgtgccaaaaccaacctttttgggaatggttgggattgatggagccgagcctaaaaagccattaaggcaccgttgtagcaatgatgcacgtggtccttggaaattcctcaggaattaatccctgaatttcttctattttcttatcactcacaaatcactgggggaaaattaagatgatactgatgattagcgttcttgttcgattttggcgctagtgcgatatttattctcatggttcttggaaagtactcaggaagtatttcgatttttgtaaataaaccatcagctgatataaagaaaagcattgttgtctgtccttttccaattatattgccatttaggcatcggtctaacaaagctgcgcatggctttgggaaattcctcaggaattaattttcgttgtctaaagaaatgcgctagtgtcgggcattttgacattaaaatgccattaaggcaccgttgtagcaatgatgcacgtggtccttggaaattcctcacgaattaatccctgaatttcttctattttcttatcactcacaaatcactgggggaaaattaagatgattctgatgattagcgttcttgttcgattttggcgctagtgcgatatttattctcatggttcttggaaagtactcaggaagtatttcgatttttgtaaaccatcagctgatataaagaaaagcattgttgtctgtccttttccaattatattgccatttcggcatcggtctaacaaagctgcgcatggctttgggaaattcctcaggaattaattttcgttgtctaaagaaatgcgctagtgtcgggcattttgacattanaaagccattaaggcaccgttgtagcaatgatgcacgtggtccttggaaattcctcaggaattaatccctgaatttcttctattttcttatcactcacaaatcactgggggaaaattaagatgatactgatgattagcgttcttgttcgattt

SEQ ID NO: 14777 - DNA, 4313 bp, Heterodera glycines
aatatttacttgtcaactttctcatgagtagggccccttcttttatgtgctaaaaatcctgaaatatgtaataaaatacttgctaaaaaatgctgaaatatgtgctaaaaacccccaaaaatgccaaaatatgtgctaaaatatgtgttaaaaattgaaaaaataagtgtgtttttgcataaaaattcccaaaaatctcattctttatcatttttagcccatacaacgcaaatcaaatacatttcgaagtgtttggggtaaaattgtctttttttgataaatcatttctataaattgaaagttccagcagagaacttcgaaatccaatgacgaattaatgaattcgagatttcattagtttctacaatcgaagaaaaaattttttaatttgaaaattatattaatatttaggaaaaaagtcgatttttagggggtgtatttttcaattttcttgtatttttattgcaatttttctcaaaaatgccaaaatatgtgcaaaatatgtgccaaaccccaaaatatgtgctaacatattttatgtgacaaaacgccaaaatatgtgtttttatgtttttataagtcgctctaaatcaaaaattgttcggagataatgctatttttgggcttctctcgccataactaagccgcaaaaaaaatatgtaaaaacataaaaatccgggccctactcatgaggaataatattttcgatattctttcttccaatttagttaagattttaataattcataattaatggcgccatttcaccctatttggaaaattgggttgtttgagaagagcaaggaaaacgacaaactggcagaatgcgttgaatgcaaagccaaaaaacagccaaaataccaattcaagctttccgacgggacgggactcccgttaaaaatagacgggatttgaacgggatcgggatttttacgggaatcccgttcgggactcccgtcccggaaaatttttttttaccagactctagttataactagggctgccaaccaaaaatatgtacaaaaagtggtgcaaatgtgtacataaatatgtatgaaatcattcattcacgcataatttcaccagttattttgttaccgtaatgtcttcgaaaattccgtacgtttttcttacatcgtattggatctctttaatattggccggagttgccaagattaaaatttcccatggaattcataatttaatttgataatttaccccatcgatctacgccactaaaacttcataataaaactgaaattccacatttggctttccttttgcttagccactttctttgcttttccattccattcattcatttcccaaattcattttcattggtactttgtgtctcttctgttggtcggctgtggcaccattctttggttcttttgggacaacgtcaaaaaacgacgacgccccaacaaaaaagaaatgtaaaaaacaaaaattaaattaataaatcttttttttcagcttcatctctgccgactgttggctcgaagtgttcgctttacttccgccttctcagcttggcctcggaatcgctctgatcagtcgccgattttaccgccgcgtggacaaacatttcaaagcacgcaaatggatattggacaccgaattgcgaattcaagagaaagagctatggtttggcaggaagcaaatggaaattgtcaatgccaattggaagcgtttgccaatcccacaaaatctgttgcccaacaaagtcatcggatttaaacacattacgttcatgtaaaattgacaagtttcccattggtttgagataacttttgcttgttttagttacttcgaccacaatattctcacatttgtccgccgttttcaccgctttttcacttcaattacaacatctttgggcattatgagtgaaaatgttcgcatttttgagttcttcctgtccaccatttggccaatttttggtgactccattcaattaaagtgtttgaccacttctggtttccgtcgaatgcgccaattagtcacgtccattctcaacgactgtccatcccttcgtttcgtcaccttcaataatttccgcccgatgacagtgccaatgcgacggatggtcaagtggtggttaaatgtttgttcacgcctcgttcggacgtttcaccgaaggtgctcaagtacaccgagaattcatcggtatttaatgaactagacattaatgttttatcagtgtaccgacttttgcgccgcgacatttgcgccgccctacaaaatccatttgcaccgttctaagcaatgcaaaaaaaatttttaaactaaaacttgtaaatataaatgtggcttaatatctgatgtacgcattaacaaaaacaaaaaataggtgtctaacgttggagtcggggtcgttttggcgcccacgttttggcgccgacgttttggcgcccacgttttggcgccagggtcgttttggcgccgacgttttggcgcccacgttttggcgcctgtaggaagaaggacatttgatttaaatattggcgttccattttgatgttcattccccatttattattgatttacaactttgactttttcacaatatttcccgcacttttcccacgttcagtcattatggttttatcattctgatttcgttccccatatttctccatccctctccaatccgtctcttctctaaatatattattttccttctccaaataagtaaatatatatattctccatccatcgccaattgacttagtgatccaaatccgaaccccggcattctctcccctcttcctttaatcgtacttggcgctcctggccgacattcgaactgcaccgccttttggaagacatcgaattgctcgccgattgccgacaagccagcaaagcacgtgaaaaagcagcgccgtccgcccactcaattcgccgaaaatggaagaatattttggtcaggcaagttttcgaaagagaatgttggcacaaggccaccgactgcgagaaagtcttgcctgtgaaggcaacaaaaaccggattttggctgaaactgcattcggtttcggcagaaatgaaggaaattgtgaatttggggggccgtcagtgcattccaatttcggtgagaaaaggatcgaaagatccgggtttgaaggccgaacagagcaagagaaaaatttggtagaaaggctgaaagctgaattggtaagagttaaggccgaacgagacgaagccaatgcaaaaattgaaattttgcgagagaaattgtcggacagcgaaaaactctgtgttttcctaaaggctgaccacaaaaaagtgctggcgcaggcagagaaagttcggaccgaatcgaaggcgatagaaattgagctgaatgaggcaaaagaaaatttggaaatggcagaagaggaaaatggccatttttcaattctttctgtccaacagaatttgatggtgcaggagcaaggccgaaaaataatggatttgattgaagaagttgaagaattgaaggccaaaaagaacgccaaaaagaaggagaaactttccaaaagtcccgaacaccaaattactgaacccaaaaaattaatctccaaatcgccaccgaaaagtaaggcagacaccgccaaagcaaagaaatttgtccaaaaatcggaggatgacaaaagcgaaattcgtcctttaaattccatcatcttccgaaaacatccaaatcaaaacaaacctaattatcggcctccaagtttattttcaattcggacgttcccattgctcaatggcaaaactgttccatttttgagtttttcccaatttgcgatgccgttcccaactccctcaccatttttggcagccgcttctccttttaattttgtttggcttataaatgaaaagcaaatggctgatcaaagcatcccaaattttgtctgctgaacaggaccgatttccctccccttttgccctttttataaatttaagctgaacgtcaactgatcgccatcttccgatcgccatgcgccgggacgtcgcatctgtgggcccgggggagactgatcagaatcggggaccgattcttgtgtcgacgggggcatgtaggaagaaggacatttgatttaaatattggcgttccattttgatgttcattccccatttattattgatttacaactttgactttttcacaatatttcccgcccttttcccacgttcagtcattatggttttatcattctgatttcgttccccatatttctccatccctctccaatccgtctcttctctaaatatattattttccttctccaaataagtaaatatatatattctccatccatcgccaattgact

SEQ ID NO: 14778 - DNA, 2702 bp, Heterodera glycines
cagttgacacacttttttcaggaccaggtcccggtcccgtgtacttctacatttgaaaataaaacaaaaaattttccaagggtcggtggctcctcattaaacttggaagttgccaaacaattacgttcagttggcctaggaggaaggaagatgtttaggtcgagcatgccaaaagtcgggatttcgcccagtggttgcagcgtttcattcggcagctccggtggcagaacatcgaacgtctcaaaagtagtcgggagttgaatgttcctcagagagccgccgtattctatgggcgtatgcggatcttttgggcgtctgtagccacgccttgacctccgcgggcgtccacgtccacgccgcttggtcgacttggaccgcttcttcggcttcgatttgcgcggcacaatccgccgacgatgtctacgcgacgctttcctgacggatgccgaactacgcgtcccgcctctgtcctgacgtctgcgcgacgcattcctgctggcggatgacgaacgccgcgtccctgtgtcctgccgtctgcgcgacgctttgctggtggaagacggaggacgcgttccgcttctgtcctgctgacgtctgcgcggcggtttcctcgcggacggcgaacgacgcgtctctcttctgccctggcctctgcgagacgctttcctggtggaagacgaacgacgcgtcccgcttctgtcctggcctctgcgcgacgcgttcctggcgcgtgacgaacgacgacgcgtccctctgtccctgttgctcgatgccgctctactcctgttgctcgcggaacgacgacccgccgtatttcttgaacggcttcgaccacggccagcagtagcagcagttgaagcagtattggaagtcgcgcgacgcgttcgctgaacggggggaggaaagggaaaaatgaatggtggcggaaaagcgcatgaaaatgggggggggggggggatcaccgatcttgaagaagtcatctcgtcaaagagtgaagaagctgctgttgacgaattggaattgtgttgtgataacaacagagaggaaagaggagaaagggaaatgtgtaacccctaaaattaattgcaacaattaaaattagggataaagtcgatttgaaaagagtgaaagcggtaaaagcaattttctattgaaatttaaaggggagggggaatatctgaagacatatgtacttttagcttagatttgcatccaaaatagtgtacaaaacgaaaaatccggaaatttatgcattgatttccctattctgtgtttttctatgccttaaaatttttttgaaaaaactaataataagcgttctttttgtttttcaattaaacgctctaagtaaatgtcaaaaaaaatggtaggacaattaaaaagggacaaacggagggagaaaatggacagagcggaagagtgaatttgatgaattcaaaccaaaaaatggacaaaaaaaaagttcaaatttctgtatgactgagaaaaaatggcatttttctccgtatttaagcggtgaattccccaccaaaaccatccattcattcaattgctgcactcacttccattcttttcccccatcggtcgaatcttcatcctgctgctgctgtacaataaagataattcccgtcagtttttttttgttttgtttatttcggttttcaaaatgtattaaattttgtgcctttttcaggatggtcagagcaacaacggccaggacaagggcatcagcagcgcgagcacggagcatcaaaatcaatcgtcgaaatgccaagaaagcgcgtgccgcaattggacgagccggacttgtgagtgacgcgcgaggggggggggggggcaatttgtacactaattgattcagtgtctttttttaatttgccgatttttcaggcacgctatgcaaatgcgcggaacaaatgcatgatgtgccggcgcaaagtgagctccatcacgcgtgtgaccatgggctgtgcgcaccaatttcaccgaaagggggggcggcggctaaacgcttttctcccttcccacaatttttgaattcacgtttcggcgaatgtttcgcgtttgctgatcagtgatcgcgccaaccgttccgatcaatttttaaatcatcaaatctacgattttatgtgtctatgattttaaaacaaaatttgtttttttatttattttggttgaaaatttaatggatttttgaggtggcctagaatcccgattttattcatgatgatttcggataaatgcaacgctttttatccccttaaggtgcctgtaccgctggctcaagtacaacaccaactgtcccgtgtgccgcttcaatttcatgcgcgtaattccccctgaagaaccggcggaggaacagcaacaacgagaagaaatgactatctgatcagatccatcattgaaatctctgtactatcataatgttgtgtattgtgtatatgtctgtgtgttgtgtgtgtactcagtataaagatgatgatactcggaagatggaagtttttaattgcatttccctgtaggtgttatgtatttagcggtaattaatggagtccgaattttaagattgttgtcaatttttttttacaaaaaattgattacctttctagctatgtagctattttattttggatcaaaatatgtaaatgacaattatcaggttagctttgatcagtgtcctctcgctgtctctcactctctag

SEQ ID NO: 14779 - DNA, 2326 bp, Heterodera glycines
tgatgagaattttgacggatgcaacatacaacaattccgtcgaaattcatgattttatgacagctcttggtctgcaggtcgaagaatacgcaggaaaattgaatgactacgaaaacctggaagattcaatcatgaatatcgcttagaattgttcatcccaatattttttaattcactttttgaaatacctattttttcctgctaattttattatcttagttatttaattatgctattctgataaatagttagtgaattatgtgttgtgcagccttaaaaatgtaattttccgactttttcactaattttcggcttggcgacattttgactcattttagcttgggcgacatttcgacgcgccgacattatgacgcggcgacatttcaacgcaacgacattttgacagcgcgccgtttgaatcattggcacccccacaactctgatctgtgttcccaattagtgaaaacttttgatatctcgaactcaattctcaggtcctgttttcgagtctcgaaaaatttgaactctcgattacaatttttgccattagtgatgctcgagagtctcggctcggtcggtgtcccttagtctctcagttatcaattactaaacaaaggcatggcaccaacatccttggatttcccatccaacagtcgttgcgtttaatccgtgcaaagaatcgggagcagcaattcaaatctgaaaaagttgactgagtgttcaaaataaatctttttttttgtgcctcagaatcctctgttaaaaaatatttgtttattaataattgtgaattaattattttcttatttattttaattccatttcattttaatcatttgcattttgtcgtacttcgtctatagcgccggatttattttgcacatttgctgttaaaagcaagcttttgtttttaacgagtaaaaagtaaaactaatagtaaaaaattaaaaaaaacttttgttctaaattgatcaaaataagctgaatttagtcaaaaattattgcagcatcaaaaaacggtcattctatacaggacataaaagtgaattttgaaaatttttaatttcgacttttttgttctggtccgggattcgaaattggtcaaaataaatgttggattcgggttccccgaccctgaaaactaccataaacatgttttcacgacttaataaaaccaaaaaaattttatccaaaaagggggctcacccacccaccatctatagtattaccaaaatttcttatggaagtattttcagaaaaatatttttgttcgtcttttttttctaaaaccaaattagacttaaaaacctcatagatatccaatgatcaaagaaggtttaatttggatgtttttattgtacataaatattgtttaataaacatatacatatgtacttaataccacaaaattttatagtatcggaattacaaagaaagaagaaatgtctgtggattgtgctatttatatacagggatgaatcttttgcgcttactactttcggctatttggtcattttacctcaaattgcccctataaaaggagcatattttggctgacccattgcatttccattcgctgtttcgtcgcttccttttcactgtaagtgcattcgcccctttgccacttgataacacatactgctgatggtaccccctcccctttttttggcagaaactttgtttttaagaaggatcagcgatcccaaaaatccttacaacggagtccgatttgcggcccgacttttgctgcccagcatttgcgcctatgtccaaaatcggattcaaactaaaattgtttcaagccctgctcttcatggcttctttaaaaaaatttcctgccaaaaaagggggatgccatcaagcaatatcaccgcgcccttgcctccattttctgtcgttcttcacctccattcatttacagcctttttgctgcaactcaccagtgccgagaacacccgccgccgactgctgtttttgtgtgtgccacttttttgcgttgtgttcgttcgctgccgagccgagacgactccgtcctgacgacgtccgcacaaatggcacggaccggcaccagcagggagagggagagcccgagatgtgtgctgatgcgacagtacgaaatgctgctgcaaaactcgaacgacaacagcggattccgtgcctggttcgacaataacaatgtgagagaagcgaccgaccgactgagtccccacccgtccctttcagtcccacaatcatttagtcttttcagctcttcaaatggcgcattctcatcgacggtccgccggaaacgccttagtgagttcatggagaagtgcagattgatgtt

SEQ ID NO: 14780 - DNA, 1600 bp, Heterodera glycines
  unsure (1)..(1600): unsure at all n locations
aacttcaacagtcctgccaatgtggatgctgccgtaagtgattgattcgtccgtcggcacgtttttcattgaccatcatcatatttttgcgtctaaatttccagattttgttccgcaacgacccggcacaatacagggaggaagtgcgacggcgcgtggagagggcatcagcatcgacaccgcgagcgaggtcgtcatcaacaccaccgccggtagcgcaaccgccgggagaacagcagcaggggacgccgccacaaccgccggacggacaggggatgcaaccgccgggagaacagcagcaggggacgccgcaaccgccagcgacaccgccgcaagggcaagaagcgccgcagcagcaacaacaacaaacgggcgaatggtacctttgatgtgacgtgatgccctctgcgtgatgatattattatatacttatgtatgtgtatatgtattgtattgtatgcatgtgtctgtcgtccgaccatttcattaattaatggtctctctctctctctctgtgttcgtttgccctgcttttgttcgctgttgtacatattatgtgtattgtcattatccaccaattattgtatatatatgtgtgtacatatgatggtgtatcgagcaataaactgaaattgccttgatcctttccaattatgtatggattttgggctaatactggagaattagtgtcccggcgaaaaataaattaaaaatttaggtcatattcgtcgtcagcgaccctgataaccccaaaatacatcttttcaagttatccttacatgaaaatatatttagaaaaatctcagggtgaccaagtttttttttcaaattcaggatacaaaacactaaatttcaaatttaaaccccaaaattcggattttttgcaaaacaaggggtctgctttttagcgacgccctttttccaaaaatttttgttgtacagggtggtctggcgacgcaataggcgccgccggaaaatttttttgaaaattttaatgcgattttttaacagatttaggcctaaaaatggctaaattttgcgcttttaagccaattttttaagaaaaacagtttttgggggccgctggtgccgataggcgccgccgggggaaattttgggttattacaaaatatcgcctttttacagatacctcaaaattcaggataatcgaaaattcaggacatttttgatttttcagataggtaccctccaattcaggacaaatctgaaaaatcagtacacttggtcaccctgaaaaatcagttacttgatgaaaaatcataggcaaaatcaatgatttttcgaattatggactcagacccgtaatgtttttttaagaaaagaaaaatttttaatttatttttttgccgggacacaaattctccagtactaccgattttggcattcccccacatggacggtaaaaaaagaaaaaaaccggctggcgtgtcttaactgtgatcaaaatactaatcaagcgttaaagcccctaaaacatttcaatgcagacaanacaagtatntttttagagttttttttgagttaattgatctacaacatttattgaaattttttgcatgtattctctgtaacaaaatat

SEQ ID NO: 14781 - DNA, 1969 bp, Heterodera glycines
  unsure (1)..(1969): unsure at all n locations
tgctcgaagcgatttggcaattttgctgacgatctctcactgtgatatcaaactgggccaaactcatcccagcgaatgttatcggcgaaattactccgtcgaggtgcttaattttgacagatcatttctccatcatgagaatgtttttcataatttcaacaattatttttgccttttgccatttatttaaaaaattttctcgtaagtatcgagaaaaaaagatatgtgtctcttcaatgcgttcattattcattgaaatgttttgtatcaataaaaagccataccaaagctaaatttatttgccatagtccttaattttagcttaataatttgtaaatttcagacatcaaaaagaattttggacggcgaaacaaaattggcactaattaatgagtttcacaaaaggaaaagagaatgccaaaaaagggaaaagaaactcaagaaaaattataacaaatacaaagtaaaaattgagggagaaattgcgcgggatttgggaacaaatcgtaaaatgatttacaaatggaagaaggcattgggccaaaaatgtaaggaaatttaaagaaaacagcaagggtaaggggagggggtggggtgatcaggttcgacagttccaaaaatactttgattttatcagggtttttcgagtcatcgaacggcccagaaaatcgctttaatccctgtatatcaactgagtctgaaatctcgatttccagatccaattttcggtctcgagtcaaaagaaatattctgtccgaattagcaataatcagcagttttacacttctttagggaaatttggaaaagatgggttaattcgagagaccggcacgatcgatttttgattcggtctttttcgattttgttcgatctttttttagattttgtatcaaaaaaccaatcgaaagaaaagaaaaaccaaaaaaaccgagcgaaatatttttcgcggccaaagcgagaggggggggggcgtagcggaaaagagggaaattctgaaaaattctgctaattcacttccccggcggcgcctaacgaacggcaccgccggaaattaattcctttacaatgaattcaatttttgacaattaatttgtgtaaatttattatatttttaaatttgtttaggcatcccaaagccacaaaactcaaaaaagcataaactaaagataatcaaaaaatatgaaactgttagaaaggaatttgaagcaaaattcgatttaataatgccgaggaatgtgtcagaaaaagttgcgcataaaatcggcgtgaattataacacaatttacagatggaaaaaggaatttggtctatcgagtaaatgaattttacattttttaaataatttgtaaaattaattcctttttaagggaaaaggcgttttagagattccgaaaaattggaattagtgcgaaaattcgacgaaataaaaaggaaaaaccgaatgcttaacagtgacagagtcgcagaaacattggcagttacgaaagaatcaatacgaaaatggagaacagagtttggcatcgaagcaaagtgtaaaatttttaaaagcattttaaatcaatttaatttaattttgccagatttaaatttagggaattgcaattacaccgaagaggagaaaatgaaattaatatgcaaatttgacaaaataaaagggaaaaacccaaggctgaacagtggacgtattgcagaagaattgggcaccacgcaaaagtcaataagaaaatggagagcaaagttaggcacaaaatcataagtttgaagcgaagaggaggaaaagcaaaaaaaaaaacgcaattttanaggacagtcttttagaaatgaattttaaattaaaattcaagcttttgccatctttacaggagcgcttaatttttatacattatttttttatcgcaaatttatttaaaaataatcaaaaaaaaaagacaaatttgatatcattgcgcgttttggacatttcagcatc

SEQ ID NO: 14782 - DNA, 2151 bp, Heterodera glycines
tagataaagctaaaaaacataaaaaagtttcgtataaatggtacagaaaaaaattcaaagaaaaaaatgcgcaaagattttgggcacactctgtgtttctttttgctttttgcatattttcaaaaaaaattttttttgttgttgtttttttttgtttcattatgaatgaattttttttttcatttttttattggcttaagttaagtaaaatcactatgaatacaattgtgtccttgaatgataaggacagtccttaaaatttcccaagtgatggaagaaaacaatgcataaattcaacgagttactagagaaagaagagttgtgctttcattattcaaatcctccattatttacattgtattatttttcgatactaaaaaccgaaataacaaagtaaattaattagtttaaatgtgttcgttcagctgctgcctcatcgatgaagtgaatacaaattggatactaatgaattgttgaccgtacttttccgtcggaaatatttgtacgctattttaagcaaaaaataagccaaaatccatctgctgcttatgaaaggcgcaccatttaacccaactttgtctttcggctccatcattcttccatatttttatctaaattatgaaataattgggaaaaacaaataaaattctcagaaatataaaatataatttaacgattaatgaaaagaccttttttaaatttacaacttttacaatgaaaagcttagtgaatgaagcaaacgaatttaatgaggattgtccgtccttcctttctcaaccgtaaggagaaaacacttttttttctttaaaggtaataaacaataaatataattatcattttacgtatgatgcgcaatccgtcgctttgcccccccccccccgacactttttttgtgtttccgttcctcttcagcggcttattttcgttaatgagatgccaaaaccttcacgttcatttggcattgcattgcgtgactttttgttttcatttgctaatactttgacatataacgcactaattaatacataattatttgctccttattcacaataaattgttttgtcatttcttaataaaatgacagaatcaaagaaaaataattaagttaattaaaagctttaatggaaaatgaataaaaatttaaaaaaagttaaggccgggatttgggacaaggaaagtgtcggttagggacacaaaaaagcgagaatccgagaaccaaaaccaggattccggaacagtcatggatgtcttacagatatttgcagaaaattttgaaaaaaaattcgtgaaaaaataaaaataaataaatggataggccttgtcagtaagtctcttccaatttcagataaaaagaaaagtatttatatcttttgaggcaagcttaattgcaagaaaaattgttttttacaaatttaaaatgaactgaactattatttattattttatcatttaatattaaaaaaataataactatttaaaactattttttcatgaaaatttacttcccgacgaaggtgttgctccccgacatttttagtcttttcaggcatctccaaagaattttcgataaatttccccccgatccccgattttctttcccagagggtaggggacgaacccgacattaaagcttgttttggtgttcatcagggatggcattccgtggtcccgagaagaacatataatattttttcaaaatttaattattaattagcggtgaagcaaaaactgattattatttggcatggacgccgactcagttctgcagcccgtctttatcttcgcttttgctgccgttgagcttctgatcaatttggtttgtgttcccgtgtcggccatcaacttctttctcgtcgccaaaagttcggtgatccatccgaacctcaaacacattctcatctatcagagcggaagcattctcggggtaaactgtgcagaaaatgaacaaaaagagcgcaaagactgtgctaaactgggcaattaaaaccaaattaattaattaattaattaaatttgtaaagaaattaattaaataaacaacaaattaatttcctcctttctcttggttttcatagattcgatcattgctcaattagccttctattttctcgctaaacgccctttttcagaggggaatgtgccggttcacca

SEQ ID NO: 14783 - DNA, 1975 bp, Heterodera glycines
caaatgtaccataatcccggcgtattccttcgggtgacaacattggtagtgatctgatcagaagcattacggtgaatggaccataagcatttgctttgctttaccaatttttgctgcagaagccgcttgttggcgtgtcattgacaacgaattcacctaaaatggggggaggggaggggcggcattggcacaatgccaaaagagtgattgtctttttggcattccgtcgccttcctttgcttacccccattccgagtccgttgcatccgccgctgcaaatgtaggcattatctgtgaattttgaaatgtttaattgtaattccaaaagcattgtttgactgacaaagttttggcgcaatcacaaagttccatccgattgactcaaagtcgatcatcaaatcgtacaggcaacatttttgcgtggtgttttgctggaaactttggcattagaacatacgaatttgaaattaaatacgaattcctttggcattttccttttttggcattaaaattcagcgccaattgaggaagtaagaaaggaatactgtaacatgatggtgagccatcattaatggacagaatgccaaagacgaaagtgggaatttgattgcccaaaaaacaaacccccggtcggcacatttgcacgtgacgtcttgaacgtccactcttcaatgggtacgtctgcaactccaaaaacattgccttttcaccgtcgtccccctgcaactgtggcattattttgtattttgttggcattttgtctatttttgtcattcttttctctgcgacctcttctggcgaatgtatgacgaggttctcgtcatcgtacaatgcctccacataaagcgcaatctgaacacgaatttgttttttaaggtccgattcgaataaaataaatcagtgcatttttaattaaaattttaatcctttttttatgttaagcaaaaaatcgccgtttcgctgtttttctttgattttattttactattttttttgtccatagattttttatttttgcttaattattgtttttttctatatttaaaaaaataaaatttggtgtccaattttctgggcccctttgagtccgtcctccccccaccggcccgcctctcacaatgttcggttttctgtgccgtcggtacgggtcgccgatcattccgcggcgccgcgccccctcttcctccccctcctccccttcgtcctctccaatggcggtgccaaaatcgtttctcgtctccagccattgctgtacgatgtcctcgatgattggcacctcaacccgtgccgtggtcgggagaagactcgtctcaagctcaatgtatttggaaacgagaacagtgctcagctgagggaggggggagggcatttaatagagcttaaatagtcatagtgatcattgctgatcagagtgatcattgctgatcagagtaatcatattgctgatcagagtgatcactgctgatcagaatgaccttgttggtcagagtgatcatactggtcagagtatgtttaatcagattaatcaattctaatctaagtatattttgatcagactaatcactgctgatcagaatgaactttaatgaacttgttagtcagagccttaaatgctaatcatagcgaaatttgctgatcagagtgacattgctgatcagagtgaccttgttggtcagagtgatcatcctggtcagagtatgtttaatcagagtaatcaattctaatctgagtatattttgatcagactaatcactgctgatcagaatgaacttgttagtcagagccttaaatgctaatcatagtgagatttgctgatcagagtggtgaactttaaccagagcatttttatcagactgatcattgttgatcagagagagagaaaaagcatatccgaccagaaatcaaaatttgatttattatcaaggctaatcagaattccaaccgttccgttggcatagcgacggaaaacgtttag

SEQ ID NO: 14784 - DNA, 2497 bp, Heterodera glycines
ttaataaccaaaatcaaaatgccaacattaaatgatcacatgtcgtcctcccaaacttaggtacagtaagacttcaaaaacagaaaaaacgaaattacggttgccgaattttttttcaaaagaagtcgtctggaatttgcgttatctctggaaaatagcttaaaataggtcaaatttgccacaatatataaatatgagcggtattattcattcaaaaaccagataagcaccaattttcgctcaagtgatcaatagagctctgagtcttgaaaaaatatcgatcgcgattcgggattggaatcattccgggatagttttactgggattcaaatcccgattttatcggaatccgatcccggccctttttaagaaaaaagccgcgatcgggattgagaccccgggaaaatcccggcgggatttcgatcccgtccgggttctcgtgatcagaaatcagttattaccattatccaccgacttttgtatatttcaagaatatttagattgaacaaaaaagtatggtttctattgttgataatccaattgaccacaaaaacattggtggaatgtcggaaaatttactttacgcactcgccgatgggtcgcgtgcagcgtccgatcgaacagttcctggacacgcgggtcggggtgagtgatcggtggcaatttggtcaagtcgaccgtcacattcggcttggcgcttaggtccaactttttcagcaggtcttttagaatctgtggcgacggatggtcattaattaattagtgattaattaattatttaaacggaacaggcaaatgtttccattcaattcaatggttgggaaagttagcaatttttgaaatcagaagccttgatcagccaaagtatttcatcagtttaaatgccaaatatttgcctttcaacgataatttctgatcacaggtcaaagagtgattagtcaatgcttcaccgattttctttttgccaaagtgatcaaaacccaactctgatcaatcgatgttttggcaatttgctcaatccaattgccccttgaaaatcatttcaaaagtttacttgctcctgccggattttcttcacttcagaaaatgtgccgcaagttgcgcactgatgggacgagcaaagaatggcgaggggcgagaaaagaagaaactgaagtgataaaatgggcaatttcaaatgaatgcaaggctttctcttttattgaattgtaattactttttaattttgattttactaaacggccaaaagaatttccaatttttttgaaaaaaataaaaaaataaaatttgtatttatatgtaacagaactgctcaatgaactttttggaatgagaacaatgacaaattttcttcaaaggaaatctactattaattaggtaattaattaattagccataattaaattatattaacagcaccagcactcggagcagaaacatttgttgttgttgtttcggtggttgtaacggtggtggcccgtgtttctttctttccaccggcaactaattacccctaattggtttgtgtttgtttacggcggccaaatgcgcaaagacagcgcattattagcatggaaatgcttcttcttgttcttcttctgtgtacaaattcacttaggtatctctctctctcttttggttcacaaattcctaacatcgttatacagtaccaatcgttcaaattgggcaaaaaacaaaatgccaaatttggaaaggaatgcgccaaaaataaaatggggcgaaatatttttggtttatttgtgcaaaaggatatcgctgctgctgctcgtgtacaaatgttgcgagcgtgtgaatgaatgtgttcgtgccatgtgctgccattccgtcccctccccccgtgccgtgtcgtccgtctgtcccttttttggcattggcctaacacttggccaaagataaccaaaaaaagagagagagaagttattactagggatgtcaattttatgtaaatacatattttttcctggattctccatagcctaattagtaggaaaaacactttcttttttgtgtttgcgaacaaaagtttggacttttatttacatatttcgggattttatacatatttggtacatattttggactttttcggactttttcatacattttttacatattttgtggattttttacagaaattttaggaaatcctcaaaaataaacccaaagtttggcaaattttttgtacattttttcatttttttacatattttgagaatttttgaaaatttataaaatttcttgtgaaaaataaaaattaaccaaactaatttttaaaatactaaaatgtgattctaggcttatttaggtcatttttatggcattttgtgctcatttcaccctttccgaagaattttttttccaaaaaataaccattttaaaaattttatttacatatttggtacatattttggggttttcttacatatttcgggattttttttacatatttatgtacatatttttgacatccctagtt

SEQ ID NO: 14785 - DNA, 3640 bp, Heterodera glycines
agtcataatagcaatatttgtaaatatttccttctaattctgacctttttgtgtttaggtttttaaacataaaaaaactcacttttttgattggattctctccttttttccattgcaactttaaattcttcggcctcgttaaaatccgtgaaattcagagcctttatacaggtgtcacactcaaacacgagcagacgaggacaattcgagtaagaattcacagcaaaatccttgtaactgaaaaaactaagtacataagaaatacaataaatggagctaaattcagattttaaaaattaactcataagaattaaactgacagtatctgactccactgcaattctttcttgaaaatatcgtacatgcacaactgataattcctctcgcgataatccttcaccagatagactatcccaacgttagtctttcgccaaacattcgggctctccgcaggcgcgtcgagcagttgggcaatacccgcgaccagagaaattctgtcacggccgagcacttcaaatagctgcgaattttcttctgcactaagcagtgccgagcccttgtgagccgggcgatcctttcgctttttagagcagccgtttgaaactgaggagaaattatgctgtcgtgatattggtccactcatgacatccaaaatctgattttagaaaggaaatgcaatgattaaataaaaataaattaaaaataaaataatgtcatttccgaaggattatacaaaattaaaaagcttaaaatacgaagctaataaattaaatatgtgtagaattatgcactgaggagggatgacgacgaaggaatggtgagtgaaaaaatattgagacatgcggtggagaaaactaaaatcgatcaaatgtggagaatgaacatgaataatgggactgcagcaacagagccgtaggggtcagaacgaaaaaatgtgatattattcatcacatcagcatcatcaccggtggtgtttggcttggcttccaattcaattcaccaaatatcaatgattcatcgaattcatttgttgtgcagggagggatgatgggtgtgaatgaaaaagaatttgtccagaatagccaagtttcaaccaacaaattttaatttatttacaattaaccgcaaatgatatttgtcgaaaaagtttgttttttgaagagtacgagttgggaaaatatgtatgatgagtcgggcagtacgagttggcctatacacgttgagtttttacccaattcaaactgttttgtatgcatttaaaactagctcagctatgttttatccagctaacgcgttcttgctgttacttcctcccctcccccttccttttccattctctcctcgccttatattgctctcgcccatctcgctctatttttgcacttcaaattgcccttcaagggtgcacttcattcaccattactacacgttttccaccattcatatcaaactttcgccatggattttccacagcatcattcatcagaatgtttgttattggcacaatgaattccatccttatttctgtatccaattgctttcatttgtaacctcaactctcttcccttcctattccatcgaagaaaacaaaagggaataattggatgcatgacttgcagcacagaagagtcaaatgtcgcttggtggtcgattagtcagaaaagtgatttgttaagttttgcggatggattgatgacacattacacaagcatcgagcattcaaaggagattgacgtggagaggtggtagcagattggtgggggaagaagagagagaaaggaaaggagattggtgtgtgtgtggggagggagggggatgaaagtgggtggatgagtgatgattggaaattggtgagttgcgggaaagttccccactttgatcactatggagtcgggagacagaaaatacggctgttgggccatttctataccaaaaacgcgcaattttctcattatttctattttccacagattaatttattaaaattaaccgttaaataattcaacatttttaaattttttaataaattctttattctcctcacagctgatttgtgattgatcaaagctcccttacaaattagaagtgaaacaatgataatgataatgggatgaggttacgtaactaagaaaattatgtgccttgcgatagagagagagagagagagtcgatcgatttgtgagcccaaaaggatgaatggttgcccattcaataacctaatttttattgaatcatttaggttggtttaactgatatcattacaacaaacgaaaacaatactaatttgaacagcaaaattgcgaattttgaaaacaatatcctctcattaacattttttgtatctaaaacaaaatctgggtttgaatcgctgctgatcagtgatcacgactcgatcttgaattaaaataaaaaagtatacttcctctgctacataaaaatttgtaaatatggtttaaaaatattaggtttccaattacatatgaatgtatcctcccacaacgacaccacccctaaatagaattcatttcatttccctttccttgcctcatacgcttcgtagtcgatttttctttctttcatttctgccgcctttatctgtcccttccgcttcctgcttctcttcctcgcccttgtaattaaattccatcccctgcgctcgttttggccttccctcccacaaatgactgaagtgcctcccaacgcgcgtcgatggacactccattttggtggattggtggaagcggtcaatggcgcacacattgaccccagtggacgcactgatctactcaaagtgttggacagagccaaggcaaaaaaaaaacaaacaaacaacataaattgaccataacttgactaaattctgagcttaaaacaacggacaaaaaacctaaaagtccattggactcctaaagcgcaatagagccctaacaaataagttcagcgagacggcagtttgcaattggatggtggcgaaataacactgttggaatgcgattgcgattcagtgagagtgagttcagcgaaggtggacgaaagcagcaaacctttagcattcattccactccatcagctttcttctgtgaaattttgatgatgttttaatatatttactaaatttaatttatttaatttgaggttggctttgtccatgaaccaccacaaaacattttggcactgaaagttggtgacgtggatgagaacaagcccgatcagtttgatctgataattctttacacttcaactgaggcacgccaaacaaacaaaagatcggacgaattccttacagaacatttttaatttgaatttaggaaatggccggagaaatttgtcagtatttggccttctgttttcaattcatttaccgagaagcactgtcaacgctggagcaaaatggacacgaaagggaggaaaggaaaaagacgccgcagcaaggggacatttcgggtcagtttaaagagagaatgttgcagatgcactgacaagagactttgctgatatttttgctctttttgtttctccctaattttggcattgtctcccactgcacttttacgtacgtctgctgttgattattttataattacccttttcaccaatcgattggtccccaaatcccccctttccgctccgtctgcacttt

SEQ ID NO: 14786 - DNA, 997 bp, Heterodera glycines
aaaaatgattttgcacacttttggcatttttttgtccaattttggccatttttgctgcagttcgctgctaattgccttgcttttcgcttttttctttcctccatcactggcttcctctgctttgctttgaatcgcagccaatttacacattccttcccaaaagtcgctttctgcctgtgtccgtttcgggcccattcttcttttgacggattaatggggaacattttgccccggcaatgcggaagatgtaagggatacggctactgcccccatgggatggcccaatggatttgtgtcgacgcgcgcatttagcggcgaagattaaatgcggttgtcgcttcatcttctccgccctcagtacgcaattcccttgggcgaatgtcggcatccgccgatggcctttggattagactttgcctttgctgcgggcgtatcggaggagtcaaccaactctttcttctcactccccccttctctcctccctttccctttccttcacctctcgtcatttgttattcatttcactgaccaaaatttctttccttcccataataattgtgtaacaaattcattaatttttttttcttaccgacaattattttcttaacataataatgtttagaacacggaaatacaatttttgacgcgagcatgtgaaaacccttcctcgttccaccaaattcatgcaaatccttgccctttccacgacaatcggttattcaaattcgcaaagagcaaaagttttctccatcatcattcactaaaatcaaaaaaagcgcagccaaagtgggcttttctctccgctctcgagcagcttcatctgtttgtttgttcatcccaaatgactcccgccactccctccttaacattcaattcacctgctttggtacttcgtcttttgtacgctgtcattatgctgtcattctttaacttcttaacttatcgattccctaggagggttattttaagttgcttgtccctttctcattatttttaa

SEQ ID NO: 14787 - DNA, 1593 bp, Heterodera glycines
cttcaacagtttttttttacctcagtgccgtccaatctttggtgactttgaaaatgcgcaacagacgcgcggaacggagcacagaaatgcccagcggcttcatgaactcgaagtagacgagcacaaactcgatgatggagctgatcacaatgaaacagtcgaaccgattgaattggctgttcatgtactgaaacaacggcacggcaaaatcattcactcactcactcattcatcgggatatgccttcgcatttaagcactcttttctaattagattaagtcttagttcttacctatcttttggatttttaatcaaatttaaaatggttttaagttacccaaaaagcaattggtttttagatttaattaattctccgattttttaaacccttttaagcccgatcaatttgtaataagaatcatttatttgccgatccgattttgggtatttctactcgagagtctcggcccaagcctagccagaaaaaatccgaagacctttttttgctctttggaccaaattttttttcccagtgcttttttttcaaaatcatccattctcgacttttcagtttttcagtctcggtccctagcagtcaacacagttgttgtgtcttttaaaatgactgtgaatgtcgatgaaatgagctcatcaatttttggctaaatcatgcgccgatgattggcatttgttccttttgaacaaatgccaaaagcccaattgaaaagcataaaagtgccacctgaagaaggcccaacgagtacattttgagcagcatttccatggtgaacagcacgacaaagaacagattggcaccagtttggaaatggtccaaccactgctcctggccatggtgttcagaggtgagcaccaaagtgttgaggaacaccagcacaatgaccagccaatagaactttaagaaaagatgtaaaataggcaaaataattagggaaaatttaaatttggaaatttataaaaaaatatttagaagaataaatgtacacactatttttaattatcatgtttgtcgcactctaattagatgagagtgtcttgaaatgagtttctaattgtaagacttttttcgttagaaattttttgttttactttttcggatttttttttaatttcctcaaccctccccccccaccccctccctgaatcccctgcgaatgttacggagagtcgattctcgctgcgtcctctcaaatttctgcccgcttggtttgtcaggttgttcgattccaatcgatgcaaaaccgataccgctgagagacctgccgcaaattgtccaccctccaccaaatgtgccggtaattttgggtctttctttcgattgctttttctcaattcccgagtgcatttttcaggcaattcgagttcaaccaatgcagcaacccgtaccaatgagagccgagccacaattcctccaccctccggcaaatgcgccggcaatcgtgagcctcgatttcggcagctttttccaactcccgagcgcattgtttttccagaaattggtgtgggagcaattcatgatggggagcgaccaatggcgctgagagcattgccgcagatagcacatcggccactaaa

SEQ ID NO: 14788 - DNA, 2196 bp, Heterodera glycines
  unsure (1)..(2196): unsure at all n locations
tccataaaaaaacaaatttggacctcggaattccgatcttctgtttccgaaaagcctcggaatgccatccctggtgtggtggtctcaccgccgccgcccctccccccgccccactcgccgcgcctaccgtctgcgacttgaccatgcgacggcacccgcggcgacaccggcggttcatccgctgcaacagtcgccactgcgtcagcagcgcggacggtcgctgcgtctcgccgtcgctgtgctcgccgtcctcgtcaccgtcgccggcgcccgactcgccatgttcgtccgcgtgttcgtcgtcgcccaactgctcgatgtcctccgcctgcgtgatccagtccaggtagcccttgaggtcctcctccagctgctgcttctcgcgaaatttctgtatcaaattaagcttattgatcactttagtaacaaattcaatgcattgattgatcaaaatggcatggtttgatcgatcgaagaggatgaccaaaatgatcactttctttccgattgatcattgttcaaatccgactaatcaaaaattagtccataattcatttcgatcaccaaaaattgatcaattccattacaattgctcagaaatttgttttgaaaatgcctgaaaaagtccgcgcgcgttggccttctcccgctccttggagaactctccggacagaacacccaacaccaaattgagcacgaaaaaggagccgaggatgaccaaagtcacgaagtaaatccaaggccattcccggcccaccgcatcattaaccggaaaagggaaatggaaattaaaataataaataaatagaaaaaatagaaaaattaatttaaaaatataaaattatttatttttatttttaaagttcaaatttatttttaatcctctgtcaattattaattaattaaatatatttatttattttaagtataaaaaaataaaattacgtttttataataataataataatatttttttttataattttatttcatttacaaaaatggtttaaaatataaaattgaattattatttgtttttaggcatttttatggaataattaattatttagtattaatattaaattaattaagcctagcctaagattaacataaacctaacataagcctaggctttagcctaagcctaagattaatcgcttcttctctcacccaatacatcacttctgtccacccctccagcgaaacgcattggaacaccgtaagcattgcgaggccaatgttgtcaaagttggtgatgccattgttggggccctgcgcggaaattcaaataaagtgccaatgaaaatagaaaaaataattttaaacaaaatgaaattaattgagaattgtttccaaaattttaaaataattaattaaattaatttttcctaaattgagtttttttgagtgcccccagggtttaaataaaataattatattttggcattttttaaaattcataagaattaaaattgccgcgttttttaaaattcttaaaaatttaaattggcacttttaatgtgcttctcactgactgaccatccatgttgtgttgtgcgagcaaagccatttgtgccgcaccgaatgaatggccgaagcggaggaaggctcacaatggtaggcactggaggcgaagccacaagtctaacaaaaaaaaagggggcaaaatgccaattatggatgccaaattaaaaaatgggaacttacggatggatctaattgcgccaattcgagggtcaccgaatcgatgcttcaaaagaattgttaatgagttttttgggataaaattaaaaaaaaaaaacttttccctattaaataaaaaatgaaaacttttccgaaaatcataaattcaatttcactaaattttcgtcttaaattttccaaattttctcaaatgcccgtcaaccatgtggagtgcagcttgccacagaacagctccaacccgatgatggcatagatgaggatgacgaagaggacgagcagtgcgatgtgcagcaacggaatcatggcacgaagaatggcattcagaacaacttggagacctgagaggcaaaaattggggctgagaaaaagccaatccgaagcaagggatgatatgctcgagtcgagaattaatgcgcattttggcacaattcaatcgtcgactacagtagaaagtatgataacatttcggtaatttcccggaacnntgtaatt

SEQ ID NO: 14789 - DNA, 509 bp, Heterodera glycines
ccgtttgtccgcacattctttcatcctaaatttttgcaatttttgacgggttgaaactttggcattttttcggtttatcgacattttatgagtcaaactctttgtccaaatgaaccaagcagtgttaaatcgttaatttttaaccaaaagagggatggaccatttgacccgaactccaacccttttgaatgttcaaattttccttttatgatttttttttcaactttaggttagtaaaccggaatttagccaaaacggccaatccgttaatctttctgctttctcatgataaccctcaagtaaaacccaaaaaacctttcaagaagtccactctgattgccgggaatagtttggccgaataaaacagttgtttctggtcagacattatatgcttgttgatctgagaatcaattaacattgtataaaccaagatttattattgtatggtgaaaataaaacgggggagcaattcggtgatttgcaaaagtcaattggacgcttaaaatgca

SEQ ID NO: 14790 - DNA, 2843 bp, Heterodera glycines
  unsure (1)..(2843): unsure at all n locations
ctcattctgacacatttttggacaggaagagaaatcctttatgttgtttgacgccaactctttatgtcccatacttcttattttattttgatttttaggctaaaaaatgcttatatgaatcttatcgttgtattttttgggcatacatatggaaaagcataaaaacccaaacaaatgaaatgtattcgaacgaaagaagaaataaaataaatgttaggggcaattagcagatcagtttccgtatataatgatcaatcatttgtcatttcccaataattcgttcagtttttcttacgcttcttgttttgtcccggctttggtggagacattggccttaattaagtgtgatttaaatttgattataaaagcaaaagctactcacccaatgcacttggcattgtccatccaaaagtggacattgttcaaattgttcgaattttcgtcctcccactgaatcgtctccccaatttggcatcgtttgattatcaattggtttcccaattggccttctttctccaatgtcagcttttcgccgatcccattgttcgtcaattcaaatggcccaatttccgttggttcgtaaagttcaatccgaattatgtagctggccgaagaattggtggaaccgagaaatgcctaaacaattgaaatggaaaaacaaattgcaatcaatccaaaatgtttttcgaaaaaatggccttacctctttgaaattgttgagccattcagtggttcctgccggataaccacagcaagtcaattgttttggctttccatcgctaatcggagtgcacaaccattcaaacaatgcttggcaaacagttggagttgcatttggcccattttgatcaccaatattggtaaacaaataatcgagatggattgaattcaactgattgagatcagtgagaattgtgggcgaagtacggcgaagcaaattgtccagctgatcgccttttggaatgcccaagcggcgaatgtttggcacgaaaatcggccaaatttcacggacgaaagcatcccaaattggctggtaatcattggcgtccggacggagccacagactcaaattggtgcctcttccgtcaaaaatttgctgattggaacggaggaatgtgatgacggaatgatcgatacacctgaaaagcaaatgctttacataaatatcagtgaaaatcctttgatttactcaattcgaagacgattaaagcgaattttgttgggcagcgaatggtcaggcaacggaaatggcacagcatcggcattgctattcgtgtcttgcacggatagctgtgtttttgctcccattttgtgaattctgatttgtctccaaattgtcaattcgcttttgccatcgaaatgcgcgtccaccagcaaattgaaacgaggtgagagaagtgccaatttgaggccgagttgaggacggttaaagaatgggaacaaatccatcaaaatgtcattgcaaatccaactaaaactgtgtaaaattactaaattgaaatttgaaagttcgaaattttccttaccgtctgttcattttggtggccacgcgaacactttgtccaagtgatgtcacaactgaaaccaacgattgctgctgattttcaccaattgctcagaataaatgggccgatggtcggcggaggaatgctttttctttttttcagcggatggttctattgaaaaaaacaataatttagtctaaaattaggaaatatttgaaaaaatttgcacaaaaactaagcgaggagttgtgcttcctggtactttcctgttttgaaggtcaccccaattaaaaaaatgttggactcgtatttatgtgaacaattggacgcttaaactgcagtagaggcccgggaagtacacccggacggatttcgggaattttgcatggattttcaaattgacataaaaagtgaaaaatagtgacaaaacgccaaaaaagtgaattttcactattttatgtgacaaaacagcaaaatagtgatttctaattgatcaatcataattataccattaatttgattgcagtccggtgtggtcagagagccgttgtagcggaaaatgagtttttttggatggattcattcatcgtaagcattcctaaaaatttccatgcctttactaagttttctattgcttattttggccccaccatttttcagtttctttttttttgccatttatcccacctgcttttgtcacttgacttagtgcgttttgcagtgccaccaatgggcgtccgatgaatgccgttttgtaaagaattcccaccacagcgtagccatccgaaatttgaagtgcttcttctgctttagcccttctttgatatggacaaggtgaagctaaactggcaaaacttacttttaattaaaaaacttaataatttttgtaactacatgttttaaattatcttaaacttttccggaaagccaatttaattaagtttgagaatcaaacaaaaacgcctttcaagtcttgcaatgaatttatattatttcattaaaggcctcattcatgctttttttttaatgcctgcttaaattttttgcttatttcttcgattttggtatgaaaatctcaaaaagtgaaaaattctttcgtttttgtaatgcacatgcagagaggaaccgattggtgcctatttttgtcgcactttcttgcgtttttgagtcagtggacagttgagtcccaaatgtatttnggncatnnttcggttctgggtctgtaactctttaggcaatggttccgccaatttttcgtttcttgctttaagtcgattggtatataatttgtttaatttgaatccaggggcctatgaactaactatatgtattttaccc

SEQ ID NO: 14791 - DNA, 4218 bp, Heterodera glycines
agagccaaccaccaaggccatttaatcgcggagggaacgcctcagacagaatatagggcgttctccgctattaacaaaaatccggaaagggccaaaaccccagcaaggaaatgggatcggtcctgctcgctctgctcgggaactgatcatctcccgagcgagtgcccggcgttcccaacaccgggagctcgccgaaaacggctgacagaacagcagcgctgcctcaactgccttgtgcaaggtcacaacactgaggagtgcacctcaccataccgttgccgaaactgtggcaacaaacaccacttcctcatatgcttcaagagggaagagtcccattcacggtcaaatgggaatcgttccgcttcctcccccaagtcgggaagagagccaggagggcgaaagttccatcagcggcaggtggaaagccaaacccacctgatcacggctgggtttcaacagaacgatcagtcaaaccctccgccaagagagggggagattgttcaatccatggggatgtccaccgtggacaccagcaaagggagagccaacaaggttcccaagtgcaaaaagccgcacgcgtatctgatgacgcgacggctgctggctaagtcaagtcgcgacagccggaatataatcaaagttgcagtgctctttgacccgggaagccaaacaacgtacggagcggatccgcttatcgataagctccgcccgcacaaactcacctccgaagagatggaggtccacgggtttggaggaaaacgggagccgttacgcttccattcacccatttactccgtccttctccaaagggcggacggaaaatgggaggaaattgtactcaatcggacggagaaaatctccactcacttcagcatggtcgaatggagcgccgatgaatccgtcacgaatcatcacgaagtctgtgaagcaatgtgcttcacaaaggaggagccaatgatactcctcagcgcaagacacttctggcaattcttccaagggaagagagaagtgtctcccgggctgtttgtgatcaacacaacatttggcccgctggtaaatggcgagtccactattggaccgccaaactcaagtcaaaaggccctttcgatgatggccatccacagcacaaatgtggaacaaatgccaaccatcaatgaggttgagcatttcttcaacctcgaatcactgggaatccaggatgatcctgcccaggatgacgaccaaacagctatggagctgtttaacaaatcaatccgtcaagagacagacggaagttactctgtcaaatggccgtggaaggagtccaatccggacctctcttccaatttcaaaatggcccacagcaggctgtcatcggtgctaaccaagctccgacattctccagaaattctggagaagtacgatgccaccatccgcgatcaactgcaacagggcaccatcgagaaggcccaaagggctcctggacagcttgagcacttccgccctcaccatggagtgctcgccaaaaagctacgcgtcgtttatgacgcgagtgctcacacacgcggaacaccaagcctcaacagctgcttcttccgaggcccagtgcttctgccagatttggcaggcatgcttcttctgttccgttgcccgacctttccgcttctcgcggacattcaagccgcatttctccaaatttcattggagccggaagaccgggaggtcacgaagttcctctggctaaaggacacgtcaaagggactgactcccgacaacttggcaatatttcgattttgccgagttgcgttcggggtcgtcagctcgccattcattttggcggcgacactccgccacacttgcaacagttcgactccccactgtccagggagatttcggagtccatttatgtggacaatgtactcctcgagtgcgagacggtacaggaagccttggaaaaatacaaattttccaaggacatcctccaacaaggatgcttcaacctgagggaattcatctctaactcaaaagaggtgatgaaacaaatccctcaggaggatcagcttgataagccgaaggccaaagtccttggccttccttgggacaccgagaaagacgaaattgtcttcaaattcccaacaactgatccattgaggccagtcacacgaagactggtcctcagccatctagcatcgctcttcgaccctttgggggtccttggaccatgcaccaatggaaggacgaggaaatcagaattcctcgccgcgcaatgctcaatgacacacagtcaattgagctccatgcatttgtggacgcatcggtccacacattcgcgaccgcgatatacgtacgctacgctcaaaggcaattgcgtcgtccaattgccagccttaatctttggggcgtttcgcaaatcgctctatcatgggtaaaacccatgaaactcaaccacaatttgttgagcgaaggctgaaagaaatccgagaatgtctcggatgtactttccactttgtccgtactggggacaacccagcggacctcgcaacacgcggagcaactacttcggagctccgcaaccatcatctctggtggaaagggccaacttggctcacacaagagagccatctttggcccaacgaattctgtttcaaagtaacagagtctgaccaacaaaactcggagaatgttggcccgagtggtgcgtttctcgcatacactcactcaaagcagccaaatgagcaggtcttaattgacccctcacgcttcagctcatggaagcgtctaatgcgaacgacaatgttcgtattacgattcctcgccttaatgttcaaaaggggcgaagaaacaattgcttcactcgagaagcacagaaaggaaattcgccaaatttccaagtctggggaattcaaggcggaagacttcgcactcgcggagcgagtgctcatccgcctggaccagatggatgatgctgaagaattccaacactttaaaacagtgtttgaagacgacggaattctccgtctgaataccagactggagatgagtgagaagccatacagcttctctcatcccattcttcttgccaagcattcagctttggcaaagctgatcattttggatcggcaccaaaaaaggcatcaccttggagtggacaccactctgacagaattcctgagcgaattctggatgccaagcgcgcgtttaaatgttaagcgggctcttcgggattgtcttctctgtcgccgaatgaatgcacaacaatttgcattaccaaccatgccacccttgccgggtgagcgagtacgccgacacgcgccatttcagtcaattggaattgactttctcgggccaacgacaatttcgttggccggagaaaaaataaaggcatggatcctcatcataatatgcctcgcaacgcgcgctgtctaccttgaggcaacattggacctcacatcggaatcattcatcaatgttctccgtcgattcataagtcgacggggaaaacccgacatcatttggagcgacaacgctacgaccttcaaactcgctcagaaaaccctggagcttctcagtgctccggggccggatcaggaagtacaaaacttcctgacccataaccgaatccagtggcgattcattgcccaaataagtccttgagcaggaggcttttacgagcgcctcgtgaagctagtcaaggactgcttcaagcgaactttgggtcgaaggattctttccttcgaccaactcaacacattcgtggccgaagtggaggccatcttcaattacagaccgattaccgcggtctcagacgcagtggatggaccagttccactgcgtcccatcaatctcttacaaccagagattcatagcaattgggaaacaacaacggacccaattgattcagaggaaatgttttcctccacacacgaacgtttagcttcccgaatacaagcactccgggaagccaaagacattttctgggccaaatggcactctgagtatttaacattactcagagaaagagcccagtgggaccacaaaggtccacgactccaaaacttcggtgaaccgaagaaagggatggtggtcctaatctctcaggacctcgttcctcgcaatcaatggccaatgggacgaatcgttgaaacacacggacggcctggagccatccgaagtgttaaagttgaaatccctgtccgagggaccaacaacaaaaagccaaaggacatgccacgaaagaca

SEQ ID NO: 14792 - DNA, 914 bp, Heterodera glycines
tcccaaacagtagtggatcaaatttttcagaaaatcacaaaaaatctggtagcggtgtcggggaaaacgatcaggttcaaaaaagggtctacgtcggggaggggggggggagagaaatcaaccgatcatcattcgagcgcaggtgttactctgttgttgttgttcatcgccggaccagacaacctgtacaaagtgcagtagtgctcgctcaccttcaccggatgcggatggtacaacggtggttgtggacaaattggctgttaaatggggaaagagagagagagagagagagaaaattgccttgactgtatgccccacccattttgtcaaaaagaatccatggccagcttgtcaaaaaaaaaatatttttttatggactggaggtggccctggttcaagtccaccatgggtgaatttatttattttttaaatattttttgctgggcccaatattatttacaattgagtacaattctaaggcaatatgcacattttgttgtaaagattaaaaaattcacacgatacatacattgctccttcggcattgacaaaccgcctgtgccgttcggacactgctgtttctgccaccgtgacgaacggcgtcggcattggatccgttggcggactgaggtggaaagcggacggtgcacgccgcgcaggattgtcccgaatggtgatgtccaccgcaaacgaggcacagcaaaaacgatggacaaagagaatgacgagggaaaagcgaagaaaatggacgacgacggcacggcatttaggaggggcggcgccgaaaggtgcgacggatggcattcgacgatcagttttatgaaaaaacgataaacaaattggccgagacaaaagcgttctatctgatgctagtgtgtttaattgtgatgaagaaattgatgaaatcccatttt

SEQ ID NO: 14793 - DNA, 3339 bp, Heterodera glycines
attaagaggttgtgccaaaataaagtgaaatccaattgtaaaaatgttggaccatttgtaataaaaatccaaatgtggccacaaaaatcacattccgaagcttcgcttggactgcgctcgggtggacgaaacactgtgcttccccgcctccgcaatttgagtgccgccgacccgtcgttgcgccctctccgtttggatttttcgttcggatagctgtttctgcgcctcctccatttctcgttccattgcggcggtggtccgttcagtgtccttaaataacaaaaattttagtcagaatttcgattttcgaaaaatttttgggcctcggaatgccaatccaggaacgtacaccaattgaactgacccgaattttctccaaccgcgttttaatggtctctttgaccgagtagaacatcggccccaattcggcgagccattgcgcgtcgaccgccgtcacactttgcatgtactccttggccgtcatcaccaattcgtggtaaacgacgtactgtgaaagacggagatagatatttgtaatttcggatcggaattttccatattctaaaaaaaccaacgtcaggcgtatagcccatgccaaacagtgccgaagtcgggtggaggaagcagggcattcccgtccgaacattcgcatattcgccgattcccttcagtctttaaaacgggaaaataaaagtagaaaagctcacaagaggtttggctcacatcatttaccctggatcatttcctcgaaattaaaaaaataaaataaacagaaaatattttaaaaaaaaacaacctaaaatttgcaaaatctttttcatttcttagaaaaacatacataatatttaaaagattctaagcctttggctttaccgtgccgcgttgtaaaagtatgccgagcagacgcacttgcgcaccacgtcccaatccgtcccggaagagagcatttccaagcgctgactctccataatttcggccaattgcgcgcgcacctcgcgaactttgcgcatcgcttttgcgtgcacaaaattgtcggtgcaccacttggagctgtacttgtgcttctgccattggatgtacgtgttcaggtaggtcagatggtcactttcggggacctaaaggcaattgtcggattatttccattctttagaaattgaaatgtgagtgcctggaatttctcccgtcgtgcgtccgcctcgtcctcgcgccctttgggccgaaaaaacagcgaaggaatggaaagcatcgacacaatggtcaaaatttcgctgctgcagcccatgtccacggacatcagcagcattttggacagtgttgggtccagcggaactgagaaaaacgaaaaatagcattttttggggggaaagtgggatgaatttgcttacattccaccattttgcgtcccaaatccgtcagttggccaatgttgtccagtgcacccaatgtccaaagctggtacatggagttcagcatgttgtccatcggcggtgagtccatgaaatggaacagcagcaaatcgtcgacattgagggacttgctaaatgagaaaaataattattttaataaaccatgaatgttcccggaaaatgaaaaacattaaattagaaaggaccgaaagcgacgaactctaattgcaagcaaaaaattaaggagaaaaactgacagcaaaaggacgacattggcaaggtttgtccgttgaatttccggcacagtgctgaccaacatttcgtccttgaactgtcgctcggtgtacagtcggtagcagtggccaggccccgtacgcccggcacggcccgaccgttgattggcggacgcttgcgaaacggggaatatctgttcagcaaatggcggtttggattaaattgcaaatgcttaattttgctgacctgcagcgtgtccatgccgattttttcggtgaataccttcagcttgcagtagcccggatccaccacaaagaaaatgccgtcaacagtcaatgaggtttcggcaatgtttgtggccacaatgcatttgcgcatccctcctggcgctttttggaaaattttggcctgaaggtcgctgggcaactgcgagtaaatgggcagcacggcgagcggaggcgcctcgtccaactcgcccaatttttctttgatcagcgcacaagtcaccttaaaaaggggcaaaatttagcataatcctggaagggtcaatccggttggtaatttttttcaatataaaataacaaacggagcttttgcgaaaaatggggaggggagggaaccccaaggaaaccaatgagaaatgaattgataaagccaacgtgaatgctgggactgacttcgatgtcctcttggcccggcatgaaaatcaaaatgtcgccctccatgccgcccaagtgaattttgaccgcctgtttgaccgccgcgtcgacgtggtcttccacgggaacacgggcgtggtaaatctcgacgggaaatgttcggccaggaatttggaaaattggcgtatgtccgccgaagaaattggcgaatttatccgcatccattgtcgcagaagtgacaatcagtttcaagtcggaactaaaaaggaaaaagtaagagaaaatttggaaaggaaaacgacagggaatgattaaccgaaaaaaatgaacagcgaaagtggaaaagcactcaaataatgttgaaaattagatgtccctacttaattccgccacagatccgtaaccagggggtgtgtggggaattgccaaacgcccgaaatgaaaaactatccgaaaaatgggaattttaaattaactgaatttcttaaaagatggccaaattttcgtttcctcggcagcatctaggtttttttttctacggcgctggaagctcttcggttgcctccccccaccgaatttttttctggttatgagcctgtttatctatgcaattttaatttcatttcttttaccgtcttgccaccacatctctcagcagtccaaacagaacgtcggtgttcagtgaacgctcgtgcgcctcgtccataatgatggcggcgtaggagtccaagtcggggtcactgaaaatgaattataaaatctaaaaaaagaatgcgtttgggatggcacctcaaacattctctcagcagaataccatccgtcatatactgaaaaaaattaaagtgaaatgcaaaaatgaaatacaaaaaatgggaaatcgaagttactttaattatcgttttctcggatgtgcagtcctcaaaccgaatggcataaccgcactcctgaaaccgaacatataaaggcaacaatcatctgccacattttctagagaatgaccgaggagtgtgtttttgttagattttatccgtcagaaacaa

SEQ ID NO: 14794 - DNA, 3525 bp, Heterodera glycines
tttccttttgtttttctctctaatgtattcctatttttctcaatcgatattcctttgcttttcttctcccttgtgctttcctttattcattctatttggtgttcacaaatttggacctcagacttttctcctctaaatattttgtgtgtggactcttaattttcgtcgtcttcgcattgaatttaaattaaataaattgaactgtccccgactatttcgccgtccttaattaataagcattggccccgtttgtcctttctgtgctaattaattatttggcccgagaagaggaaaagccgaacgaagcaaagcaaaagagacgagcccctccgacaaattggactccaatttttgcacgattattttaaaatttcaaaaaaaatgaaattacagttcagcaaatcggatcatttcccgaaatgaagtctttccagtgaattggcctgagaattgaccgatcgcttcttcgtcaacaacaataaattcgtcaaagatttccatttaatttatttcagttgaaaatttaaaaatatttttatttaaatcgcattttaatagaatttttcggaaaaacgccaaaaaaggcatttaaggcacgaaaatcccgaaaaggcaaaaaaaaggtataataaaagtcaatgtataagcctcaaaacaagtgggaaaatgcctcaaaagtcaattttgtgtttgcgaacaaaagttgggacttttatttacatatttttacatatttcgaggttttatacatatttggtaaatattttggactttttcttacatattttcatttttttaacatattttgaggatttttacggaaatttttaaatttaaaaaaaaatccaaaatttcggcaaattttttgctcatatttttttcaaatatttcgagaaattttgaaaatttatagtgaaaaaataccaatgaaaaataccaaaaaaataatttttaaaatactaaaagttcttctaattgtaagactatttaagtaatttttatggcattttgaagcctatttcatactttacgatgatttttttccaaaaaaaaaaccatttaaaaaaaattttatttacatatttggggttttttgtacatattttgggtttcttcttacatatttatgtacatatttggaccactttttgtacatatttttgacagccctactaattataattaatagagaataaaaacaaaagtgattttggaaaataaataatttgaaaatttaaaatgaaatttaccaatttaaataattttgttatttaagagtaaataattttatttaaaataaaaacattatcacttattagacaactattttactttcatttatactttttgggtgagtcagtggtaattggtaatttgggaaatgattgatgcccaagggcaaagaacagcactaagcagtagagatcggaccggtcggttttttttcggtttttttcagtatttttcgattttcggtttttaaccgaaaaaaaccgaccgagaaatttttgagtttttcgggttttttcggcttttaaccgaaaccgttcgaccgaccctcttgtccggtctctactaagcagacagactgacccactgctgcagacatctcgcagcccctgagggggaaattgggtggacttatatactggcacaattggggatggactttggatgggatggggggtaatgacggcaagacaaaaatggatggcaaatgcaacagagcaacagagaggggaatgggatagaatggcacgataagagtggaaaatgagaaggattgggcattggcttgggattgggggccgaagcccgccccatacgaggtcgcgaagcggccgagtgagtaccttaagcgcaggaaaattagtaaatgggggaggggggaggagtaagggcgggggaagcgaaatgaggggccgaaggccccataccagggatggcattccgaggccccaaaaattttcggaaatcggtaccatctctgcccatatgaggcctcgatgtggccgagtgagtaccttaagcgcgggaaaacttaaggcccgcctgtgttgaaagctgtccagcgctttccagggccctggttaactagtaaattaaaaaatcggcggaattccgtttcccgttattactaattgtataagaaactgataattaaaacaattaacaaatttattcataccaacattagttgacttcataatggaaacccgtggctaattgatcccactaattggcatgctttgtatcgccagttagcaccaaaaattgagcaaaaattaaaaaaatcattttatgaaaactccaaaatcaaattgatcaaagcccggccatcgctcgtacagataaagcgtacaaaaattctttgctgattacaggaaaaaacaattcatggttcacagcaaaaaaggcacgcaatttgttgacatccaaatgcaaaaaagaattctaaaagcggaaaattaattaaaatcttttaaaaatttaaatattaattagtaatcactttcaaattgtcgagtccgtagcgatcaatcagaaggaaacggtcgatcagcggaatttcatcgcaattgatcagatgcgtttcgcaacgcgacttcaacgcggtcacctgaaaacagaatagtttgtttattagaaatagcaaattcattagcaagttttgagtcatttgatggcaattaatagtcccaattagcctaccaaattaaaaaaaattacgtaaaatgacattttttcaccactttgtttgttataaaaaatgccaaaatattcgccaaattatcccatttgaaaataaataattttaaccaaaaagaggaaaaacaatttgtttgaaaaataaacaattaatgaaaatgccaaaaaaatcaatatgatcaaagccgataatttaacaaattcatccacaaagtctgacggacaaagcgtacaaaaattctttactgataaaaggcacaaactgttcactgttcgcagtgaaaaaggcacggaatttatcaacattcaaatgcaaaaaataattctaaaaatgggaaaataaaatttaataaatcatttaaaaactattttaaaatattaaaaaattaaatatttgaaaattaaatcactttcaaattgtcgagtccgaagcgttcaatcagaaggaaacggtcgatcagcggaatttcaacgcaattgatcagatgcgtttcgcaacgcgacttcaacgcggcaacctcaaaacagaacagttcgtttattagaaatagcaaattcattagcaaatttgggatcatttaatggccattaatttaaagtgagcaaatataaacattacaagcaaattaaaattaacttttggttaattagtttttggaaaagtcaagtaaaaaagtgacaaatattatggtggtttaatttaatatttaaattaaaatgatcagacagaaagaaagaggatgtgataagtgatcagaggactcacctggaaatagtcagccaattcgagaagcatcagcacatttttagctaaaa

SEQ ID NO: 14795 - DNA, 3649 bp, Heterodera glycines
ctttgattttgaaaaatgttaaatgtttgatgaaaaagatgaacaatttaaaattgaatgatttgtggtcccgacaggcgccgccgtgagaaaattcttaattttgcccaatttgttacagatattgcaccaaaacaatagcttttttaatttttcgtattattacattactcagactttgtgctttcgaattatatcaaaaatataggttgggttcgaacatgaacaaagttattgtgtaaaaactaggtatatgctctgtaacaaaattataaactcaagaattttttatcacttcagctatttcccgtggacgaatcgagatgaaatttttaccaagcatacctaccccataaatattaagaaccacacaaaaaaatcggaaagtgtaaaagaaaaaaatttatgaattttttccgaaaatggtcccaaatttggcgtaacaaaattatataatatcaaaattaccctcgttttcacaagaatttggataaaattatataattatttctctgcaagaaaaaacgtaaagcataaaagacagaattaagtatatttacctacattcataaatcatacatattctgttaaattacatatatacaacataattatgacatttatttctccattttttcggtttccattagttgttttgacttttgtttttataatattttgctcatttcttttctcatcatccgccgctttgtcttcaaattttgcttcgagtgggccccgtttttcgtcaattttccgcaattcttccgcctcttcaaattcatcctcatcatcatcatcattatctgcattggtggaactttcgtccgtgttgacgcggtattcgtaataaaaactgaaattaaatttttattaaagccatttattcaattatttttgcaataattggaggcttcccaaatatatctttaatattcatgaaaaattcaaaatgacagtgtgcattttagcgtttatttgatttttaagaattttgagtttttatgaaaaataactgtcaaaagcctacagtcgaaaattttgaaaaaatggcgaaatatttaatataatagtttaagagaaaagaaattatacattgccaaaagtgcaaaaatgaagatgaccacaagcatagcaactgagaaaataaaattcgaattaatattttttttaatatattatcttttaaataattatcattattttattccaaaattttattcaccagcatatgcaacaaattggacagccatgtcaccaaaatggaaaaatgtaacaaaaatgatgatcatatcgccaatggcaaccgtcaaaaaccagcaagcttggagcagagttttcattgaaggtgcggactgttggaaaattggaaatataaaacgtgaaaattaattctatcaattaaataaatatttttttaaatatttatagcatgatttcaaaatatttattcacttgggaatatgcgaattcgtagcctgggattgagaacagaatctctgctgctgtgatgatggcaatttgagggatttgccaaagaatgctcactgtgttgggcggaatggcacgaaaaacgcgttttcgaggcttaacagtagactatgtgttaacatggtaatgattcaaaatccaaaccgctaaatgactaaaaaaagaaacataaaatgcttagaaaaaggggtaggaccgggttccgtgctcaaatcccgtatgtatggaccagggttctattgggaatttttaagaggatggagtttctccattcggtcttttctatacgtttttattagaaattccgtgagaaaagccgaaaaagctgctgtatctgcagcatccaaatttcaatttttttacaatccaatcaaaaaatttctgtctgttcattccatcccaagcagggctgggcgagcttcgaatccagctcctctcattttcaatgattgtgccatttctatcccattaacctctgttgcatatcccattcatttctccaacattccctttgtgattagtcctcatgattcctcaccctacccaaagtacctctctcgcaattgtacccgtatataaatcctctccactgccccctcggagcaattctttcccaaatattataatacgccctgtgattgtcattgacccaaacccattcccgatttttattgctatttattttttaatgcttttcctttaataaataaattcctctcccataaattggtgattcaaattggtttaaagccttaaatccggggacacaacaaaagcaattcgtacaaaaatttgtttcttcgattttaccagaaggaaaatttaaaatgggaatatctgaggctcattttcaccttttccattgttccgctgacaatgattgcataaatgccgccctggtcatgcatttcgatgtttatgtccgaatatgtgacgttcagtgccgatttgtctaagcggcgatgtgcggcatccgtcgtcgcatcattgtgcatgtaaaagaggccccaactgaatcaaaagattaatatttaaattgccaaaaatcatttcaatgattagttttaaaaaattttttaattggttataaatttatcaatttaagaatttattagctaaatttttaaaaaaattataaaattcgtaaagttgaaaatttcctacaagcaataaaaatgcttttatttaacgctcgcttaggttttgaaaattacacaaaaatttctcttaacttactttcccggacgaatatgcttgaaattgaacagagaagcttgctgctccgattcggaagaagattgcaataaatagcgcactttggctttcaaatcggattttaggccgcttcccactggtgcgacagactcaagcgcataaaaatcctgtgaataaaaatgagccttattttcatggaaaaagcctaaaatggcatgcaatttacttaaaagttttttgtggccggaaaatgcgtcagtaaagagatagaattatgataaatttaaattatacagaattgatatgctaacaaacctacaataatccaattacagtatgtttgtttgtttttgtagggatttggtaatttttttcaaaattttattaaagttttgtgttccaaaaattgaattggcgaattcgttgtaatagtacgaagaacttgctggttttttaaatttggatcgagagtctcgaccaattgaattgcttacctcagccctttgcgggtcacatgggtgcgcttcttcgctgctgttgccactgctcgtcccggaatcgcctctaagccggcaaagtgccaaattgcccgtgtaagtgatgtccgacagtgccaaattgactgataaactgaactccccgttgcccccggtgggcttggccgtgtccgattggcccacaaacgctccgtttggaccaatggccagaaaataaattgaccgttcagtgttgaagcgcaggttcaaccgtttcggcaaatccaaaccatccaaatcttttggggaaaggagtttaatagtaatttttattgtaattattcagggctgtcctttttaatgaaatggctttttctgatagtatggaatggaatgacctaaatgcatgaaacttcattttaaggaaatttcagcatctaaagcaaatttttaatttaatttatttt

SEQ ID NO: 14796 - DNA, 1058 bp, Heterodera glycines
ccccgaactccccattcctccatcccatccattttatcagagctgccttcctgctttggtctctttttatttatttattttaaaaatagtctttttttcagtattcgcatttatattttttatttcaaattttgagccgaattcttatttaataaatcgcaataaaatattttcatcaaaatcctttaaaattagacaatttaattgatttaaatggtttaaaaaatttatttatttaaaatataattcattttgaaaaactccctttttattgcatatggtaaaatttgatgtgttaaaaattttctctttgatttaattggagttaaattggcttgtacagcttttggattcgaatttagcccatggcgacaattttcaaatatttttcaggcattacccacaccgttagaagaaaaaaccgcacctttgttggattatcggaagcctgggacgagaagccgcacaaatcttaccattttccattatcttggattatgacacattttttaagatgataagtaaggatgccaaaaatatggatataaaatcgcaaaatatggccataaaatatggaccaaaaatcgcgaaatatggacataaaatggcaaaaatgtcaaaatatggacataaatttttcaaaattgagtgcaaaatttcttcaaatttattggttgaaattgcatatgagatacatttccaaattttttttgactcggtaaggcgctttgacaaagacggctttcgttttggcaattagtcggtcaacattcggaaattggtctcgaattttttcggcaattctgtgcaatcattttagaagaaaaaaaaaacatgaaagctaaaatttattaatttttttagcgcaaaatcaaccacaaaagcgaaattttcgcttttttgcttatttttgacataaatttattaattttttagaaaatttaaatttattccatattctcgagaaaattttggcgaaaaaatgattttttgaaaaattttccgtttttgggctcaaaaggctatttagctgctgggagcgttgtaatagaggtttt

SEQ ID NO: 14797 - DNA, 1885 bp, Heterodera glycines
  unsure (1)..(1885): unsure at all n locations
tgccgaaacggcaaagtggtgtgctagtcacaatcccaaaatcagatgctcatgctaatggtctccctttgctgctgaaaacaaatgcattcctgctcactgatggggaaattgcggaagaacggaattttctcctttttgaaaattcttttggcattatgccttttgctgttgttgtgcttgttcactattttgttgcgctgaaaaaagctccttcagattaatcaaaaaatttaatcaaaacccgaggatttcggtcacattttgccgctgttacggcaaaaaaaaaaaaattgtaaatgatgggtcgcgcctcaaccctactatctatcttgtagcctattttgtgctcttttttctgtcttacttaaaaatttttccaacccctaacaattttttctctcgaaaattttaccgatttcatgtttaaattagttcatcagaaagagtgaacttcttcttcttaggtcaacattcaattttgcttatattcaaaatttgaatatgaaaaagtttttcatattaacaaaaagatttaaaaaggtacatttgaattttggatcatttattgtattaaaaaaacagtacaaaaacctctaatggccgatcattttttcactgatcgtttcgtcactgagaaataatttttaaattattagtctcagtgacgaaatgataggtaaccatttaaatgccaaatagaaaaacgaaatgcaaaaactttgtaaatatttaaacagaggacaacgatcgacggaggcgaaaaagggaaaaaattttaatgtaaaaaagctaaacaaataaattattttcctaaactttcatataaaactaaaatgcggcactctttcccatataaaaaccaatcaaaaaagtcaattttcataataataataataataataataaatttaaaaataaaacatttaataaatttttagacattattttctaattctcaaattttcgttttttcattcgcattcgggttatccatcttgaaaatggaaaactttatttttcaaaaaggctaggggtaccatcggcattattagctgaaacccaaaaaccgagaaatttgtcgactaaaaacaatagattctcggaccacccttgagccaatttcttttttaagaacttttgtttattatttttaataattttcatggatcaaaggccttaatgacaaaaaaaaaataaatctaaaaaccaagtcctacccataagttagttattcaaaaaaaaaccaaaagccgaaccgtaagccccctaatcttaataattaaaaacaaaaaattccaattttacccttaatttcaacatttttagttttcccataaacgaagaaattttcataatgctcaacaaaaaatgcgtcacatttgctctgtttctgctgttgtcagctgctgtccttttcgtttcgggagccaaaaaatctgcgagtaagtttcaaatggactaattaattattttaattgcaataaacaatatttactaaggggatattaggtttttttttagaacgctttttatttttaataaattttccaaaattatttttcataccatatttaactatttttgggatttttaattttttaatttaaataaattttgtaaaattttgtcctcagtttgaaatatgtgcgtggtttttattattttctatgcatattttataatacagtatttataaaaacaaagtctgtaaatatgatttctgaaatacaaggtgtgaaaaataagaaactatatagaaaagcttgtattgttgaattcaacttgttaaacggttattttttttaattttgaaaaacggaaaaatacacattnctagaaaagtagagcggggaccgggaccaaaacacggacaactgagtac

SEQ ID NO: 14798 - DNA, 1494 bp, Heterodera glycines
  unsure (1)..(1494): unsure at all n locations
attattaaaattacaaaaaaaaaattgtttatttaattgcccttttccaaaaccataatgaaaataaacaagcctatgatttttaaatgctttgcaatcataaaaaatgtttgattattattgtttacttaataaagtacatagaaattgaaaaactcaccatagaagagttaatctgttatagaagaaaattgagaaattattagtgaaattaagatttctcttaacagggtaggcgaaaagggctgcaattgaaaatctttttaaatgctttgcaatcatagaaaaatgtttgattattattgtttacaataaagtacatagaaattgaaaaactcaccatagaagagataatctgttatagaagaaaattgagaaattattagtgaaattaagatttctcttaacagggtaggcgaaaagggcggcaatttgttaaaaatattaatacagtttagttccccgtttttagcatagtcgtttagatgtgatcccagtgcaattaagaaagtaggtatgaatgcttgggaaaattttgttgtttaaaacagagcaaatagagcggtgtgcgaggaaatgcttatcgtttaaagtgggtattgaagaaaaatcgacaaaaaatttaatgcgctccaattgcatgggcgcctgtaaattcgaaaccagcacaaaaaataagcctcatggcaaaattccagcgcaattgatcgggctataagccatggaattaccacaaatttcgacgacattcaagactgctttttgttaaaatatgaacacatatttaaccggaaataatgaaaggtgtgtgcttgatcagactttatcttctctatttgttacactatcgattgcttatagaaaattgcataagatttatacaattaataaaattacaaaaaaaaattgtttatttaattgacctttccaaaacataatgaaaataaacaagcctatgattttttaaatgctttgcaatcatagaaaaatgtttgattattattgtttacttaataaagtacatagaaattgaaaaactcaccatagaagagataatctgttatagaagaaaattgagaaattattagtgaaattaagatttctcttaacagggtaggcgaaaagggctgcaatttgttaaaaatattaatacagtttagttccccgtttttagcatagtcgtttagatgtgatcccagtgcaattaagaaagtaggtatgaatgcttgggaaaattttgttgtttaaaacagagcaaatagagcggtgtgcgaggaaatgcttatcgtttaaagtgggtattgaagaaaaatcgacaaaaaatttaatgcgctccaattgcatgggcgcctgtaaattcgaaaccagcacaaaaaataagcctcatggcaaaatcccagcgcaattggtcggngctatagccacggaattaccacaaatttcgacgacattcaagactgcttttttgtanaatatgaacacatatttaaccgg

SEQ ID NO: 14799 - DNA, 1542 bp, Heterodera glycines
  unsure (1)..(1542): unsure at all n locations
agaagagataatctgttatagaagaaaattgagaaattattagtgaaattaagatttctcttaacagggtaggcgaaaaggactgcaatttgttaaaaatattaatacagtttagttccccgtttttagcatagtcgtttagatgtgatcccagtgcaattaagaaagtaggtatgaatgcttgggaaaattttgttgtttaaaacagagcaaatagagcggtgtgcgaggaaatgcttatcgtataatgtgggtattgaagaaaaatcgacaaaaaatttaatgcgctccaattgcatgggcgcctgtaaattcgaaaccagcacaaaaaataagcctcatggcaaaattccagcgcaattggtcggggctatagccatggaattaccacaaatttcgacgacattcaagactgctttttgttaaaatatgaacacatatttcaccggaaataatgaaaggtgtgtgcttgatcagaacttatcttctctatttgttacactatcgattgcttatagaaaattgcataagatttatacaattaataaaattacaaaaaaaaattgtttatttaattgaccttttccaaaacataatgaaaataaacaagcctatgattttttaaatgctttgcaatcataaaaaatgtttgattattattgtttacttaataaagtacatagaaattgaaaaactcaccatagaagagttaatctgttatagaagaaaattgagaaattattagtgaaattaagatttctcttaacagggtaggcgaaaagggctgcaatttgttaaaaatattaatacagtttagttccccgtttttagcatagtcgtttagatgtgatcccagtgcaattaagaaagtaggtatgaatgcttgggataattttgttgtttaaaacagagcaaatagagcggtgtgcgaggaaatgcttatcgtataatgtgggtattgaagaaaaatcgacaaaaaatttaatgcgctccaattgcatgggcgcctgtaaattcgaaaccagcacaaaaaataagcctcatggcaaaattccagcgcaattggtcggggctatagccatggaattaccacaaatttcgacgacattcaagactgctttttgttaaaatatgaacacatatttcaccggaaataatgaaaggtgtgtgcttgatcagaacttatcttctctatttgttacactatcgattgcttatagaaaattgcataagatttatacaattaataaaattacaaaaaaaaattgtttatttaattgaccttttccaaaacataatgaaaataaacaagcctatgattttttaaatgctttgcaatcataaaaaatgtttgattattattgtttacttaataaagtacatagaaattgaaaaactcaccatgtaaagagtaatctgttatagaagaaaattgagaaattatttagtgaattaangattctcttnacagggtaggcgaaaagggcggcaaaattgtaaaatattaatacagtttagttccccgttttagcatagtcgttt

SEQ ID NO: 14800 - DNA, 2189 bp, Heterodera glycines
tcaattctccggcattccaaacactggggactcaaatctccgttattccaactctctgaggactcaaatctgcggcattctaaacattgggactcaacccaccaactttcaatgacattccaatcactgaaactaaacccaccagcatttcaatctatgggactcaattctccggcattccaatctctgggactcaaatctgcggcattctaaacattgggactcaacccaccaactttcaatgacattccaatcactgaaactaaacccaccagcatttcaatctctgggactcaaatctccggcattacaaacactgggactcaacccaccaactttcaatgacattccaatcactgaaactaaacccaccagcatttcattcaatctctgggactcaaatctccggcattacaaacactgggactcaacccaccaactttcaatgacattccaatcactgaaactaaacccaccagcatttcaatctctgtgactcaaatctccggcattacaaacactgggactcaacctcagcaaatttctttagcatttttaactttttgtgtgccttgggatgttgaacagttggggagggctcggccgcttcgcggcctcgtacgggggccttcggcccccccccaacaattttttgcgccaaaggtactcgctcggccgcttggcggcctcgtactggggccttcggcccccccacaattttctgcgccaatccaccatcatttaatcactgggactcaacccaccaacattccaatcaacgggactcaaccctccagcatttcaatcaacgggactcaatccaccaacatttcaatcactgggactcaatctcatcaatccttcagcaacacaattaccgggactcagttctccgacatttcaatcaccggaactcaacctcagcaacggaatacagaactatttaaaaggaatccagaaattgaaatataacccataaatcaaaacactatggtgtacatttatattgctttttctatccatcaaaggatttttctttcattttttattactatcataacatgctttttattcaaaacaaatatcaaaaaccaaatcagattcttttcatattataagcaaggaaaagtacaaaaaacttttttaagtaacaaacctttttcattcaaacaaattctaatgcattttttaaccaaaaattctccattatcgtttacataagcaaaacaaaagctttcacatcaaaatcaaatcaattaacaaaaacaaaatttagacaaaaaaataatgataaacagcaaaaccacaaattttttcttacacacaaaaacagaacattcatataccggattttccactcaaacaaacagaaaaatgtgctcattattttattaattattttatataataaaagatgggttataaataaggaagggatgcgagacaaatttcccattatctctccctttcctttcttttactctcttttcttttccattgcaatttactctctttttttcccactccctccttctcccacacacacgcacgcgtccaacagactgctgctgcacagcagccacagcagcacgcgtctgttcactgtctgcccctcccatctgccgctgcccgcatagacagacagtcatacagtgcactatttcccaccatccctccctctaacctctacatcctaggaggagaaatcttttaccttctttttctgtgctatttcttttgccttcttcttcttcttaactatttattttcgtctcttttctttatattctcttctttttcaaaacaatttcttttcatctcttttcaaactcatttttaacgcaaaactcaaacaaaacgccacacaaattcaaacacggacacatacatacatacaaacactcaactttattatataggataatggacaaaatggcgaaataccacaaagaaaacacatgccaagtcgaattaatatttattcaaaaagccaatcgatcgaacatttacagtaccggaaaaaagtttctgcgcctaaagaaaaaaatttgactctctaatctaagagcacagaaataatttaagcttatagctaactttttattctaaccagaaaaagtcttttgcaccaacttgatcagaccactcttttcatggtaatgaaaatacactgaaaatcggaaaaatta

SEQ ID NO: 14801 - DNA, 1541 bp, Heterodera glycines
  unsure (1)..(1541): unsure at all n locations
ccgaccctggagcggctgatcccgtgcatttggatttcgcccattgactgcttttttgagggcgcgaaaccactgtattaattttgaaattacttcagaaaattcttgcaagaacccaaacgctttcaaaaattgagaaaatttttgatttcctgctggcaaatcctcttggaattttgaaaatcatacaaaatattgtttttttttaaatattggggggggggggtaagaaagattcacgctctttaaaacccaaaaaaatccgataaattttgaatttttgcaataaattttttaacccctcccttttttaaagcggtccgtcgcccccaattgacatacaaaacattccgttgggccccctgctgcaactgatggtggacgacattccggaccaggtcagctggaccaacctggacccggagcacgtggtcagccaagtgaccgccaccttcgacctgggcaccatgcgcaacttcttcatgcgagtacgtctcggatttttggaaatgtttttttcaaaaaaatgtcggctggtaaaaaatgcaaaaaagaaatgttttttctctttttttgaactttgaaatttaaaattttcctttcataaactgataaaaaaatcattcggacaggttcccctcgagaaaattttttaaaaatttaaaacttctggattaaaaagatttttcttgctttctgaaaaatgcctatagacattatttcattcattttccagtccggcatcggcaaaggctacttggaacggttgtgcatcgacccgcttgacccggcatgtccaccgacggcaccgaatcactacggcggcaccgtgttgtgcgatgcaattcggcattttgagcagcgaattgttggcgtcggacaaatgaccaaccggacaattgaggacattttggcgccgtacaaatccgtcgacggcacaaacaatgccgggaacaaacagaagaagcagaacacatcgccattcgacattttgcaagcattttgtgagtattgtttaagggtttatgtgtaaattcgatggaaaaagggcagagaatggagaagaggatgagagacagtaccataaaaggagcaaagagagagtaagagattgggaaaagagtgcgacaaaaataaagttggtaatagagaggggcgatagacttttggtctggaaaggaaaagaacataagacaaaaagaaataggatagcaattctagagagagaggtgaattgagaatatcgaacaagagagagtatagggaaaaggcgagagagagagagagttcggctagtttataagggaatggagagaaagaaagggagagttcggcatggagaaagacgagacggaaagagagaaagaattaggtacagagaaatattgaggtaaagacacagagagagagagagagagcgagagtaaaaatagggagttggcggaggttgaaaaacttcttttttaattntcgggttgaatttcagttggtgccgctgatagtggcgctggtgctgataagtctggccagtcgagcaatgc

SEQ ID NO: 14802 - DNA, 1408 bp, Heterodera glycines
gatgaccaacatcaacatcggcatgaccatggcacagcatcaaaatccgctgaggacgaaagtgccgccgatgagaccattcgggcggaggccttacaatccgtcattttggtcgcctcaccgacggaagtgttccgacggtttaaggcaatttttagcatttttttatgcgaagccatgaccgtttttattgtttaaatttcattttcatggcttaggactctgccaaatttgctgctggaaacgaaagcgacaacataacgcgatggtctccgctggtggccaaagaggtaataataataataataaattgggaaaaacaaaatacgacaaaagttaaactaaaccaatttgacggagtgcattatattttcctcccatacggaaaaatttcttttaaatggaaatttttaatacttttccaacatttttagaggtttttttaactgaaaacattttccaaaataaaatttaaaaatcatatttgtcatttttacgttttttaaattaaaaattgtgaattttgctgaaaattagccctccaaccttgtaatttttggtgattttcgattgaaaaagcgcattttccatgtctactcactcatttatttgtttatttgataggtgatcagtgcctgggcccgtgcgttcaccgattcgttgtacaaccacgcgttcaaccgacgggccggccacacttacattgaacagtccgcacgtgtggtccatccgctcgcgtcgaccagcatcagcggtagagcataaaatttgcatacaacaatttaatagtactggagatttaatagagatttttgcatgttaagtcctaaaatttctctaaaaaattttaaaattttttgaaaacggccacagactcgagacccttcgacaatctctcactgttgcaatctttttccatttttgtcccgaaaatggcaaattttgtgagatttcggcccaaatgctggttccatttcgcttttcagacatgttggccgagttctgcgacttcaattacgccatcattttggccggctacttgctgatgttgctgtacgcgctgtactcccagtgccgcttcgatggctgctgctcgctgggcgtcgagtcggctgttggtttggcgttggccggcgtgttcaccgtcaccatggccagcattgcgggccttgggctggccacatggtctcagtttatgccatttttgtatagatttttttaaaatttttaggcttggcatcaatttcaatgcggcgaccacccaaattgtgccattccttgcgcttggcataggtaaaatgcgaaagaaaaataggggaattttttgggggcaccctaaaatttttgcatccgagctttttaaacttagtaattttttaagagaaatcatcttataaattttttttta

SEQ ID NO: 14803 - DNA, 1452 bp, Heterodera glycines
ccccccccccccccttttttcatgatgccgaggagttttatcccgtctctattttttcattttttgtttttttatcccaaaatgcaaaaaattgtgcggttttgtcggttaaattgtcccgcttgcacaggtgtggacaacatgtttctgctgttgcacaactatccccaagtggtgggcaacgtggcacgcaatgagctgggctttctgatgcgcgagaccggtaggggctgggcaaaatctggcattttaattaaaaaataaaaaatatacatttttcagggatgtccatcctcaccacgtcgttcaacaacattttcgccttctgggctggcaccattctgccaattccggcactgcgctcattctgtggtcaggtgagtgcctttttgattgttttcttgacattttaaaaaaaattgtcatcaaataattgaattttgcactatggaggcccaatttgaaaatggctaatttttcgcgtttttttcccgcgtagccaaaaatttaggcttttctggttacgggcctgattcaatccatttattctgaaatttggaaattaattgctggacagaattttgtctacaaatttatttttgtttttttcaatttctcatttgtcagaccgccattctgttgaccaccaatttgttcggcattttcttcatttacccggcattcattgcgttggatttgaagcggcgcaaggcgggccgacgcgacttggagtttctgtgctattattgcctttgtgtggacgacgacgacgacgacaacgtcgacgcggaaacggcgcacaaaattcggcgttccgacgtaacgggaaaaaagattgggaaattgatggggcatcacccagatgtatctcaatccattaggatccagattgaagtagtacgctgataaactgttctcccccgatgcgcaaaatattacatagagatgtctactgagagttctatgtcataccgtatcacatgaagagaaccattaagtctgaggaagggtcacaacagctacagcctcttcctgctgccgctgtagacaacaaagaaatgccctatgttcctccgactacgaggggggccgaacgtggctaccgcgtatatgatgatgatgaggcgcagataagaaaactagtgtggcaggcgagaagaggaagatctacagtgactctcccgagccaggaccttcaacatctgcacaaagtggtgaactacatcaacgacaacaacaacgcgaactgtttgccattccatcaaatcacctgaccatgactcagcgggttgaacggctatacatcaaatgcaacccattacgctgatcttatgggccgtcgtggaaatacaatcaacaccgcaaacggcaagcccgttggtgcataccaattttgcgaatggtcatccgctatataaaaacagaacgagcgggccgccccacccttagacc

SEQ ID NO: 14804 - DNA, 1899 bp, Heterodera glycines
  unsure (1)..(1899): unsure at all n locations
ttttagccgtttttttttgccaaaaattactattttttgctcattttggtctccatttttcaaaaatatggtaaaatggtggtccggtgctgttgtcactcacttttttttttctaaattttcttctccttattttaaattcttcaaaaatttgtatcttctactatagtttgacagaatgccaaatttaaaaaaaaaatgggaaaataaaattatacaataaaaaattcaatttgtcttttcagctcactcatcaattcttgtccactgggctccacgcgttgttcccctcgctcaacggcactcttcccactgcgaatggtgccgaccgtgccgggttggcactgctcgagcgtgacccgctgttgtgccgagcgtccggcggcttccgattgtttgtgcgcaaattcacggaccaacaattgctcaaatgtctgcggacgccggcactgaacacacttggccaatgggcaccgccaaacttgcgctacatccatctgctacgttcggcggtaaaaagggggacgggacgaaatctcgccgccggaatctcaaaaaaaaaaattctaacttagaaatttttgaaggaaaaaactttagaaaattttttttataagaaaattccaaaaaaaaaaaattctaacttagaaatttttgaaggaaaaaattttagaaaatttttttttttgaaatttctgcggcgagatttcggcggcgagattttggggtgcacccgtaaaaagtgccaaaattggccaacagttttaagcattcattaataaaaaaatgatagtggagaaatagcttaatatttattgcatgttttttttatacttcacccccccccccctctccaaaaaaaatttaataaatttactgcaaaaaggtaatcaattgtcggacccaattcttggacatttaatttaattaaacacagtaatttttgaaattttatatttgaacatccaattgaacatttgttaaacaaccgactcatttttaaaacatttttccatttttttaagtggaagaaactgactcaatttgaacgctttgattggcaggaactgtttgaacagtatgccaaggatgggcatgactcgacgctgggtaaagaaaaaaaacattttgccattttttctaatgccaaattaatttaaaaaaatttttgctcaaggcattgtggtggatcagaataaacaactgcttgaggcctcagccaacaaagaggacgagcagcgtttgtgtcagttccaatggctgtccacggtggattctgagcatttgccatgtccattgtgctcatttgggaaccaacgacgatatgccattggacaactcttggtaacgaaaaacggtggcatggatatgaaacacgaaatttgtaacacagaaatttgtaggcattcttttccgaaaaatggaatttatttattgataaaaagtttttgtttttttgtatttttatgccaggggttcgattctacgcataacaactaaaatacgtaaaatgcattaaaaaaaagaattataatttaaatggtatttggtgtttcgaaacaaacaaaaaaataattataaaaaaattgtgacctgaaaaaacgttaccggttgatctatcactttaaagtctgataaatttaaacacataaatcagaattaaaaaatgatcactttttaatcccttttaatgcaattctctatagtaaaaaaaaaaaaattttgttttaaattttagacataaatttttcatagcacaacaacaaatttgccattttttttcgctccaggcccatttgagtctcagccatcactcggcccatctctacgcgtgccattgtttgctcacagcgttcagtcgggctgaagcattgaaggagcancgcaccaattaccaat

SEQ ID NO: 14805 - DNA, 762 bp, Heterodera glycines
tttcccccaaaattttttttttaaaacaattttcaaacgtagaaaatttcaaggaaaaaaatttcagcgatttttttttggattttttttttgaaaaaattgaaatttttatataaaaacttcgttagaatttttttgaaaattttctagggttgaaaataaaaaaaatctaattttttgaattccatttttctttttcagctttcccattccaaccaaagtttgtctctttgttggacgttcgcctccgtggaattggcccaaccgtctgtcaaaattgactttctgcgcccagtgatttttgagccgatgtccaagtgtgaattttgcttacgctccggttggaactcgccgatggaattggaacggcactgtgccatggagcatcggaattgggccatcaacaaccaatgcatgttgcagtgccctgaatgtccagccaaattctacaccgccccactgttttggtctgaaatttttttctaatcaaaattttcattggataatgaatgccccaggctctcaacgtttttagggttacggtagatacagtatgcctaaagaaatttttttttttgcggaattgttagtttgagttttatttgtaatttttcaatcgtcgaggagggttagaataaaaagaattcaaattaaatttttgttttttatacaattttaagagtcgaaaatttatggcatggtaaactaacaaaatgcaaaagttaggaatataagacatttgtccataaaccatggtaaaat

SEQ ID NO: 14806 - DNA, 1254 bp, Heterodera glycines
gtttcgcactttgtccggcattccaactccgtggcaaatcggttgtcgccaaatccttcgcactgggccatgcgacccttctcacatttttgccgttctacgtcagaatagtaaaatgttctctatacgggtcggtggcacccggcgggaaattcatggtgaaaagtctcgtgcatattgcacaaatttcttttttaacaatttaagaaatactttcgtttcaataaaaaatcattttttttcattcaaacgcattatttttcggaatgacatactcaaataacataattgatggttaataagcagctgtctgctcataatcaaacagcaattaatctatcgtgttcatttttcactactttctttttcttggattttgttggaaggaaacacttatgaaatcacctctgcctaaaaaatttccgttcattgctaaagtaatttttaataacaataaaacaagtgccctacgggcgacaacgtttctaaaaactatcaaatgtgtgtttcctcaatttgcatgtgcgtttcagaaaaactgccaaatgagctttcctaaaaattgccagcatgagcctcccggccggtggaattaaggatctggcgttaatttcactatgttcaaaataaagttatggccatgaatgttcggttagtttgttgaaattctttaccgatccggaaaccggcaaattaataaattattaacctttgaaaatttatataaaaatacaaaaattttccgaaatacataacatataaaaattttgaagatctttatatttttcataaaattaaacaaaatgaaaaaatcagcagctctatttgagttttttacaagatacagtttgacaattgtgactgaaaaaggatcttgtaaaacttttttaagtatataattttaatgaaaagcaattttgccgtgaaaaagctaaatttcataggacattgatgaattttttggtccgtttgttttagtatattttagtggtactcagtaatacatatgaattaaggacccagtcaaaacgactgaaaaggctaaacaaacaaaataaaatgaattaatgggaaatagtcagaagaaaagaaaaatggaccaccaagttggtaaacaattagctctatttaactgtgaaaatttcaatcgaagcatcaaataataatggcatttaatgaattaaatattaatacaactcatcattctctttttcttcataatagttttttagtagagcacaaaggcacaaatga

SEQ ID NO: 14807 - DNA, 1800 bp, Heterodera glycines
tggaccaaaaatcgcaaaatatggacataaaattgcgaaaatctcaaaatatcgacataaatggcaaaaacgtcaaaatatggacataaatttttcaaaattgagtgtaaaatttcttcaaatttattggttgaaattgcatatgagatatatttccaaattttttgactcggtaaggcgctttgacaaagacggctttcgttttggcaattaccgtatatgctctaattatagcccatgggggattatttttcaacctcctcagaatacaggggataattggagactgcggtattaatagagactgggctataaaaagagcatatacggtagtcggtcaacattcggaaattggtctcgaattttttcggcaattctgtgcaatattttagaagaaaaaaaacatgaaagttaaatttattaatttttttagcgcaaaatcaaccacaaaagcgaaattttcgcttttttgcttatttttgacataaatttattaatttttaagaaaatttaaatttattcaatattctcgagaaattttggcgaaaaaatgattttttgaaaaattttcggtttttgtgctcaaaaaggctaatttagctgatgggggccgttctaatagaggtttttttgaaaaatgccaaaatatggacataaaatatggaccaaaatgccaaaatatggaaaaatatggaaatatggacataaatcgcgaaatatggaaaaatatggaaaatatggatatagaaatccatcctagaagcttcaaaccaagctaaaaacatgtttttcgtgcgtttcaggccttccacagtccaggaaaaaaatatggatttccatataattcccagccctagtcatatgtttatgatcactctctacttggcaaatcactctctacttggcaaaaaatctaaatatactatttgggtcgtgtcattccgtcacaaaaaatatcgattcaaattaacgcgaaaataaacataatgccaataaaaactttttgtaaataaatttaagaaaattatgcaataataaaatttgagatttttcatcacttttttctttttatttatttacttttatctttttcaaattaaattaattaaatactactatttaacattaaaattctaatccacaaacaaaatttaattcaaattgtacattttttaattattatattgttttgttttttttattaaaatttttgagagaaaagcttaatttttttaaacaaataatgaatcaaaatattatgtatgaaagaatgaaagtaaaaagaaaaagagaaagaaagtgagaaagagagagattgagagagagagagttgtgtgagagagagattgagagagagagagttgtgtgagagagagagagagattgagagaggagagagagagtgtgtgtgagagagagaaagagagtgggagagagagagagggtgtgtgtgtgtgagagagagagagagagaaataataaaaaaaaagataaatagatacttacgaatacagagaaagaaggaactatagaatttaaaggacaagagagagagagagaagagaagagaggaaaagaaagagagagagaggggaggagataagagagaggaaaggagatagagagatagagagagagagagagagaagggagaaagagagaggaggagagaagagaggacaggatagagaggtgagaaagaggaaagcattaagagatagagagaggagagaagagaggaaacgatagagagagaaagaggtgagaaagaggaaagcataaaaagagagagagaagagg

SEQ ID NO: 14808 - DNA, 2639 bp, Heterodera glycines
attcccaacattgacaaatacactaccagaaacagacacaatcattgccgaacatcggctaaaacgctaaaaaccgggatagagatgcccaaacattagcccaaaacattccgcctgtttttggtatgcgcctggcaatgtttttggcaaatgttgggaatctctctctgtcaatgttttcgagttatttaagaaacaggcgcaaacattggcaatatttgctaaatcatccagaaaatatgaaacaaaaacatggacagaacatcccaaacattgacaaatacactaccagaaacagacacaaacattgccgaacatcggctaaaacgctaaaaaccgggatagagatgcccaaacattagcccaaaacattccgcctgtttttggtatgcgcctgttttggcaatgtttttggcaaatgttgggaatctctctctgtcaatgttttcgagttagttttcgagttataagaaacaggcgcaaacattggcaatatttgctaaatcatccagaaaatatgaaacaaaaacatggacagaacattcccaaacattgacaaatacactaccagaaacagacacaaacattgccgaacatcggctaaaacgctaaaaaccgggatagagatgcccaaacattagcccaaaacattccgcctgtttttggtatgcgcctgttttggcaatgtttttggcaaatgttgggaatctctctctgtcgagttagttttcgagttataagaaacaggcgcaaacattggcaatatttgctaaatcatccagaaaatatgaaacaaaaacatggacagaacattcccaaacattgacaaatacactaccagaaacagacacaaacattgccgaacatcggctaaaacgctaaaaaccgggatagagatgcccaaacattagcccaaaacattccgcctgttttggtatgcgcctgttttggcaatgtttttggcaaatgttgggaatctctctctgtcaatgttttcgagttataagaaacaggcgcaaacattggtaatatctgctaaatcatacagaaaatatgcaacgaaaaacacggacagaatattcccaaacattgacaaatacattaccagaaatagacgcaaaacattgccgaacattgatccaaaacatattgcgcctgttttggctaataaaaatgttaaaaattggtgtcttcgagttgttcgaagcagggagcttctcctaccctgaaaacccaaaaacaactaacaatggaacctaacaaactgtcaaaaagtgggtataaatttggtattgtcgacttttattgtgaatttttaatattagccgtgtgtgaagggaaataaaaaaggtatgggacctcgaaaattgaaattttgactgtgttttctgtggccgatggtgacgtgttgaaaacgagcaaagttggttgatcagttggttaaactcgcattttggcaaaggtgcagaattgtgtcccggcgctatgtaatttcgacactgagtaatttcgacactacattttcgacactgaagtatttctaaaactgttgtgactgggatgtatgtagtccactcgtcaaggggccgttaaaagggaggaagtaggtgcaccattcattgcactgaaaagtcgagccgacctttcactgttttcctgcattttcggcactggaccatttcgacattgagtaaattcgacacttagagaattttttagaaagtaatataaaaaatttgaaaatgttagtatttataataaatttcctacttcattttctaattttaaattaactccatctcattctaaacggttgaactaaagccatcggatttacattaaaaaatattctaaacacccgccgtattgcccaggaagagctacagtccaaatatgtagcaccatttcgtcaacaattggctgctggacactgggaggattgacgaattgaagcaggtccgcttgtttcaaatggtttaattttcacaattctcatctttagaattatgaagaaatgaagggtgaggatgacacggacgaagaagcggcgggagaaattgatgacggttgccaaattgatgtaatttagcaaatttggattaaagcgtgattttcataaaaaatgaagaaaacaaacgttttattatttttgtttatttttcattttataagtcgttttttgcttaaaatcaccaaaggggttcgttaacacggtcagggtcgttttcgcgtggccgttttcgcgtggccattttcgcgtggccgttttcgcgtggggacgttttcgcgtggctggggtacgttttcgcgtggccgttttcgcgtgagtacctgtttagaactcaaattggtcggatttgtgcaaaacttccatgtttcgaattccgaaccagaattcgtacaaatttcttaactttttaattttttttgtttcttgcggctagtatcttctacaataattgatcagtttggtcggatgtgcgtcaaacggaaaaaataattaaaattttctaaaaacacataaatagtataacaaaaaataacaaatttcagaacaaactaaggtcgcatttcatagtttcgtgaaacaccagtgagaaagttgttaacgttttcgggattcacattgacatttgcat

SEQ ID NO: 14809 - DNA, 4436 bp, Heterodera glycines
  unsure (1)..(4436): unsure at all n locations
cgaaagcatgatggttccggaaaacggcaaaaacccgacgttaccgtctcgcagagctcgcggcacggaagcgggaacaaagagcgagacaaaagaaagatgggcatgtgccacaaaagaaaacaaaagaaaaggataccattattaatttggatgacattgattttgattgagtgaagggaagagaggaaaaaacaaagtgaaaaaataaattgaaaataatcaatttagtttcaataatttactaaatctttccaagttctcgtcctttttctaaggtcatactttcttggttccatatccgtttttttattgattttctccgcctcggcttcaatttctggtcttttttccggccctcgggcttggatttggtctaagttctcatcttttcgggactcggggtccatttcattcctaatttcagacctttccgaactgacttcctccacgcttggtgtattttcaaggcacttttgctcttcaattggttgcattggcgtagtgcacggggggcccaaaatttcgaagcactttttgatttgatttaagtgaagtctttttgggatcgaatttggcgaagtgcaactgatcaaagtaacataaatgccctcaattttgatgacccgaaaaattcctcgccacggtaattggaattttttggatgtgccgacccgtccgtcgtagtttctgatcagcactcgatcaccaattgtgatttgttgtggccttgcctttctgtcatattgttccttcatttttcgctgggcttttgcatattcatcagctgcagcgtgccacgcgtgtcttatggcaacgaccagcttctgtttaaattcattacggtccgaaatggctatcggatcacgaactttcggatcaatgatctgatcaacacagaaaattgggtcacgcccaaacataagaaaaaatggagtctcacccgttgaagcatgcactgacgtgttgtagcaaaaattggcagcatccaaaaattcatcgaagtcgggctgagtcttcgaaatgtatttggccaagatgttgtgaaatgtccgaaaagtgcgttcaattgacgcattgccttgactccaatgaggacaggcatactttttgtcaatgtaaagcatggagcaaaattctctgaaaaattcggaggtgaaggcagaggcattatcggtgatcaattcaacacaaccgccgtattttaagtaacaattagtgagaaaggcgtgggcaattgtttgtgcttttgtgtcggggaccgggacagaaatcacgtatttggtgaaccaacaaacgatatttaaaatgtgtttgttccctttttgggtgactggaaaggggccggccaagtccagcccaactttggcaaaaagtgtgttggctggcaccatgagcatctcttcccggtacgcgggtgttggattgtgtctcaattggcaggtgacacacaatttgacccaagttaaacgtcagagtacattttgggccaaaaatattttttgcacttggcaattgttttcctgtaattcaaatgaccaccacccaaaagagacgagtgaaatgattcaaaaatgagtccacgtaacgaaattgggacatatatcctcggagggagtcccttgtcctcaaaataaagaattcccgaaattaatttgtaattggcagtgcctacagcaaataattctttttctttctcatccaaatcagctggaaattccccatccctgacaaacgaaatgtaggccgcggcttcaggatcagctgcttgttctttcaacaaattaacttcgtaagtgtttccatcctcgtgtcggatggtcaaagtatgcaaaaatgggtccgcgaccaccctggaatgtgctgccaaagcgagacagaccggaaattcgataatgtcctcgagttcatccacattgtatatttccgacaagggcttgtcctcagcggcacgagaaagtgcatcagccaaagtgttggcttttcctgccacgtggacaatcttaacttggtagttttgcaattcaatgagccaccgtgccaattgctgattggtttcggatttttttagcaaaaacgcgaggggtttgtgatctgtgtgaagttcaatgtccgacatgaagatgaatggtctgaattcccttaaagcataaataatggcactcatttcaatttgaactgccggccacttcctctcagcagcagagagggtcctgctgcaataggaaatggcagaaaatgtgccagtcacgtcattcttttgcattaaaactcctccttgtccagtcgatgatgcatcagtgaaaatgtgaaatgctttgtcgtaatctggaaaaattagactcggggcttgagtaagtaattcttttatcttgtcgaaagcgttatgctgttccctgccccattcgaatttattgccttgcctcgtaagcttcagcaatggctctacgaccattgcaaagttctcaatgtgccgtctgtaaaagcctgcctgtcctagcactatctttacttccttaacatttaaaggcacaggcatttctttgagaatttcgattcgacttaagcttggcttaaaaccttcagctgttaaaacaaatccaagaaaattcatctcatttgaggcaaaaatgcatttcttcgggctaagtttcagattataaagccgaaaacgctccaaaactttccttaccgccgttaagtgctctgaaaagttcggactttttgtgaaaatgagcacatcatcaacgtaggccaatgaagtatcctccaatccagacaaaacgatagccatggccctcgaaaatgctgcagttgcatttttcagcccaaatggcatcgtaatcatttggtacactttgtcttcagttataattccacatttccttgacgtttcttcactcaatttaatttgaaaatagccactggccaagtcaagagagctgtaaaattggcaatttccaaccctttccatgatgctgtcaaggcgtgggagagggtacttgtcgggcaccgtaacttcgttgagtttgcgaaagtctaaacaaggacgaattccaccgtccttcttctgtacaatgacaattggagttacccatggggtgtcagactcaaccatgactcctgcttctaaaagctgattaatgtgcttcttcaattcctctttgtatttgtacggcattcgtcttggcgcagatgctattggttcctcagttgtggttgtgatgtgatgttcagcggctgtgaaaagtccaagatcgtacctgaatttgctaaaaacatcagaaaattcttcgattaatgccttcagcttttccaaatctttgtctttgaccatggccctagaaaagtcgactacaaatgtggggtcaatttccatttcctttcgttcagaaataagggtaagaatttcttttgtgctgttttcccttaaaagtccatttcggtcacacaacaattcattgacaaaggccaaatgtgttcctttccaaatccattttggttccatggttgggttgaccactgccacttttatttgtttctggcccgcaggcgagacactattaatgactgacagtcccttcttaataagacttatgtcagggcgatcaatgcaaaatgaattttttgggtttggggatgattcgattgaagcatcgaccaatatttgggagtcggcctgaatgagtgtgtttttctctgccgacacgcgcaaatcgttcagtaaaagaatcgaacgatagcacaatttggattagttgtccccaacaaaaaatttcccgtttaaatgatcgaattttattgggggcaatttttcaaagacatcccaaccaaaaattacgctgtaatcccgggctacagtaaattcagaatcatccacaaaataaattattgaccggactgtgtaccctgcaatgttcaaattcacctgagcatattccttgaggcgaatgacatggcctgaggcactcattgcctccaaatcggatgaaaatgtgcgacaattaagttcatctgcaactgatcgcggtgcgacagtcaaactggcgcaagtgtccattaagcagcggacgggtgtggaattaatcaatgtctgtaccacggcgtgatgcggcgaaatcgcattaagatttgggagcattggaaggtctgaattccgttttgaccagagcagtactgtaatagtgacaaaaatcaaaaaaggaataataagcagataaacgattgaaggaggagtgaattgaattgaaatttggttattcacatcaggatttgcaaaagcattgggaagaaaattactaaaagcctaatgagtacttttggcgcccgaaactgaagcgagtcctttttacggtctctttcgtttccctgcatttgatgcctggggtttgngcgggttcatgagcttacgggactgagctccatttcgttaccaa

SEQ ID NO: 14810 - DNA, 3224 bp, Heterodera glycines
  unsure (1)..(3224): unsure at all n locations
tttaattatttaaataattttgctaatttatttttgatatgttcattatcataaaaatatagttggtccagcaagggccagacttcttggcatattgttgtagaatagaaaatggggtaatgaaaattttcttatcatttcgatttaatcctaagattctaaccggcggtaataccgctaaattgttgtgagagatgcataaaaatgctcacagtaagtgcccaattcagctggtttcttgaacaaatctaagaattgaaaattgttcgatgtccttttttctgctgatgaactttaggacaattattgctttaattcttcccttagcttaaacaaattgttttaaacaattagtaatacattaaggtataattaatccgaaaccaccccccaccgattaaactatgttatgtgatatgatatgaatgatgtgctattatacacatatgggttacccatatgttgttgtttttgtttggcgtgggtgaatggagtgatctgtgctgtgatgatgggctgctattgctgcttcgcattctcatcagatggggcttttcctccgacaaaatggaaaaagtggccgccgcttcctcccccccccctcccacaaataacaataattctccaacaagaagcacttttataccacgacatgcgtaaacacacactgattttgtgtttatttttattgcttgtgtgtgcttcttgctgcacaactgctgctttgatgatgatggctatagctaatgcgtgagaaacaaaacaaactcgttgagtttgttgcaaaagcattatccataaaaaaaaattttaagggtaggctttatcattacgaccggcaacttttttaggggatcgccataatctctactgctcgacacttttcgagacctttcaagaaattatgaaaatatgaagaaaagtcattgatacctgattgttccgatttgcagagcccatttggttcaaatttttaagaaaagtccaagtgacacgcaaaaactgcaaaattcaaatctcaaaccattagatcgttttcctatttattctttaatggtttttgaaaaaaacaaaataaataacattaaatgaaaaacatttatgaagaacatgcattccataattttttatttttaaaaatttgttcactcactactaaatatttttaatcacttacctaatttccaagtaacatagattatctcatttttcattattacgtttaattgcctaattagtagggatgcgatttttaggttttaactaaattttttgctcaattgatttgaagaaaggagctcaaaaaacgcatttctgcgttaaaattttttcatttggacgtcacttttcgtcactagaaatcactattttggcgacttcgtcactaaaatagttaaaaatcactattttggcgttttgtcactattttttcactatttcaacattttttggaaaattccttaacaaaaacgcaataaaaccaaaaaatacacccctaagaatcgacctaaaattttttttcaaaaaatacacccctaagaatcgacataaaaattttcaaaaatcactcctaagaaatgaaaaatttttcacaaaattcactttctttgcaaaaatttttaattctaaaaattattttttaggaacctattttgtattttttgccctcaaaaatcccagtcctactcatttgcaactgcaaatagtgaataaaaattatttttgctcaatttttggctgaaaatttgtcactattcgtcactatttcggactttttggcactattttctcactattttggcatttttactcactattttagttaactattttgggatttttcgtcactaaaagtcgcatccctaatcatgatgaattttttttaaataattcagtttgttgtacattcaaaaattataaataaaaaagttaaatttaaaattgataataaattataaaatatattgttgttacgaagattctatacttaaaaactatagaaaataaaaaccatggattaattatgtttttagacgtgacggcagtgggcattatatacagttgaaagcagcaatccaggcggagcatgctttgacgatgctttctgcgaaaaggtgaataaaagaatcacaaatatttgagagcgccaaaaaagccatgccgcgcctgttttgtcggctggcgatgaatccaacggaaagtcaatcgaaagggtaagcgaattggaaactcaaatgaaaacaatgccataaataatactaaacctgttcagcacatctcagcgccatcctccggccaacagcaaatcgtattggacaacccaaaggcaaattcaagaaaagtgcgggaatcgattggcactaacactgcggggaatgcaacggcagaagtgggtagtctcgtaaatgggacggcggacgaagcgatgagcacgacaaccgattcgtaaggggggcagtcccgtggcatgaatgtgcggttacctttgaggttaagttggtttcactgcctatgtcgtattaaagaaattgtaaaataaaaaattcaacgcccaatgacagcatttcaaccgaagccctcggttgtttctggcttattctcctcatcttcttcatagtccttgacttacactgcaaggcaaaagcaacactacaacaaaaaattaagaaaacaaaatgagggtntatatgtaaaatttacagaattcgtgcacaaaaaaaacaaattncttagggtcagattttcgtagttgcacacgcataaaactttagttctaggtttcgcaagaatactaaacagcggaaatacgaggtgcggaccatcttgtccacgacaacatacaggaaggatggacaattgcgacggatcttctatgtgcattggctgggtaaattaatttgtttacaattttacacattttttctaattaaatttattcaggctagagccggaagaaattgctgaaaaactcagaacgaaccttgagtatatttcttgtaagtttttatggggaaattagttatataataataaatttgattgttaagtgatgaatgaattgaggcgcaatgtcgacaataggacgacgccaattgggttttcgtcaaacttggagggcgaagagacaaagcaaaaatttgtaagttttgaaaattaattttcacaattcatttcatttatctcattttatttgtgagttgaaccctactttcgtagaattgtgg

SEQ ID NO: 14811 - DNA, 3822 bp, Heterodera glycines
cttgcaacaaaatatttttttccaattgtaaacacaaatttttttttaggattttcaagtgacattcactggtcattcattgggtggtgcgttggcctcactcgcagcaatgcgaacagtgcttgaaggaatgcggaggtaaaaaaataaattttaaattttaaaattttttcacttttatttttaggagtgatcaaatcaaattgtacacatttggtcagcccagggtgggcaatgtcgaatttgcattcaaacatgatgaactcatccccgagaggtgtggttttttgtgttcaatttcaccaattagcttcataaattttccataaatttgtattattttttgaaatggtttttttagtactaaaatatggtgccgtaaaacagtatttatatgaacattgaaacaaaacttctttacagagtgctgaaaaaatttacggaatttttgtattttgggtttttgtattcgattttcaattaaaaactcgatgatttaatggatcacttacgaatgaccagagaaaccaaaaaaaaacacagcgaaaaatggaccattggggtcactttttcaattggttaaaagatttttcaaaaattacttttaaaaccaaataaaaaattatcaaccggtttataatggtcagaaatgttcattgaaaagactggtgaagtaaaatcagcgaaaaattttgaaaattaatattcccaaaatataaaaattctgtgtctttttccgcaccattagttgccaaaaatttgtcaataaaattattggttcattatttgggtttttgtcagtttccgtgttgttttccgcatggacattgtggcacatatgcctccatgtgccaaaaatcagcattacgagggtgtggacgaaaaagatgacagcaaaccgtgtgatccatctgcttctaatggcattgcatatcatcatggaacagaaatttggtaataccaaaataccgccaaattgtaattaattatttgttatttgctattgaccggatatatattaatttaaggtatcgaataattttttaaattcaattatgatttaataaattgatgtttttatattcctttaattttaagaaaacaaattaattcgtttgtttatattcgaaattttaaaaaatttaaataacactgtaaaacatcataacttactgtaaggtacccgtacggaatggaccctggcgatccgtattttgaatgtgttggctcaccacgggacgaagacttccactgcagcgattcgatgtcctttgaaatgtccaaatactccatttacatttcggaccatcgtcattattttggacacaaagtgtgtatatgcagatttaaaaattaaaagcatttaaaagctttttataattaaaatatttatctttttttagacttttaaatgtcacaaaaattattttaactttatattaaaaaccaattttattgattcggtttttatgaaatatttatgaattagacaaataatttaaaatctgttgggatgcgctaaatgtctaaatatccatattttattatttattttttaggttcctgcctggggcaaacttggatgcccgtcaaactcgcgcgggttggaagcattgcacagtgagccaacagatgaagccaacagtgccgagggcgggggcatttttcaaaaattgtctcaaaagttcagatcgatcggcagaatatttggcagtctcttttgatttattaaaattgacattgttttaattttgaaatatctcaaattaaaatcataaaatttatgtaatattttggaaaataataaataaatttaaatatctttaattaaatgaaattattttgagcgcaataaatggtaccggaagccatgcaagagaaattacagtactcatgtgttttttagttcttggtaattcttttcgacatttattcgggtttataaaatgtcttattaattccattggtaggaagccacttacaaaagaaattacagtataccaagtgtttttgagttcttgataattccattcgacatttattcggtataaaatatcttattaattccatctaattataaataagtattcactttttacacaattcaactttacattgctcaattccacaaacacacagtatcactgccgcattttcgcttttcccattttggcactgatttttaatatttcactaaattcaaaaaaaaaaaatttgacacaaatttctctttcgtaaggtttcttttttgtccatccctttctttattcatcgcttttacattttgtcaccctatcaaataaattttcttgcttgcatattaagctttttgctgattcattacttttttctgcttccattttttcctccgttggccgtctttttaagtcatcttctgccgccgatggcgaaacaaatatttcttcttttcctcacattctatcattcatatatgtacataaaattgtaattttatttatttatttaaatttttatttatttatttttctttttttagcaaaaatgttccaatttttcattttttccacccttttttgccttgtttgtgtggcttatgccgtcccagctgaaaatgtaggttcaattgtttggaagagcaattaaatatttaattatgtggttaatttgcttcaaggaggagcgtttctgccactcgatggcagacaattcggtctacaaatgtgtccactgcaatgatcctaaacaagagaaaatttgtaagtttggctaattttaccaattaaaaatttaatcggagaaaaaataattctgaaaaattctcctaattataacgattttatgccaaataatctttaatatctgaaccaaaaagggatttttatgactttagtaggacactgataaaaattgtggtcacaaaatttagcatgattatcactaatttaaatgattatttggcacattaagctgctatatgtgagcgatgacacaggctgcgtgttctaattaatatttcattttaaaataattcaaattctctaagaaaaaaattttaggcgtcaatctgcgcacgcttttcgaaacggtttcggtgagtgccaaatcagagacgcgtctgactttgacgacggaaagtgacaaaacggagactctgccgccatgcatcgaatttgttcaaactgaaaccaatgcccaattgaatcatcgctctacgattaaggcaaagacggaggccaacaaagtcgacggtgcagatggtgaacatgtgcaaattgctgtaatcgtaagtttgagattattagttaaatgatcatattcgggttactgtatttccttccctaatacagtaattaaataaacagaaggaaaccagcaaagtcgacaacaattccgctgctgctaataatgacaaacagctgccagttgctgtggtggtgagttatttagaaattgtatgaattgctatatgaaaccgtaccgggtacgacagaccattgatactgtacattatttctatctgattatgtttgccttgaaaaaatgcccacgagtctagtaaaacaagagttttggtcatatttgagctgtcataatgatacatgtcagaaagctagtccggaatttgtttattaaagtctcgctatacccggtatggtactggattttaggcctaaaaaccaggaactttttgagactggccgggattctgtatttcaaattagggttaagccccgaccagagctgggcgaagctcggcttagcactcgaagccgaaggcgaagcccaaaaaacccgaagttttcgaagccgaagccgaagttttttcaaaattttttttta

SEQ ID NO: 14812 - DNA, 3818 bp, Heterodera glycines
tttaaaactgtattaattcatgaaaacagtatgtgtatttacgagttgtgctttgagtgcgacgtagaaagaagcgcccgacatcagaattgggtccaaatgcctccgctccacggtcgatctcgaattgagttgtgccaatataggttttgccaaaatacgccagtcatccttgaactccaaggggtgccgcgttgacaataattgaaaaagcgtgccgaacgtaaactggcggaatgagtgccaaagaaagaactgatctgatttgtaaaaataaaaaacactttgaattaataaaggacacctggatgttttgtttaaaaaaggacataagtataggtaggcttgccttgctatgactgaaaatcaggacaacatcagattgtccagtcctcacttcacggctgtcataaatgaggacggactcatcattctttatcaaaagaccaggcggaatttgtatgttcagtggatcggcacggttgacaccaccaacgaatttgttctttgttctaaatattgcgtcattattttctctgaattttgtctacctgttcgccatttggtcgagcgcttcattgctgccgagcaattcgaagacttcatcgtcgatgtcagtccgaatttgacatggtttcgtttttggctcctccttgatcaggcgcttcatctgatttcgtttcgtctctgcatcataacgcgatggtgcgcaaccatggtgatgtccttttgcgcccaaaatgcctgtcatcaaatcgttgtcttctaatttggctgtcgctggacaattgcgctgttcgcacctgaaccagctaccatcttttctgtttttgataaatcgaaagcctgaaaataaagaaatacaaataaaaaaaaactattaacaccttgataccaaagacaaagagctcccaggattgtttctccacgtttgaattgaacgggctcacaattttcttcgtcatcactcgaagcgacgtccaaattgttcctggttgaagtgccttcaatttgttgttctgcgtctgtcctctcaacattcagtacgctgtcttcatttgtagcaatgcgaggctttttttactcgcttttgcagactcttaagtatttcgcgaacagttggcatttcttattagaatctgaaatttctttgtttttgaagaaaatttgaaatgacataaaaatgaaatgaatgatttatttgatgcaaaaacattatagatattgtatattctctctttttattttctcattggcattatgtatttccaataggcgaaatgaatgtttctggcttagtaggcgaaatgaatgtttttggtttggtaggcgaaatgaatgtttttggtttggtaggcgaaataaatagtaggcgaaatgtcagtaggcgaaatgaatagtaggcgaaatgacagtaggcgaaatgtccggttttgggttagtaggcgaaatgaatgtttttggcttagtaggcgaaatgtcgagtaggcgaaatgtcatgtagccgtcctgaaagcatccaacaaaacgaatatgtaatagaaactgagcaattttcgagccaattttcacacatgggaatgatatccaataaaaaagacactggaaaaattagtcgaaatcaaatgacagaggaacaacgacaaattatcatggcaaaaaacgcaatcgccgcaaaaacatatagaaaaaaagtaaaaaacgtagattttttgcttttgcaagcgtctgaacaaaacacttataatgttgaattgtatgaacttagtgaatttaaagtaaagtgtaagcattgtccggctatacatttttcagaagaagaaagtaagacaagcggtgccaatgaattttttgattgttgcaattatggcaaactatgtattttagaagaactaatccaggagtatccaatagaactaagaatattatttcagcctgagcttgacaaaaataattatacaaagattggagaaatgcaccaagattttctaaaaaatataaggatgttgaattcttctttttgctgcgcttctttaggttgtatgaaatttaaattcccggataaaaatattccaatttttaaaatacaaggcggtatatatcactcatataacacatttgctcaaccagataataacgagttaccaatgaatggtcagttatattttatagatactgatcaagcaatggattatcgaataaatgcgttaaataaaaaagtggtaggagatgataaaattattgcattaatagcatatattgaatcttatctacgccaaaattatgtttattcacaagcatacgaaatgatgaaggatgtatatgaaaatgtattaaaagaagccaaaaatgatgctattcctgaacttacgatggtgtttgatgttagaaaagatgttgatttgagacgttataacattccaaggtcaaatgaagtttgtgctattatttggcgtgatgcaaatgacgatataccagcagctaatgttgtagtgcatacaaaaggcaataaaaaactagaaacaatctttcctttaagtccattggttgagccaatgtgttacccaatcttttacccaaataattaccaaggatggaatcatactttaaaaaactctgaaaacaaaaaaatatcgttgtgttattttactaaatataaattattttttcgtgaaaatgggaagtttttgcctcatcattatagtggtaaattatttcaacaatggattgtcgaccaagcagcaagggttgaatgggataggttaaattatattaagcaacatcaaaaagaaatatgcaaagaaacatataacgcaatagataaatttttatttgcaaaagcaactgaagatggtgttcatgttaaaaagaaaattattctgccttcgtcgtttactggtggaccaagaaatatgtatgagagtttcagatcggatattgttgcaagagtgttttatttaaaaataacccaatttttaaaagaaataattgatggtcaaatatttggaagagtttcggggttttgttattcaattgagtttcaaaagaggggtcttccacaccttcatatgttattaactttagatggtttaaataaatggaaagaaacagatgacattgataaatttatatctgctgaaattccagacaaatgccatgatgaaattttatatgagttggttacaacattaatgacccatggtccgtgtgggcaagattttcctaatgctgtttgctggtgtcagaaaaaaaataaatgtaataaaaaattccctaaaaattatcgtgaaaaaactgaaataaatgaaaatggttatcctttgtataaacgaccaaacaatggaaaaacattcttaaaaaaggattggaaaacagggaaaagtatgtctatgacgaatcgtgatatagttccctataaccggtatttacttaaaagattccaagcacatataaatgtagaaaaagtggccgacattaaagctgtaaaatatatttacaaatatatttttaaaggttatgacgcagcaaccgtacgttgtgtaacgagtgggaacgaaaatgtaaaagaattagtttatgatgaagctggctcttttcttgatgcacgttatctgagcccagtcgaagcctgctggaaaatttttaaatttcctttgcaagggaaatctcattcggttcaaagattacctgtgcacttagaaaacgaacaaattatattttttgatgaaaatgatgaggaggaaactattatagagaaaagtggtaaaaagagtaaactaatggcatatttttcttattataaggaaaacccaaacgca

SEQ ID NO: 14813 - DNA, 2349 bp, Heterodera glycines
  unsure (1)..(2349): unsure at all n locations
ctaanttaattgctgttaaattaatgaaagaattgaaaccctttttaaacaaatttaaaatgtaattgattttcaattccaaggaaaataattgaaaatttaacgaaaaatcaccaggaaaatgaaaaattacaaaaatggggaggaaattatttttttatttatgtatttttttcttttctttttgacaacaaacatttgaccaaaagagttgtcattttaaacgcaatccaagcaaaaaatacgaatgaaacagcgaagagaggaacatcgacggagtaaaaggcgaggaggccgagctggtcatcccagggcaagttcagctcgttcaattccccaaattgggcggcaaattcgacccatcggaccaatttgtctttgggctcaaagggcgtcagttggaatttgcgctttaaaatttgcgcattccgacggaaggacggattacggagaatctgaaatttacctgctgaaaacatttaagggttccgaattgaccttgtcaagtgaggcgaagaacacttcgtccgccgcctcccccctcaaagcgtttacgtccaattttatgccgacgcccttttgctcggccaaaattgcgttgtgaagttggtccccgaataaaggaatggccaaaaccggcaccccggcacgcacagactccgtcacactgttcagcccgcaatgggtgacgaaggcacgcgtatttggatgcacttttaaaaaaagtaatgtaaaaatatttacaactaattaatcattaatgcactgacataaaattgctttttggtcggtccatttcattgtgtgaacatttcgatatttggcaaacacttttgtgtcctcttctgttaattcgaatttccaaatgaattcgacctcagagaactgttccattgcgtttagaaaggccattttcattttggagggcattaattgggcatttgtgaatgatccgaacgatacaaaaacggcgccagattttgcattgtccaatagccgactcatattcttagaaaataaatattttaaggattaaaacgcaatttgtgccctggcccaggcacccaaattgtacgctttttcctcaaaatccattataacttttctcaaaaacaacaaaaccaataaattacactgacgtgcgttgattaaaatgaattgggtgccgggtttctttctttttgaattgaactgacagagtccaacgctttttgtcccatttcgaccattcccccgacatttatcactttgttcgaaattggccttggaaattcgaagaactgaaaattaaaatgatgaaattttgaaaaataatactttgaatattaacctcatttgtattaacaaatatcagggaaatatttcttgcaatttcgtccattgttggaaaattttcaccaaaagcacgtcgtacaatttcttcctttaacttttttatgattaatttgcaattttaaactgccaaaattaaaaataaataaatgtgaagcgacgaattaaaaagtcacctcaaatttgattggtaactcataaagataagcccaattgtaaaaagcattgaagaaattgatcattcgcgagacgaaaggcatcggcggaattccgtcagcagttgaaaatatatccaaaaagatttaaaaataataaaatatataaatgaatgaatgaaataataaatgtctatttggggatgccatttttccatgattaattttcccaatttttcttaacttttgccaccgtttctccgtttccctccctttatgcttttgcttaccttgcacatagctggcaaaagtcggaatgccaaagcgatgtgccgtcatttgaaaaagcggcgccgcaagcgccgccaatttcgtttttgccccaattcgatggaacatagcgaaggggcaaatgtcatacaattcggaaattgcgacatcgaaattttcggcctctaatcgactgatcagctgatcattccacgtcaattcttagcaggaaggcatttaaattgaatggcatttaaaataaataattatttttcaatttaattgtttaatattttcaattacctttgcaagtgtttgaacacaaattcaagaagttttcccagatttgctttaaataatttatattggtttaattaaattggtaactttttcatcaaaacgaaccgtttgccaaatgaaagtggcgaattgtttgccgtcgaacggatcatttagcaaactaatttgctgaatgctaatggaattttcagcaaatatttgacgaatgtcgtgaattgtttgcactttgtgcacttcttttggccattgaattgtaaaattatttggaatcaatcgcataaaatgcttaata

SEQ ID NO: 14814 - DNA, 1603 bp, Heterodera glycines
  unsure (1)..(1603): unsure at all n locations
ccccccccccccccccccccctccacgtcatgcncgcgtcagccaaagtgtccgcaattgtgcccatgaattgcatgtgactccatgtcaaagtcggcgaatacaccaacacttttcagccgtttttttggcacttcagcgaatgcgccgaaaagtgaaagaaatgccaattttaatattagcaatgaaaagaaatccatcggatgagatgtaataatcagctaaagcggattaatttaccatttttttattaagagatgattcaaaattaaaaaattattaactaacattgaacagcgtacaatttttgtgataatgtcaaacccatccgagtgatgattgttctgtttgattgttaatcggctcttcgatttcacttttttttcgtccgtcattcacttaatttcttcttatcttttcatgttcgtttatttttcttttttttttgttcggagtttgtttttgtcttttaattaattaaggaatttcgaattaatttataattttgaatttattctgctgaaccttcttattcacattgaaaaagcgacaattgcgaattaaaaaattagattaacaaaagaaataataaggactatttgcgcatcagcagaaaattacaaagccaaagagacaatcaaatgatttaattaatgattaatgctaaatatggcaaattttgtaaattcaatcgtcgaagttttctgattgatacaaaaatgcaaattcaagaagaaaaaaaagtgggaggcggtgggcattggcatttcatttgcacctttccccgtggacagggcaatatttacaagaaaatacgaatcttttacttccgccttcctttggttgccaccaaacatcgcctaaggcagcaaccaattaattaacgaacgaacgaacggatcgaaacggaacggacggacggacaagtgggaaaagccaagccaaaaagagaatgatggttggtttatccaatatcattcatcattgtttgttttgtcagcaatcaatcacttttaaaaaactcaaaatcataatgatccctcccctctccttttccacgtgttctctgttcattcgaacgcctttttcccctatatttgctaattcgtagaaacagtggaggcaaaatggcaaatttaaagtaaagcaaaaataatataattttgaaatggaaaaagaaaatttaatttaaattaaaaaaaaaacctttagcaaaactaaattatcaagaggaatcaaatgctgatcagcagcgacaattctgttggaatatcagaaaccgcggaacttttttgtcagtcaaattctgacaatgatacattttgccaatttcaaaccgccaatgccaatggaccgaatgccaaacgctcatcttcgcagccttcttccagcggcaccattggtaatcatttatatttaaatatatatttaaaatttaataaataccattcctgcaattaagaatatttgtttgaatttcattttctttttcttcagattgcgtcgtctgtggagcccgagagcttcgggtgtgcattacatggtttggtcttgcaacggatgcaaaacattttttcgccngtgcgataatgagaggtgaagc

SEQ ID NO: 14815 - DNA, 2853 bp, Heterodera glycines
ccttcaccgccccccccccctcccccaagggcgtagcgagggggggggaaagccctcccctccgcccgaaactgaaaaatgaacatttttaatgagtaaactattttcttaaggaatttctcaaaatttccttaaaaatttcaaagtagactcaaaaatcgccaagtagccccatagctgaagccaaggatctggctacgccctcccccccctaattcgtccaccgtcctctcatcccttctccctttttcagattggaattggcaggcgccgccggcggttcttttctgacaaggcaaagctcgtggggcaatttgttagtggcaaatgtgcgattggaggcgggcaaagaaattggcgttcggttgggagggcggggcgaatgtttgtgcgatgaaacggccacagtcatttccagtgaaagtgccaaattggtcagtgccattcccccaatttggcccctggcatttccccttcagcaaaatgttctctgttctcgccctttggcactttcccctgagggcttcgctttttctgccgaccaattgccgggctgtggtggtggcggagcgagtcttttcttttatggacgaaatttggtggcaatcgctggcggcggaggcggcgattttcccacgcaaacttccgggtaattttcaacttattttagcattttgattttaattttaccaatttagcgatttggcaagcaaacggcgcgtgtcggggcgcggcgtttccctggggaaaggcgccggtgccaattcaaatgcttcagcaaatgatggctgtgagggcgcagaatgcatcgacggacatatttttggggataatttgagcgatattcgcgccggaaaatgcccgcaggggacaaaatgggcacacaacgggggaaaaggcgggggagggtcagttcatttgtggccaatcaaacgaagtgcagaattggaatttagcgcgagttgtggccccggaggcggtggcggcgggggcttcaaaggtaccgccgcaaatggcacctcaaacggcatcattcggactatttgaatttcaattttaggtggcgatggcattttgctgggcccgggtcagcccggctcctcccttctcctgctgttcccctcttccgtccaccgaatcgtcgtccccaatgccaaccctgggcctggtcgtctgcttcttctggcttgtcctcaggcgctttgtccttcgtcttccaattgttcattcgctccgcctcaatccaaaattgccccgcaggcattttgcatttgcgctgggggatataaagtgccattgaatggttcttgtgtcgagtgtaagtcttagcgcagcgtgccattggccattgctttgtcggttcagtgccctcccttctcgaccggctgctccccccacatgatcaggtcccgccgatgcttctcttctgtaagccttttctttcctcgtctgtctctgtactgtctcgtccctctctttttctcagcctctcttctcctcgtgctcctttccgctcttctctcacttctctgctgtgtccaattgtgccgtcgctcaaaatcctccacccattgcaccgatgtgcacgaacttatggctatcgcagcggaggcgggagggccggtggtgtcggatggacgcggcggacattgcggtggcaatcggatcagcgggttcgctaattggtcatttgagtgccattccaaaaccaaatcatttaattggccatttgattgtccattccaaaaccaaatcatttaattggccatttgattgtccattccaaaaccaaatcatttaattggccatttgattgtccattccaaaaccaaatcatttaattggccatttgattgtccattccaaaaccaaatcatttaattggccatttgattgtccattccaaaaccaaatcatttaattggccatttgattgtccattccaaaaccaaatcatttaattggccatttgattgtccattccaaaaccaaatcatttaattggccatttgattgtccattccaaaaccaaatcatttaattggccatttgattgtccattccaaaaccaaatcatttaattggccatttgattgtccattccaaaaccaaatcatttaattggccatttgattgtccattccaaaaccaaatcatttaattggccatttgattgtccattccaaaaccaaatcatttaattggccatttgattgtccattccaaaaccaaatcaaatcatttgtctttccttcggtcgctcatcaaatgccattctccactttcattaagcaatcccatttatgagccccttttgttgtcgtcgttgcctcaaattccacggcatttgctacgcactgaaaagttcgctttgcttttaaatgcccaaatcgctgctgcttaatcattcagaagcattggccacggtgcatttggcgaagtgttcgaaggatatttgaccgatgcgacgggttcatcaataaaagttgccataaagtcacttccggtggagtcggcgcgagactttagcgatgattttgagacggaagcgcggctgctcaggtaatcccttcacaaatcggaccaaattgcatttttaagccaattcaaacacgaaaacatcgtcaaatttttcggcgtctcctttgaacaacagcccaaattcattgtgctcgagtttctcgagggcggagaccttaagaatttcttacgggaaaatcgcccccggcaggtaaactcctctctctcacctctctgcccctatttcctccccccacccccccccctctctctctttatctctctctctctctctctttatctctctctctttctcctccccccccctctctc

SEQ ID NO: 14816 - DNA, 3058 bp, Heterodera glycines
gattcacgggaagaaataatagttagtcccttttgtgaattttttagaaatttttcccgtcaatcggctttttggaattttaatgagtaaatcagtaaccgtaaatgacatttttatgcttctcttgttggatacacgggaataaataatagttagtccttttgttgaatttttagaaattctatccgtccaatcggcttttggaattttaatgagtaaatcaggaaccgtaaatgacattctatgcttctcttgttggatacacgggaagaaataatagttagtccttttgttgaatttttagaaattctatccgtcaaatcggcttttggaattttaatgagtaaatcaggaaccgtaaatgacattctatgcttctcttgttggatacacgggaagaaataatagttagtccttttgttgaatttttagaaattttatccgtcaaatcagcttttggaattttaatgagtaaatcaggaaccgtaaatgacattctatgcttctcttgtttgatacaccggaagaaataatagttagtccttttgttgaatttttagaaattttatccgtcaaatcggcttttggaattttaatgagtaaatcaggaaccgtaaatgacattctatgcttctcttgttggatacacgggaagaaataatagttagtccttttgttgaatttttagaaattttatccgtcaaatcggcttctggaattttaatgagtaaatcaggaaccgtaaatgaaattctctgcttctcttgttggatacacgggaagaaataattgttagtccttttgttgaatttttagaaattctatccgtcatatcggcttttggaattttaatgagtaaatcagtaaccgtaaatgacattctatgcttctcttgttggatacacgggaagaaataatagttagtccttttgttgaatttttagaaattctatccgtcaaatcggcttttggaatttttatgagtaaatcagtaaccgtaaatgacattctatgcttctcttgttggatacacgggaagaaataatagttagtccttttgttgaattttttgaaattcaatccgtcatatcggcttttggaattttaatgagtaaatcaggaaccgtaaatgacattctatgcttctcttgttggatacacgggaagaaataatagttagtccttttgttgaatttttagaaattttatccgtcaaatcggcttttggaattttaatgagtaaatcagtagcgggtacgtgaaccgtcggctatttagctggtaaaaagcgcttcgcgctttgggagcttcgctacctaggctgtgaagcgattcaaattgatcgaattggttggagagattttttgaatttttaaaaaaattattagaggtttttagtccacattgaggctcaagacgggcgcttcgcgcccgttttttaaatttgttgaactcatacgggcgtttcgcgcccgttttttagcttgttaggcgcttcgcgcccgtttttcaatttttgttggccttggacaggcgcttcgcgcccgttttttaaatctgttgaacttatacgggcgcttagcgcccgttttttagctggccttggacgggcgcttcgcgcccgtttttcaaattttgttggccttggacgggcgcttcgcgcccgtttttaaactttgttgggctttgacggccgcttcgcggccgttattaaattttagaacagatacaaaagtgattagaagaggtacaacattggtcagaagaggtacaacggtgattagaagaggtacaactgtgatcagaagaggtacaacagtgatcagaagaggcaaaacaaatgtgttaataattttttaaaaattaaaaaatggtagttattaattaaaaacaacgttggaaatttattcatttaatttgaaattaaatgaatttttttacaaattcaaaaaataaataatgaaattctttaattaaaaaaaataaataaatttaaataatttataaaaaatatttgaaattaataaaacatgtaaaagcaatcaaaaaatacaaagaaaaataatgtacaccgcccggcttcgaacttggcccccccctcaaaatgatgcctcagaatccccaatcacacagggattctgaggtcttgactatgtcaaaagtacaatctgttacgtattcgtgatcagcaccctcaaatagccctaatgacatgttttttgaagatatttggtgaaaaaatttttcaactcaaaaatcctatgctcacccctttggtcccgaatctcaaaatcacttttatttttataaaaattcttaaaaaagtgataaaaatgccaaataaaatttatattatagagaaaaaaattgcggatttttgtagtattttacttttcccgaatagcttttcagaaggcagctacgaatttttttctgaaaaatcgaaaatttccagaaattctgaaataacttttttcttttttgaaataaaaaactcaaataaatcccataaaattctccttatttttctctatttttaaagctttattatagttaaatcgatgaaaccatcaccgagttatgaattttccaatattaacccaaatttccaagggccaaaaaattgccaaaaaataaagaatttttaaaaaattccaaaaattatgaaacttaaaatagacattatattcgtactcagcaccttattttaccccagaaaaatatttttcacccccattttcgtccgaaaaaaaatttccgaaaatttctagggggcctagctcgaaaatttttgaaattttccagtcattaagcacaccattcgatagcatttaaaattctctacaaaaatgttctaatacaatttttcgttaaaaccaacccctgacgagttatgggcccaggactcaaatgtcccgctgaggccaaaatttttttctatttccgggaaaaaatcgaaatttttccgaaaaaaataccagtcgatagagctcgaaaaactatgttttggaagtggtctccgttttgcccagaaaattcgttaaaaaatcctaaaatt

SEQ ID NO: 14817 - DNA, 1426 bp, Heterodera glycines
  unsure (1)..(1426): unsure at all n locations
ttaaatttaaatntctgaattataattaattacatatttaaaatttataaatactatttttcatgaatatgattttgaaaaaatttaacaattttttttccttataatttcacagacctctggtcaactcaatagagtctgagcaagcgctatatttgaattatttgtattcgtgccaaaaaatctttccttttttggacatttcgctttttattttactaagtaaagcagccttgcaaaatgaatgtatgttttatataaatcactaaattctatttgtttttcacagttccctccggcgttctgacaatggaagaatttgtcggcatttaccaattcaattctcatccgaatctcagcggtgtgcccgggctttatccattgaaatttccaagccacgcgcggatttccgattggaacaagccgaatgtgaacagagggacattggcgatggaaattaagaaattgtcagaatttgctcgagagaaagaggggactagccgattcagtgatgctgtgccaataaaaggatttcagtggaaaatatgggcacagataaggacgaaaaaggacagcactgagaaatggctgggctttattcttaagtgcgatgcttcaaaagaaggtgggatcaaaataaaatttacagatcccattgcgaggtatttcacatagaagttgtgtttttctgattaaatcgtattttctatacaaaagcaggcacagaacaaacaatacagggccgaatgcaagaatacgacaaaatttagtaatatattttttggaattcagatgaaaattggaattgcatttgttcggcaacatttcgaattgtttcgcaaatgcgaggcactgaagatttaattggaaagtgcaatgaccacttttttaacattaaaataggcatctgcggtttccacggtttcatcacttttgaagtgagcggcaaatttggaatgccttttaaatggtttttgttaattaagcaattaatggacccaagcagaggattgtatgacaaaaatgaggacaaagtgacattgaccattgatattgctgtggaagatcaaaaatcgaagaaattcgattcggacccaaacaaaccaaacggaaaaattgtaatggaaattggaaaattgtcggaatttgcgcgagagatttttctcagcgaacggagcagcgaacccgtgataattaagggtttaccatggaaaatattgacattgataaatatgaagaaagacagcacagaaaaaagtttgggctttttccttcgatgcactgccccaagggaagggtgggataattaatgacaattaagattaattggtagaattanaattaagatgaaaattggaactgcttgtgttcagctacacttcgaattgtttctcaaaatagcgaaacggaggatttatttgggaaa

SEQ ID NO: 14818 - DNA, 2665 bp, Heterodera glycines
  unsure (1)..(2665): unsure at all n locations
gtgatgaaattgaaaaatgtcggaattgcgcgagagattttgagagtgaacggctcagcgaaggcgcacanatgcagcgatttctntgggctgtatgggcaagtctaaatacggcggaaggcaccactgaaaaatgtttggtcttttgccttttgtgcggtgctcaaacaaaaggtgggcataaaataccatgaaaatagaaaacctttaaatattttgcaaaatctgaattttaatttttttaaaattattgttgaaaaattaagtgccctcggggtttaatttagaaataccataatctaattgttattaagatgaaaatgggagctgcaaagttacggcaacccttcgaatagtctcaaaaaaaggcgaagcggaggatttcaccggcaaattaaatgatcaaatttttgacaataaattggtcattttttctatcggtcatattactttgacggtgagtgaaataattaactgtttttaattgtttaacataaaataattaagcaattaatggaccaaaacagaggattttatgacaaagacgaggacaaggtgactgtgaccgtggaaatcactgtggaagaggagaaaaaagggacgaagcgtaaattgccggatgagtaaaagcatcaaaatcaatttatttgtttaataaggcatttttcttgcaattattcctccttttgtatttaattacttttcaaaaaccgcttgtttttgtaattttaattggtactttccttccccttacgatattcatctcaaaaattggctttttctagaacaatttgtttgtttaacttcataaattcaccacccaagcaaatgataaggccatggacaaaaaaatgttattttaaaagacaaaaaaatgagacatttgaattaataatttttctcagtttcctaggccataactttttttttcttaatttggcattacatatattcttggtatcaaaccaaagcttaatgtctcaataatttacaatgagaaaacacaaattcaactttttatctattgccttgagatcagaatttaattatacaaaactctatagaatttaatcttccgattgatacccaataatgagaaattgacgaagaaaaaaagctatggcctaagaaactgagaacggttcactgatcggacgcataaactaaagtagagcccaatttttgccagtaataaattaaataaaaaattgggatggcgcgccggggactcgtttacggcggggattggaaaaacggggacggggttcaaatcccggtgatccccccgccccccatcaccatgcaatcctaattttaatgttcttcgttctgtttcaaaaagacatatacccttccaaatcttccagaatttttattgtttgcaaaattactggttgcactgtataatgggggaaatccttttataaggtataattaatacataatgtgtactttctcagtgttccaatcggcagagttcggttaggaggacatttcggagttggacattcttctgttaaatgtgcaatttttattaaattacacggaatatttaaatctcttcctcgaaaccttaacaattattattaggaaaataattgttttgtttgtgtaatcgaatttgccacttttacatttaattttttgaccggattatctcaaaattcctaaaaaatgcggctgctatcctcaatttaaagttgctaaatgcattgatcagttttattccagtaattttagtgccatgccaccatcgcttttgtgcatttttatgcctttaatccctttttcaaaaatcagtcattttcacaccaattttagccaaattccaaaaatgttttgctaatccaaatgagcctttatcacattttcctcttcgtagctttcttttatgccaacgttctcttccgagtgccgtcgtcctaatgctaattacttctcttttttgcgcacgccgccgcattcgccggagggagcaaaagcgcgcggcaaaagacggcaccgccggcacaccattggtgccatttttgtcttcatttttgccttggcccagccataaatgagtgcacttttaaccctcccgcaggggtaattttgaatattcatcaataaatttatgcttatggactagttttatgtaaatttaaaattctatgaaagcataggcaaactccggcactgattataaaatagggcaaatgtttgtctgttttctgtttgatttaaattcaagaaaaatgtatggaggcagtgaaaatcagttgtgatgctccagggttcccgactcagaattttttgggtccccggtgatttgccggtctcggtcggctcccaattcccgtgtaaaatcctttcgctcacatcactaataagctgcaaaacgacaaaatgattttattattttttacattttttcgaaccaatgatttagttgaattcaaaatattcctttgcattttgcaaataattagataaaaaagtttttatgttacttttgtttaaaaattgaattcttttctaattaatccttgaaattttcgaaattttttgtttctttcctgtctacgaacaaaattaaacaatgtacctgacaaatgaggcacaaattccttttacaattgattgcttctgctctggatattgtcctacattttcccgattgtat

SEQ ID NO: 14819 - DNA, 2015 bp, Heterodera glycines
  unsure (1)..(2015): unsure at all n locations
catagtaaattattattttaccgaattccgctttttcatttttggcgtcaaaacggaacattgccgcaaaaacttcagaagtgtgcttcaaaatcagtttatgggctgacaaaagctgaaaggattaaaatgtaagtaaaaaatcaaacaaaaaaaaaagaaagaaaaatttactaaaattaattaattaaaattttaaatttgaatttcgcctctttttcgtcttcgtcgcccaccaaaaaataaacatccgcgtcctcacccgagctcaacaaatgcttcatcagttgaatcacttgattggacattataatcaattgtacttttgtaatttgatctaattgtgaaaaataattggaaaataagtgaaatattgtaataattcaaattagcaaaaaactaaaataccggcagaatccttagaatttgttaaaactttttaattattttccttttaattatttttttttaaatttctgttccactagactaatccagcagtaggttaatcatcaaaaatacccaagcccacccataacaacgaatgagtgaatgttgaaggctacaattttgatggaagctttcaaaatcaatcaaaatcccatcatcttccatccaaagtcaatcaaaacaaaaatatgcaaatactggcaatagcgtcagaagaatgaaataagtttgttgttcctccgcattttacccttttttcatcgctttgcccctgctgtaaaaaaaagttgatccaaatcaatgcaaatgtaaacaaaaaagggttttcatcaaaacaaacaaattggaatgcatatacacgtacacctgtctttaaaaagaagttgtgcagtaagttcccccccccccccgagaaattaaaaaaataaaattttttactaacttagaaacttttcaagaaaaaaatctagagttttttttttaatagaaaattctaagattttttgagaaatttcagcgatttttggaaaattttttgaaaaatcttactatttcatcataaaaatttatcaaaaaattctttcttaaaattttcttataaaaaacctttcgaagacttttttcttgaaaaatttctaagttagtaaattttttaaaaagatttctcccgggggaaacgatgcggggggggggacgagctgctccgaaaaagtatgtttaattttaatgttaataancagataatttnagactagaaaaaaacagaaaatttattttttagattagcgttttattcgttaagtttttgtcaataaaaaaaactgaaaaggatataagagattatgattagtagggaacggatttttaagcgcgaaaaagtccaaaataaggccttaaataagtgcgaaaaatcgcgaaataagtgcgaaaataagctcgaaaaaattccaaatttaggggtataattttttaaattgctgttttttatatgaaaataatttaaattaaggaaaacaattttatttattgactacatacagttgcaaataattaaatatacaaaataagcatttctaagttcgaataagtgcgttaaaacacaaaattttcgaacaaaaaatgtgtttttcgtacatttctcgtcgagttaaagccgcacatggacggtaaaaaagaaaaaaaagcggcaataaatcttttttatggataattatgggaaaaaattggcgttctgtcacatttactttttatctttatttctctcacttttacgtactatctcttcattcttaataatgtaaagaacaacatttacttcatcctgtttaacttttttcctacttgttaaatccacaccaaattttacatatcgatagagaaaaaaattctgcatcgattcatctgttattttttgattctatctgttagtttatgaattatttaatcattaataacaaattatccaattatagcttttatggataatataaagcaaaatttaagaactaaaaacgcatgacaacaacgtgggacagcccaagggagaggagagaaaggcgcagacg

SEQ ID NO: 14820 - DNA, 2008 bp, Heterodera glycines
acggctacccgacatttgaggacttgacatttgaggacccgacatttgaggacccgacttttgaggatttgacatttgaggacccgacttttgcggatattcccgacatttgaggacccgatttttgaggacccgacatttgaggatatacacaatttcaaaaaaaaatgaaattaaatcattataaaaaagagaaaaggcctttcccaagggccaacgggtgcaatgtatcaaaaagcattaaggacaaccgaataatttaaatatttacagcacaaataatgctttcaaatttaattttggagattaacagcctttttctttcttaatgatttacaagtcatcctaatattcaatttgctcagactaacagcaattgaacacgatataaattataccagctgggaagctcctgtcaatctttgatcattttggatcgcatttaactagagtgccacgggaccgggaccgggccgggaattcccggtcattcgaggtcccggtcccggttcccggaatttgaaaagctcaggtcccggtcccggtagggcaaccgggaaccgggaaaaacaagcactggtaagaatgggggtctgagtgaaaaattagtgaagaaaattggagttaaaaagaaaaaattttaaaaatatattaatatattctttaaaagtaactctgtaaattgtgcggatggcctagtggctagtctccttgctttcccttcttctttcccctggttcaatccctctacagaaactaacatgtttagaatttttttttgtatactcatggctttcctatcgacaaaatatgattactcataattttattttaattaacacatttttatcattttttgaagaaaattcgaacaaattgagcatagtaaacccaaaaaccagccttttttgttgaaaatctgttaacaaattgcactcaaattttcaaaatttcccccggcggcgcctatcggcacagccggaccctcttcatccccaaaagtttttttggaaaaagcgcgccgaaaaatttatgtgaaacgtaaatctgaatttctaataatattcgatcacttagtccaataatgattaattgtttgaaataattgaagaaaattcaacattttcattaatttaattagctttaacttttgggttttataaaataaaaataaaataaaaaaataattttatattattttcactttaaaaaaaaattaaaatttgaatttttaaaaaattttttttaatttttttgaatttttaaaatttcccggttggtcccggtttttcttgcggtcccggtcccggtcccgaagaaaaatcgaggtcccggtcccggcttctcaggtcccggcaagtcccggtcccggttttgcccaaaattcccggtcccgtggcactctaatttcatgtaattatttagtaaattattttttatcactttttgctgcagagttatactcttttgaatttccaatgaaaaaaagattgccacattttaaaataaaattttattcctcaaatggaatatacttttcattatttttttatattttccgtctttatcggattaaattaccatttggccgataaatttgtgaatgaacatattttgggaatgtcagacaaatttttgattagcaaaaacagtaacatgatcaaattaaagaagtaccgtatcagtcgcctttcattgaggataagccgagattgtctatatttaaattatataatattttaggaaataatttaaaccaaataaatttagttggcttttacgagccaaaaattttatggcaaatattaatgaagagctttcgctaagtgaagaagcatcaaaacacgaactgctgtcggtccgctttcatcagctattccatgcccaataatttgcaatttgacggaataaattagccaaagcattactttttagtaattcattaaaatgacataaaaccaaagattggattttcagctgggggatggatggcattacgacttgattc

SEQ ID NO: 14821 - DNA, 1373 bp, Heterodera glycines
gtgataattaatcaccaccattcattctcacatctcatgtgtcatctttttgtgtgtgctcatcaccagcaccaagcagtgatgagaaatttcatcgaaagtgatcaaattcctttaaaaaaccgaaatttatttgtgggggactgctgatcacaccgtcccccccccctcccccttcacccctttcccgataaaatttcgttgaaaaccgataaatcgtaaattccccctcaccatattgtacatatgaatgaatgtgtcccgtcccagcatcagaagaaaaaaaatggaataattttcactctcgtacagatttaatgtaataaacacattcattaattccactcactttctccgcctcggccaccaattaggcaattgaatgattgcataaattaatcaaatgcaaatgtatcgtatctgtggcacagatttgtacacaaatggcatatatcgcattatgaaaattttccaaaaattttggatgagtgcaaatgaatttcaaatagtctgaaggaataactcagttcattgtttatttgtttgtgtctcttgtgctttatctatcggcgccttctgctgctgcttgtgtccccaattgccccaaattccaatttaatcacaccaccaccatttttcatcataattaattgtcggaaatcggcttaaataccccccacccctcgggcgacgagggtggggtggttgtcctcctcctcctccataaacaccatcaccaccacataagtttctctcattctcgtcccaaatgctgcacacaaataaatccacaacaaatttccgctttacctctcccctcccgccactcttggcaaattgtgtcgagaatttattactataaatttttgtaagagcaaaaatttgtgtttgccctccctccttcccccgtccctcatgctgctgcttggcttggtggtgcacacaaatcgacgacgcgaatgaaccaacccctccctcgtcaacacagcagcagcagcaagcaccgttttcactttcacgacggtggcgatatgtgtggcgggcacccgtcgtcgtcgccgctgccgttaccgtcggcggcgctgtgtggtacatcattttgtgtatgtgtgcatgggaaggagaggagcgaaaaaagtatatttgtgtgtgtgtgtctgtgtataagtagtgattgatcgttgccgaattttcaattattagttcactgagtttattggtggtaacccagtcaactcgatttctcttcctgctgctttccccgctgtttatgaggctgcttgctaatgagggccaatttaaaatgttttttttaatgtaccccagaggcggaacgtggagaaaaaaatcccccgggcccgcatttgtcgcgt

SEQ ID NO: 14822 - DNA, 1487 bp, Heterodera glycines
atcggcgaaccggcttcggcgaatagtcatgtacccccccccccccccccccgcaccccggcacccccacatttaacgcattttgcgacggattttgtgaccgatttgaaaggaatgaatgagtaaatgaatgcatgggttggtgtctgcttcaatgcctgaaattgaatgacgagctgacccagcgttgttcccgtaatccctgggaaaatttcggatgagaaaatttaaaaaaaaacgggcaagaaagtgaaatgacaactctaccaattttgatgagatttgctagtagaatttaggaaattgttttgaaaaagtgaaatttgatgtgaccgacgaaggcaaacgcaaccaaatttcaagaaaggtgccccattagccaaattttttaattttttcacctacttggttacgtatgcgtaaaataaacccttgtaaaatgttagggaaatatttattccaatcgctatgttttatttgtgacacaaattcaggacgaactccaccctcagccccaacaacaagaccaacagcaaccattgttgctgttgttggacgaagacgtgatggataagccgcgacagcggctggcggaggcgaacaccaccgcaactgacgacgcggcccattgctccgccaactgcgacgaacggcatgacgaccacccgctgctgctgtcattcggggaggatgaggaggagggcacagcgaccagcgccgcagcggacaacggcagggacaacatgaacaaccacaacggtggcgagcaggtcggcggcactgccgcgaatggcgtcggtggcaacgagtgtggcgattcactgggcgtttccgccggcggcagcggcggcgggggtgccgatgacgccaactttttcttgtgctcgccgctcatctactcggagccggcactgcccagcgcattcgccaatggcggcgccggcgccggtgggccaacaattggcgcctcgtgggcctactcggaaatcgcactacctcaggtcttacaatttagtttagtttgggtgatgatttagtaattacccaactaattagccccccgttaattagctaaaaattagccgttttttgatccgtaaaatacattctattttgtacacttgtaaatttttcaaaatgtgaaaaaatcctgttaaattattatagattttgcccttaaatagccaattccaaggaaataaattgaaaacttcggcaccgtcgggaaaatttgaaatattcaatttggccaaaaatctccttgattttacggctcccaaatttttataccaaatggaattttaattatttgttggctaatcgagcctgtcagctagctctataaaagttggttgtctttttgcagggagccaacattggcactttcccgatgccattgccgtcgaacaacagccacaacggccagaagcagcgacgacggcaccacttggacagcgagacgggcgagggttgtgccgccggccgat

SEQ ID NO: 14823 - DNA, 1159 bp, Heterodera glycines
tcagcaaattccgaaattagcttgggaatgggccccctttaggcaaccttttttatgaatgttgtcccattttactttgtggtctgcggcctatggacgcttcagagccatttacgccttcttttcaatattcgtatgtaaaaacgactatctctttttttcggaacacttttttgaaaattttttccggaagagattttgtgacacgcaatataactaacattcgaggcttctgtcatttcctttttataatgcgtatataatttaggctatttgattttatcagcaaattccgaaattagcttgggaatgggcccttttgaggccaaccttttttatgaatgttgtcccattttactttgtggtctgcggcctatggacgcttcagagccatttacgccttcttttcaatattcgtatgtaaaaacgactatctctttttttcggaacacttttttgaaaattttttccggaagagattttgtgacacgcaatataactaacattcgaggcttctgtcatttcctttttataatgcgtatataatttaggctatttgattttatcagcaaattccgaaattagcttgggaatgggcccttttgaggccaaccttttttatgaatgttgtcccattttactttgtggtctgcggcctatggacgcttcagagccatttacgccttcttttcaatattcgtatgtaaaaacgactatctctttttttcggaacacttttttgaaaattttttccggaagagattttgtgacacgcaatataactaacattcgaggcttctgtcatttcctttttataatgcgtatataatttaggctatttgattttatcagcaaattccgaaattagcttgggaatgggcccttttgaggccaaccttttttatgaatgttgtcccattttactttgtggtctgcggcctatggacgcttcagagccatttacgccttcttttcaatattcgtatgtaaaaacgactatctctttttttcggaacacttttttgaaaattttttccggaagagattttgtgacacgcaatataactaacattcgaggcttctgtcatttcctttttataatgcgtatataatttaggctatttgattttatcagcaaattccgaaattagcttgggaa

SEQ ID NO: 14824 - DNA, 934 bp, Heterodera glycines
gtaattaaatgttaccaacatttttcacccccatttaaggcactttttttttatttgttttaattattttcaattaccaaccggtattttttttaaactttatatattgtattcccagcttaataagttttaatcctttttttgcactttaatttttaatttaaaaataattttattcaacattaataaaaaattaacagatggtttttctgatcgatatcaagaaatttttttattgtatattcctttttttaaattcaattcttccccccccccccttcaccctcccgtccccactctcgttccctgcccctcctcacgcacgcgcctctgacggcttgtttttggcgtctcctgcatttcttccccctccttctccaaccccctaggcttcttacccgctctcgccttctctcgctttctttttccactgctgcgattcgtgcttttggtcattgtggtgcttgccattgaccccgcctttgtttaataattttaattttaaatttaattttcattttcactaccatgctttgcatgtcctccctcttcccctctctgctgtcccccatttctcgcaaagaataggaagtcttcttcttcttcttcccctccttctctttgtgctttcttagcctcttccgctctcttcttcctctctctctttctctgccctccccctcttttgctaacggtgctttccccagccaccgctcacccccggtaattttgttaatcacccccttcaccggcctatatgcttttttgtaaagctccaggttccggcgtttgaggtccatcatagccggtgcctgatgggtgcctgggcagtttttgatttgctcttttcgagcactgagttggcgattccgcttaaggcggctcttttcatcttcgcactcgaagcattccccgcatttgcacaacatttttt

SEQ ID NO: 14825 - DNA, 2404 bp, Heterodera glycines
attcccgtctccctcttataaatgcataacgaattgatgtttatttatttatttttcaattaataatgtttattgattttttttggctgagtttaaataatgattgagaattgctaaggccaagtggcaatcaatgaatcgtttacaaaaattgtgataatatggtaatgataggatggacaatgacaaaggggtccaagaattatcaaatacatccatcagcggacaaatggataaatcccctcaattcgcgcacgacagagcatacaagtcgcgaccttgtggatcaccgcgttcaccgcacatgtcgagcacaggtagatgtgtccgcaattacggctgtagaagtgtgcgcggttgctggtgcagatgatgcattcggtctcccaatagagctgggctggcgggacgagcactgacgaggcacctcccctttcaaatcgttgcgactcacgcagctgcagtcgaacattacgttcgaactgcagctgctgatgacgaatcagcggttgaggttgcggctgctgctgagggggctgtggttcgatgttctcgtcgttttcctgctctgctgcctgcagttgttcgtgaagaagctctgcttcctccatttgctgatcaaagtgttgctgtctttctcgctcttatcgttgctgctgctgctgcgcttgctgaagcaacagatggtgctggtgttcaagttgctgctgaacagcacgatgaaccatctcgtcgcgaatgagacgcatccgcgaacggttcatgtggccttcgatgacagcgcttagaacggggcctgtcaaaatgcatttatttgggtaaaattattaagggttcatctcaccgttttcacgttcatcgtcaccatcactcgccgtacttggcccagccacattgctcactaaaaaaatttttttttctttttcattttttttcaaaattagcacaccattagtacggttttgcagagtcccattgcttcccgaacgtgaacttagcggagtcagctgctctgcaaaaaaaaaatcgaaatttaattaaataaaattcagggtttaagattttcattcggtctggcacgaacactgccatcacttggacccgcaccattattattctccacttgcactttaaaccatttattatcttaatttaaaaatatcgcctacccaaacgagactgttgtcggcgttctcgttcctcaagtcgacggccgagcagcgaaagctccactcccgccatgggagagtatctcgggctgaatctctggttcccgcgagactgaaataatcaaatcactattttatcaaaataaacgaaattaattattttaaaatactttgtttgaaaattaaacttacgttggctaagtacccctccgttgattcaatccgcgtcatattctgaagcaacactgctctctgatcgatgatctggcttctcagcaaaaagatcatctgctgctgttcgcgcattgctcgttgtaactgacgaatagcatctgatgccgagtccattttttcagaattaatttaattgctaaaaaatttaaaatttaacagataaaaaaaagggaaaagaagatgccaaaatgggctcaccgaataaatgacgatcttaaccccacccaccaacagtctatcacatttttctcgacatctcatatttctgcgatgcgcatttaggggaatattgggacgattaaagtgcttgaactgttggccggtaaatttctttttaggttaccgccaattatcccaacaaggcaataaataagcacatccattgcagtgcggagccggcgttaaatcaagagaggaatgagctaaaggtcaaattgcttccgcgctcggcattttccttgctatgcaaacataacaaatttttgccttttttatggggtttgggaggtaatggagattaggggcgaaaagttgtgagatgaccaaaattaaaaaaatgattttattaaaaaacatttattatgaattaactgcaaacaattaaatatcgaattatcattacaattattgaaattatcattacaaaaattgaattatcgaaattatcattataatcatcgaaattatcattattatttaaaaatcaaaagatcattattttggcttccgtcacttggtctatttctttggcttgaatggagcgagtatgtcggttgcacgacagttgtcggtcgtgcatttctcacacaattcaaagctgacaacagttcgctcgccattggttgaatatttgtttgtattgttccataagcacgaaagacatgctgattttaacaagtatgccatgttaaaatatattagtcaatagccgtcgcaaaaacgaaaagttagcatatattttcttaggaggagtttccaggattggatgcttctggggtttt

SEQ ID NO: 14826 - DNA, 990 bp, Heterodera glycines
  unsure (1)..(990): unsure at all n locations
tttatttatttttaatttctgcaattttagaccttcggtggccatacgctaacgacacacttttacccatgggtagtgtttgtcaaagcggtccacgagtgtaaaaacggcgaaaaaatgtccataacatgcactgggcttttgatttccttacgccacattgtcacggctgcacattgtctttactggaaaaaagagttactcgcagaatgtgatggaagggccggcaatcaaaccaaaaaagggtttgttgaaaaaaactagcaaacattgtttaaggtgtaaatttctaacattttttttgtttattacaacctattttgagagtgactctcaagaaaattatttaactaatttcagatttaaaatggtaatgccgaatgaattattcatatcatatgggtcttatgatattgaaacagcatggacaacggaggcacggaccatttccattccacacaattttcggacagacaatcggcagccaagaaagcatgactttggcattgtacatgtaaatcacatcactcatacatcaaatattttataatttcaaaaaggtggattgttttcactattacacatacctgcccaagggggtagtcaagggtgggagtcatgacgtcgaacgtaaggggtcagcgggtgtcgaacgtaagaaatcggcgggggagggtgggtcaaaagaggaaaaaaggagagaaaaaagaaagaggaaggaaaagggggaaaagcgagaaaaggcagcgtcgaaatcaaggaaagtgccgttaattacgttcgattaaccctgagganctgngttttgtcgaacgtaaaaaaatgaaattaactaatttcttttgctaagtgtttcaattcagttacgttagacactcttttctttacgttcgacgaattctgctngaagaagattcgtcgaaacgtaagaggaagtggctgaaaaattcctaaaattttttcctgttttttaaaaaataaaaaattcct

SEQ ID NO: 14827 - DNA, 1853 bp, Heterodera glycines
aaagcactaatggtgaagtcgtcttccttgaccaagaatacacagaaagcgaagtgaaggccaaatgtgaagaagcattcaaagaaatactctttgaaaattatcaagcgacttgcgcttctctcgtagatgacgaagacgaagaaagaggaaatgattgtctggaatcggttggccacccccacgaaacccagtgattttgaaatttgaaagatgaacacactgtgatttgatatgtctgtgtcaaataaaaactggcaatttcatagtcttaaaagaaaatccattcttatccgtgagtttgtagcagcgctaaatagagtggatagtcattcttaagttctcactagaattcagctaaaccaaagctccatatctgaaaattggtttttgttattttttttacacacaatgatgaatgccgaatattaagcattaacagcataattatgtcgaataaaagtatattatattctgtggtcaaaaaaaaaaaatttaggcaaaaatttttcaagtctcctctttacaactagcgcctgaaatttttcaagtcaatgttaacattgtttgctttgattagaaagatcgttgtaaaatctgagcaaatttttattctcaagaaaaacatagccttagcaacaacagctgttccggtgatagcttaagcaacaaggggaaaaaaattgaatttcatttccgtttcttttcaactccgttcattgtcttggctctttctcggccgcttccttttccttcggcgtctctcctaatcttttgcctgtctcctccaatttgttagcaaattcttcagcggtcgtttggtcacgaaatttaagcaaaaacacttcgtcaattccctcggagctttcgctgaagtcctaaaagaacaaataaacaaagataattagttaattaattatgatagtgccaattcctactcggcactgcaaagttcgaacgttcggcttctgaccagtgatacggcttatcattgtggccaagacgggaaaattagcgaacaatttgcaaagttggtcatcactgcgaatgacgcagcgataacggcccgtctctttgttgtgcaacagctgaaaagggcaaacgatttcagcacgaatggaatgggataatacagtggaaaatttgttttaccggcccaaccctctccccaagtgggacctacacaagccgtaattgtaagacatggaatttgacgagttttttgtttacatggcccacaggcgacgaagagaataaatttatttcatttcctccctcatgaaaccttctccaactcttttttaaaaggtcccaattttaggccatttggggcggggggggggacaactcactttaagctccccaattccccgttctttgttctttttgtccattgggtcgtagcgaaacaatttacaacgagcactgaaaaggacctaaaaaaaaaataaataaaaaagatggaacaagcaaaaagcaaaagcacctcctcattttcttcgccgcttttcacatcgacttttgagggcaacggaacaatcggcttaaaagtgcccgtcggaacaaattcttcggccgcttcgtcgtctgaatcgccgcctttgtctgtcattttgccagccttagaaacatcagcagaagaaactaaaccaaatgaaaattgaattcaaatatttatacatccattaaatgaatttattacttgtcgtgcgggtgttggcggtggtcgaaccgaagagagtgccaccggcggcggaggagccaaaagaagggaatttggcggtgccgaaagagaaggtggggacggaggaaggcacagcggcgggtgccgtcgttttctgctgagtgccaaa

SEQ ID NO: 14828 - DNA, 3476 bp, Heterodera glycines
  unsure (1)..(3476): unsure at all n locations
cccttccccgcggcgcatcctctcgcccttttcactttctgctcgtcgcatttcattttcgcggtgcaatttcatgtgaaacggcggagcccatcagacgctttcccaaagaacgtttccttttctttttctttccctcccttttcgtccctttgtttgcaaatgttcggcatccgtctcccgtccatcccttgccaaattttgttcgttttttctgcgtttatggcgcgacttcgctgtcagttcagtccccagtcttaccccgacccgaggttcgtctcctgcggttttggctggcccattgagtggcaattcagaattgaccctttgtcatgccgtcttctgctgccttcccaagtctgtgacccttccgaaattttaacgcccgacgagcggcgcattctcaacgaaaagattgtcagggtacgccgggctttgggaccaatcgttttttgggagggaatgccaacgaatgtttagctgcaacagataacggcaaacatcaaaaacacttctcctgcctgtgccgacacaaccaaaagcaccaatctgttcattatggtcgcgttggtcgaccgtttgagcaatgcgttgccttttgagtgggtgcccttcggcgctttctttgcttattaacattagcatgtgaaattttgaattttaaaacagtggcagcagcgaccattcggcgaacattgagaaattcaccaaccaactccgctcaaaataccaacattttcaggtcagtgatgtcataaagtaaatcaaaaaattgtccaccacaattctcccgcctcacagcacaggacatttccctgtgcgatccgttggtgctcattgtgaacgcccacggggaccgacaagtgttcactgtggccggtccgtccataattatgatttaacacaccattttaaattgaacaaaaggcccagggatgagaggccttattttgaagggcgggatttcattggacatttcccgagagaatttcaggccgagatgccaaactgagcagagaagtgcttcaggcggcattccaacgaaatgtcggccatttccgtggcggaaattacgcattgggcctggagggcatggcggaatacactgtgtcggcctacggagccgcacacattgtgcaggtgccgagttttccgggcgagccgaagtgagcgtgggaaccacaaaaactagccaagcgattaattaattgcccatcaaagcacgaagaaagggacgaaaaacaacgaaagtttctccaatggtccgtcgaccgtttcttacggaatgggacaatttgttgcgcacggagtgcggcagcagcaaaggccaacaacagagaagaaatttcacatcgaaagcattcccgaggaggacagactctggacacgcattttggcaaaggcaatggcacagtgcggcggagaggagcagggcaaaatggtcaaatacgcacagacagtggtggaaggtggacaaagacgaattggacaagcggaaaatgccatcctttagatgccatggatatttccctgaaactgatcagtgacccgcactataacagaattgaggaggattctcaaagcatggaaaatggtctaaatgcccgggaaaaggcgtggcaaagcataaaaggacatttggagcaaatctatgcgaaatacggcggccaaatgcaacaaatgaacgcagccgaacaatgccccggcccgaagagaggcgaaaagacgctgaagatcttacgcttgaattagaggaatttagtatgtatgtaaaaatgtgtaataaaatttaaattaacaacgaatacctttaattattaatgcaatgatttggacggatattcacagttaaataagtcccctgtcagccaatttttgactcaacactaaaagaatgtcacaatttggtcgaatttaatgaaactttggaatgtgcgaaaatttataaacgaatattgttttggtaccataacacatttgacgtaaggagagaacagctggatttggtaggaattgaaagaggcgaaagaaaaagacgacatagtcatgaattagcaagatgtaaaagcgaacatctgcacattttgacgacaaaacggaaagaaagcaacgcacaaaacaaacaaagaaatgcaaatgagtgggagaggggcaaaaagagagcaacgaatgccaaaggacgaaaccgaatgaaggggaaggagggtaaagcgacacaattcaatgttctccattgaaactgatcggatgcatgccaccccctcccaccggcatcacccccatccatcgcatccgccgcctgttcgcttcagttttcgctaccgtcctgctccaaccccgcctcctcgcggttgcgtttcctcgtcccgcctccctcttcattccccgtagcattttgtttctgctgattcgatggttcagctgagttcacttcgttagtctgctgttggctgagcagtgcgtccaattggggtccgatcacttgtccatcctttttggtgctgtacgaattttgctgcgaattcgcagcagcggctgcagctgaacggagcgagggaaatatgagaaaacaacgaaaagataaacggagacagtcccgggacttattgctagtcttgggtgagagcaccttgggaatggggaatataccacaaaacaaaacctgcagccgctgcagcagctgccgccgcttcaacagaagacccgtcgccattggcgcccatcgcttgcatatgcgccgcgtaataactggtaaaatcggcggaagcagcatcctttgaatggcgtatgtcgggttagtaaatttcaagccaaaaccctcatcaaatggccctaccgcagtcgccttgcgcagttcggcatctccgtgggcccatcggcattggtcgccgttgttgcagaagccgcgctgttgccaaaatgtgcagagcgaagtcttgtaatgacggcccatggattcttcttgcctgaaattggcactaacaaagggcgtgccgattgcacagatcgaaaggaaaagttggcaaattttcgtcagtggtttttgtaagatagtaaagggacaaagggtggtggttcgagtccgttgtgaaacatgaatattttcatttatttttgtccaaaatattaaaaaatcacgatatttgggaattatttttgaaggtttttggcaaccaaattggataatcttggtatctttcgaaagctcttgataatgagaagctttttctaagcaaatgctaagcgatttggtgtatcagagaaaagttatgaggctttaaaattttgtttttcttataacttttgaaatagagcattaacaaaaataaattcagcattaatcgatgcagaatttttttctctaacgatatgcaaaatttcctgtggacctaacatatagaaaagaagctaaacatagcgaagtaaatgttgtttttcctnaataataaaaatattagatagtacgccanaaagga

SEQ ID NO: 14829 - DNA, 882 bp, Heterodera glycines
tttccggggttcccaaaaatccgaaaccatgctttttcgggttcagcctcaaacggtttgctcatctttcccagtatttggctttctcccccaccctccattggctaccttccgttagcatttgccttttcctcagccaaagtgccttcgctcgctgatttctccgatttgtcttcttctttgatttgcccattgctttcgcttcccattttcgctcgcttttgactttgctcaatgtcactccgtccgccctttcctccgttttcgtcggtgtcaatttgtgaccctttcccccaaatttgttcttcttccgtcccactgtcatccttcccatctttggcctcgtcctcttcttccaatgcttttttgatcagcaactgaagaaaagaagagtttggatagaatgcaattccgtaataatccgtcaccgccatcgcttccaattggaagggtttgtgggcgacgcattgggacggcgagtcgggcaaatcggacggactcgcgggcgaaccggcgccgctggaccgttgagagttgaaagaggtcgaacgcaccgagggccattcttcgccattctgctggtgtttataaatgaatgtaatgtccgcggtttctttccttcgacttacgacggcatccatcgaccgcgaactcagcggacttccgtcccgggtgcactgtacgctggtggcaaggtcttgaccggcctcaatcaacggctccgtcacaaatgcgcattcgtccatcgtctcctcttccgttgccgtttccccgacgccgtttttgccgtgcaacttttcgcaattttcctctgttgtgatttgcgcgttttgtgccaatgccatgtcatcgctttgttctgtaaatacccaccaatttaca

SEQ ID NO: 14830 - DNA, 2069 bp, Heterodera glycines
caatgttcccaaaaagttttttggaaaggctgaacctgtgcttatcattttacttttcaaaatttaactagactcataccattatgagcaagtttttaaaaaataagctttactgtcgaaaccaacactgtcgaaaactaacagcaccgatttctaagcctatttaggtcatttttatggcattttgtgcgtatttactctttacgaagaatttttttcaaaaaaataagcatttaaaaaaattttatttacatattttagtacatatttgtggatttttgtacatatttaatgtgttttcccgccggactctactacaaatccataaaacattttttctaaatttgaaacttgttagttttgttctttcttgtcattttcctatgaatctttgtttgtttttttgaccccattcgaatcttcgttgtcgtaaaatgcttagtgtttgatttgtttgattgttaatgcaatccaatttttagcttcacacattgaattatttatttccatataaaaaaggaacaatgactgatggacaggaggaaaaccagcaggtcactattatttatcattttgtcaatttgaagggttaatgggtaaatttgctgactataatagctgttttaatggattttcttggtgtcgtatttttgggcatggtcactgtatagaaaagttgtgtaagacgtggtcattggttcttttttcgaagtttttggtttttcaaaaatccaaatccgcccttcccatttacgatttgcggagatggttctgtcatcacattgccccggcgtttgagtggggtgggaaggttaacgtgggcaaaacagaaacaccgtaaatgctccgtgggaaggcgcgtccctccatttgccgtataaaacaacggcattcacattccctgactcactctaacccaaaccaaagtccatcccatccctgattttgctctaatgacccctaaaccgctccccactgaacttctttttgaaatggtccattttacaaaccctaattatgatttcactaatatttgtacctcctcttgggttgtccgtttttttatgcttccccgcgtcgtcaaatggagaaaatcttattttgtggtaggaaatagagatttagctaattcttttactccttttaagatgttcgatgacctgagccgcaacatcgaagcgtttgaaaagtcaggggtaataaaaatatgttgtagttcgattcgtggctggttaagaatgcatctaattcaaaactcatacaaaaatttcggattttggcactttttgcattttctgcccgacttatgaaataaccaaagggcaacctttaattatatttctttattagcctatggttcaggttgttttgtttgatcagtggcacagcagcagcgaattggccgaacaacaggtcgattctctgagaaatgcggtggctaaactggagacttgtgacgctgatgctgttgcccgattgtctgcctcggtcgcgcgtttcgaaactggaaactttgcaaaattgaaggagtcaggtcagaggatcattcgtccactgagtcttgaacggaagcgaaagattgaagtgaaggtaagcggaaattgatagcgttatgtgaggagtatgtgttttgttgcataaattgacgttcctcagtttagctgcatttaggaaaatcgtaaatctgttttcaacctgggttttccattttagcaaagagcattaagtcttaatttaagactgtatttaaaaaaaagaaatttcaatcatatgaaccgctgtgagtctcaggtggccgcgatcgaacgagagctgggctttaacaaatcctcaattcaacatcactccaaaaactctttgcaaatcattgacaaagaagttcttggggtgagggaatggatcgaagaaagagacaaagatgcagatctcgttggcactttgttgaaacacggtgagaagaagcatattgacgagattgacgcactcatggcgcgttccaaggtcagcggggaagtggacggtcaccgattgatgtcaatgctaataaattcaggaaaagataagaaatt

SEQ ID NO: 14831 - DNA, 1401 bp, Heterodera glycines
cagtgatccgtggcccccttatgattcgtttgatttcgctgtccgagcataagcaaatattcttgggaccattttttccagaattgccgaattgattttgctgtggcccaccaacgagcggctaatttttctgcctgagatggccgataaatttcttccgaaatctcaggttcttcaaaactcaggtttactttaggggataaaaaatcgattggccgtaaagggatgggaccatcaatttcatcagacacaaaggtgataggtctcgaatttagtgaggcttccacttcggtcaggaaggtaacaatttcctcccaattcaaaattctgcgtcccaaaatacgccggaagcaatttttgatcaatgcattgaggcgttcataaacgccccctgaccatgggctaaacgctggaatgagtgtccatttaatgcagaattctgtgcatttgtcaaggacatttttagaaagcacgaattgagacccattatcggataagatacctttaggcagtcctctacgggcaacaaaacgtctaaatgccaataaaaagtggtcggcagatagggaattaaccaattctaaatgtacggctcggcatgccaaacatgtgattaaaagaatccatgctttatttggccccgaattgaccgctttataaagagttgggcctaaaaagtcaatcccaacattttcaaaagcaagagagggatgagtgcgtgattttggaaggggtggcatcggaggaagaccgaattttactgcccgatccttcttacaagtattgcactcagtaataactttacggacagttcgtcttgcttttttgcaccaaaattttcaaaggaaatctgttaaagtagcatctacaccagcatgttttaacataatatgagaatggcggatcaataggctgagtacaggcgaatttgtggggatcacaatcggatgggcaaaatctttgtcgtcaatgttggataatcgagagttcaacctgatcactccatttttgtcaagataagtttgggtcggggggttcattcccctttggattattttaaacagccaatttttgataaatttttggtttacgtactcaaaaattccttctccctctattttggtgaacagttgtctctttttccctaatttggacaggaattttacaacaaaagaggccgttctaataagcttctcccatgagccgaagcgatcaaattcaaaaacaatagggggtggaatgacggcagcacacacaattggttcgggtgcgacactttctgcaggaggtaaaatgaccgtctgttcgtcgggccaattttcaggtatttgggatagccaattcggtccctcccaccacaattttcgcattcttaattcctctggtggaattggccgggtt

SEQ ID NO: 14832 - DNA, 740 bp, Heterodera glycines
gagagagagacaaaaatattctggactatttttgttttataaaatttgaaaaattacaaaaatttaatagcatttaaatttggcattaaaaatttgtcacatacgtttgctgcggtggagtatgcacaggaaggcgatgaaaataaagatgaaaatgttcattttagtaatgaattataattattttttcgttttcattttctgtttttatacggaaattttcacatgagaacaatggaaatagcgtttacagaaatgagaatggaaaagaaaaaatacaatataaaatagacagttggccaaatgaagagtatgacagagaaaacgggcgaaatataacctgtggcataggtcatacaattgttggcatatgcagcataaaagaagatacacgtattacttttgagaataagacgaatgaagagttatgggggggggggggagaaatatgaccttttagaattgaaaatatggatatatgagagcatatactttgttggcatatgcagcatcacttctatttataatcaatgaaatagtgtttatgcaaaagagaggtggaaaagaaaaaaagacaataaaaattatagagtatagaaaagaagaaatttgtattagtgggaaagaaaaatgcaaaaattaaactttgccaattgcttaatttatgagaaaatgtggctaagggtggcatggataaagaatgcgtatgagaaatttatatttttacatttacattaatg

SEQ ID NO: 14833 - DNA, 2956 bp, Heterodera glycines
  unsure (1)..(2956): unsure at all n locations
gatgatgatgctttgaagagtgccagtttaaatntcgtttggatcggttaaatntagtntaatttntaaattntcggttcattatagaaaaaggtatatgttgcgcaccaatagaaggctcattgccagtttcagtcggatgagtaatgtctataaattaaataaaaaataattttatttgaataaaaaataaataattattttccatcttattacgagcagcagtttgttgttcaattggtgctggaattgatggaatttgtatctcaacattttcaattgtaattgctgcttgaacatttgctatacaaaataattaaattaaattattgttttaattttaaaaactttatttataaaattatttatttttctttaacaattatttaccgtcagctgaaagtagtggaacatttaattcagaagataccaccgattcagcatcataaggagccggtagagcgaggcctaaaatttacaaaaattctgatttttatttttgaattttacctgagctaaaaaacgctgcagttaaaaaggcgacaaatataaagttgctcattttgtacaaaaaaacttatattaggaaatgaataaattctatggttgaatgaatttttgatgatgagttttatgaaaatttttgccgtttttatatgcaacttttccattaaatatttttgccggaaatacgtggaaattttaaattttgtaaacaggaagtccggtgaaggaaaaaaaaggtatttttcacatgaaaaaatcaagtatgacaaactgcgcaataaaaatgaaaacaagtaaaccaattaataaatttaaaaaataaataaataattttcccttttctgaattgtttttctaatcaacagatagattcaattaaaaatccatacttattaccagggattcttttttatgtaaatacttgtttttttcctgtccatagcctaattagtaggaaaaacactttcttttttgtgtttgcgaacaaaagttggacttttatttacatatttttacatatttcgggatttttctacatattacatataatgtacatatttttatacatattttggactttttcgcattttttcgaacatattttgaaatttttgaggattttttaaggaaattttcattaaatgtccccaaaaaaaaccccaaaatttcacaattttttgtacatatttttaggatttttgagaagtgatagaaatttcatatgaaaaatttaaaattttttttgaaaatatacccctaaaaatcgtttttttcaaaaaagagatagtaaaaagggtgcttttaagcctatttaggtcatttttaaacttgaaggtttttcgtcttgtctatattcaaaaaaataaataattaagaaaaaagtaaattaatgaaatctattggtgtcaattttccgtggccatctttcaattgttcttttactcatccaaatatttgtntaattttttctttcttcatttattttgacaattaggtatgccttagtcatttcnctgggctgtgcgtgcaaatccgagttcaatttttgtatgcgcttcttgaacggctaatgcactcggacttgaccgataaaaaataattgaaatatttctgtttataaattaacataacattaacaaatttttggcgtgagcccagaagtagcaatagaatcaattctaccaagcgtacctttatcctccaccacggacataacgtcgacgatgacttaaagcagtaccagcagagccaattcgacaattgacggcgctctcctccactagtaccacgggcacagagccaacgacgagttcaagcaataacagcagcagctgaagatagagtgcaatgggaagaaaattacatttcccttcttcgctgttgtgtttggtcatagacggagaattatcattatatttctagtgactataagaagagatcaagcaataccgcaataccagcaacagctgaagaagcaccacgtctatgaccatgagttcaagaagtaccaaaacaaaagaacaacgaagacaagacaacaaaaacgcactcaaaaggaaaacaaatgcaacgagattgtacccatcaagtccatgaggcagtcgcagtgtggatggtcgtaaaatagataattcttagaccaatagggtttacgatagatgagcagtagaattttaatatttcaaccatattttataccacaattattgtgtttaataaatgattgacatttgattttgtgcgttattttaaacttaaatatttatgcttcattctttttcgcccttggttaagaaagaaaattggtagcacgcatatttgcataaagctatcatcgcatatctcaatcatgggtcattcgttttttcaattgtctgaatatggcgcttatgtgcctttttgcgctcaaatattcaactgtcaaccaaaaatctatatgtgataagaccatgcaccccgaagggacgaaggcaagagcttaaaaaattgcttggacgaaaactacaattcacctaccacgaccttaatgggctgaacaagacttttttcattgatgaaatttctgatgaatgtgtagcaactagagcccggcgggatcgggactcccgcgggattttacgggagtcccgctccgactcccgcttttttcggtgaacgggatttttaacgggagcgggatttttgcgggattcccgttcgggactcccgtcccggaaaattttgaactcccgatcccgctcccggaaatttttacccaaaaacgggagtaaaaatgcactggtaagaattgattttttttggtaaaaataatgatttttcattgaaaatctgttaaatatatagccaaaatttcaaaaaaatttcccggcggcgcctatcggcaccgccgggcctttaaaatccttaaaatgataaaaaactttgctcanaaaaattgcaaaaattggtc

SEQ ID NO: 14834 - DNA, 1787 bp, Heterodera glycines
gataatttatagaattacttatgtcgctctttgcaattcctgtagggcgaaaaagataaagagtgagatttttgaggatttttgtgcataagcaatgcgcattttatggaatcaaataaatgcacctttcaggcaattaaatcacaattgtaaaacacgaataaataacaaattaattttctggtatcaaattacaaaatggcattttctgggatcaaaaaataattgtaaatgctcaacgcctattatattcttagtatcaaacgaaagctttaaagaataggggaatataaatacaagaaacaatttttgcacagaaaagaaaaaatcgtttttaaattgcttgcttcgaaagatatctaaaaaagggattttaattttggttttttggaattaggatataaaattgaggggtccactgcgtttgggcgctcacgtttgggcgcgctcgtttgggcgccagcatgttttccattatagctttctataacttttttcaatatcatccaaatcgaaaatttttgatatcattcgaaaacttaacatgtttgaaagctttttctaagctattgcttcgcgattagacaattaccaaaaaagttatacacttaaaattgcaaaaagtcgaaatttttgaagatttttcttaataaaattttttcaggcttgaaaatcctttttcttttggtaaagctaatagagcatgttaagagctttcgaatgataccaagattgttggatttggatgccaaagaaaaaagctatcgtggaaaaacgagctggcgcccaaacgggtggatcccaaaattgagtgccattttcagttcaaaaataagataaatagaaaactgcttggtataaaccccatctttattcatatattttgttgaatttttaaattttgaggtgcaggaacaaaagaaattttggctaattttttaggtaccgtattatctctaattatccccccggggggattatttttcaacctcctcataaaggggggggggatacaaaaataaagaaaactcggaagaattttatttttatctctttttgaagagttaaaaataaaactcattttgggattcgggaccattgacaaaaatgtcaaataaaaaaatattaattcttatataaattttttcatgctaggaatattcaactgacaaatgagtttactgtttcaatttatttagtatttggtttgcaattgttaagatagaaaatttggcattttttaagttaaatacattaagtggtagtttttagtgtatttttaagtcggttaaagcaaatattgaataaatatacattttttggaatttttgaggatttaatacttatattttgggagtttttagtccatattttgagctttttgagggggaagagatttctaaaaatgcaaaacatacattctcaaagaatgtataggtatgttgtttatttacttatacaattttgtttttttttgggagatcatttccaaacttcaaagaacggacaaatgtgagcaattaatttggggaagtgaaatgtgattttatgttaagagaggcgtaaatataaatatatttcttctgatacctttttggtgctgacattttatatttttttaattaagaaaaaacaacaaattaggcgaatttcttttacttttgtctctcctgtaaagtgtgagaaaatcagccgaattcttttcgcaaattttctttacgccgcccgccaaatttggccttggaaaagcctaccgatgtattcattcgtgtgactttttttcggct

SEQ ID NO: 14835 - DNA, 878 bp, Heterodera glycines
cccccccagctcagttcccccccccgcatcgtttcccacccgagaaatttttaaaaatttttttgctaacttagaaatttttcaagaaaaaattcttagaaagttttttagtaagaaaattctaagaaaaaaaaatttttatgctgaattactaagaattttcaaaaaattctccaaaaaatcggtgaaaattttcgaaaaaaattttttcttagaattttcttactaaaaaactttctaagaattttttatggaaaatttctaggtttgaaaattaaaaaaaaatttttttgcggcgacgtttcggccggcaacgttttggggtgtacccaatttttttatgggcgctgatttgtcggcaccgccggaccatttgttttgttttttttctttgttcatcatttaacgcacttcgaacagcagacagcagttgggcccggcgtcaaaagtgtacgcgagtcgcgtgccgtagcgcgtgttgaagtcgtgcacaaattcgatgagtgcatgcgaagtgacgttcagatactgcacgggaaggggcagggggatggggctgattattgttaatattagttttatgcaaaagggtcggagcggggccggatagagctaagaaatgccaaaaaattgcaccaaaatgtttaaaattttcctggcgtggcgcgcctatcggcgaccggcacattaaactatcgctttttgtttcaaaatttgacaacattgtcataagttggccggataaaactagtatataattcaatattttaacaaataaagcaacaaaattgattgtttgttttttgaagctcacaatcagcagtgccggcaattataaaatcgttttcaagaattttccaaaaaaaaaaaaaaattaa

SEQ ID NO: 14836 - DNA, 3210 bp, Heterodera glycines
ctcctccaacattttcaacatttttgtctcatgtcatgttgatcatcgctcaatgcgatcaccaaaatcatgcattttagctgctcctttgtcaatgacatattagcattctcgcatgatgcattgatatgagcaattagcgtcgacacgtcttgatttggctgctgacgaatccggaaacattcataccggcggacaaataatgaccgggtttcggaaaacaaacccttcaatttgtcaatggactctttccaattgactgtgtccggttgcgttgggctaatgctgtccctgtacttgttgtactcttcgtcagagagttttccaagcaaaagcctaactttcgctagctccggcaaatcctttccgtcctcttctatcagaattccaaaccttttgaaccattgctcgaaggtatttcccgactcagagtcgtaatgaaattttgaaattcgtccatcgattgagctcgccaaatttgcatggcttaggctctcagaaggtccaacattttgctgcgcattcatcatttgttgaatccgcttttcggattttgccaaaactgcatcgagaatttgcttcagttggtccgcgtccattgccaaattgttgaaatccaaataaccacacctggtggctccctacacttgctgagtgttaaggatttttgaagatttgaagataaaaccgcgtattgcggaacctcaccacaattgtgtcttttggtttttagttgaattgaactgctatattagcagacctcacaccacctgggtgctattggttttcgatgaattgcagtgtcttcagtagagaagatggctgctgactgcgccaatttgttgtgttcctccaattgaacacacaaagaataaaaatatttattgatcggtcggtggacaaatgcaaataataataaaaacgaatgaatgagggaagagtccaaaaaggaggggaatggtctccttataaacacaatgagaaggggggaaagggcgtggagaacaaagtacaaatatgaaaataattaaaaaggtcaaaacgccaatttaacatttccaacaggcacaaatgtcggggctccgggtaaatttagggaaattttgaggaggcgcggaattgccaaagacacatcgtaaaaatgacgcgattggtcagcagattttccctaattgttgcaaattaatgcacaaccgagccatttggcacttctaaaaatactgtttttatgaaagttttccaattttcaatgaattttcctgattttctcgtattccccccccctttttaagatgggtggacaccgccttttggcatttgttcttctgctccattctcattgtcattatgtttctgtggcgcccttctcaaaacaaccaacgctacgccttcacgcctttgttggacaattcggaagacgaaaatgaagacgaagttgaagaggacgaactgttcacgaaaagcggaggacaaaggccggcgatattcgacgcagtgcaaaaaaggggggcgggggaagcgaaaaatgaaggcgaaaaagcgacggcggaaggagcgaacggagccgtgggggacgacagattggcagtgagaaggggggggggacacatccgggggtactaattttaagttaaccgccgcgtcgtttcccgccttcccaaattgaaattttttttttttttaggaaaaagttaaaaaaaatctttggagaaaatttctctcaagaaatcttgaaaaaacctctgagaaggttagaaacccaaaaaaatttcggagtgcggcgaaattaaattacggcctgaaaatccgagggggttggggattcgcgaaggcatctcaaatccattcttctcgtcaggaggatctgaaatggatcgaaacgaatattcccacgtctttggctgaggcattgattgacgacgaagaggaaaaggaacagagggaattggaaatgtccaaaatgttgtgaagtgatcggagcggagagagttaatcaaaattctatttatttttttattattttttgtcacggatcgttcgcatctcaatttttaagagttgcttttgtcattgtttccctttttctctgtttgaccggatttatgtgagacaattttaaaaggtgtacggacatttcgcctactcgacatctcgcctaccgacatcttgcctactgacatttcgcctactaacccaaaaacattcatttcgcctactaattagtaggcaaaatgaatgtttttggcttagtaggcgaaatgaatgtttttgggttagtaggcgaaatgaatgtttttggcttagtaggcgaaatgtcatgtagccttttaaaattcttcatcaaattattgcattgttattgagtttttggataggataaaaattattccaagttctttattgtgatctcagacttgttttttatatatattagagtagagcgggaccgggaattttgggcttaaccgggaccgggaccttttcgggttgaaaaaccgagaatttttggctgggaaaaccgggaaaaaacccgggactggtcccggtcccggtcaaaaccgggacctcggtactcagttgtccgtgttttggtcccggtcccgctctactctagtttgaacttccgccactgcaaaaagggctgatgtgcaaaaagggggagttggacatggaaggatatggcgaaacgaagaaaggaatgtgcctggatgaagaccaacactgcttcatggccatttgttcaaaaggcagggatatgattttatactgggagaaattaccaaattcaaaagttttaactttgcattacggcactaactagaaatcaacgcgggactcccgcgccagattttgctgggtacaatcagcaacatcattttttgtcaaattatgaaacggataataaaatcaatccggcaaaaattttgaatcccaatctcgcaactgatccgcaattttgaattttataagatctggttaggaccctcgagttaacaacccaatcccaaatgttcaatttcaaataaaaaaaacattgatttttaggcaatgaacactacaaaactgtgtggggatgcactcctgtggccagcaaagcttttattagcgccaaaattggcgaaatggacaatgccaaggtcaactgtttgcctctttttggcagaaagggcctcgatttttcgaacgaaaattttacggaacaaatgatga

SEQ ID NO: 14837 - DNA, 3657 bp, Heterodera glycines
  unsure (1)..(3657): unsure at all n locations
aaaattttttgaaatttgataaaatttgttgacagattttcactaaaaaatgatcaaattttgtgatttntatcatttttctaatgagaaataagagttttggcgcgccgctgagaacagtttttcatcaaattaccaaattttgcgattttgggccatttctaaagaaaaaataggagttttgggggcgcgggcggtgcccgataggcgnccggcgggggggaaaaattggaaattttgatcatttataaacagtttttcactgaaaattagccaatttataggtaaaattttgaaaaattttatgggaatttaatccaattcttaggggtgtaaaagtcgcttttcgcgccaaaaagcgaaatgcgaaaagcgaaacctcggcccatccctggccgacaggcagtcatcgcagtaaaatattttgaaaatttttcattatatttttattttggctgaaaacaaggtttttggtgtattttctggaaatttgaaagttttaaaggaaatgataattaaaatcggagaagttgatttactatacagattttgcacaaaattgattaaatattcaaaatcggaaaaattatttttatgtcaaaaattctgttttcggtatggaaatgtcagggatcagggtctggagtcataccaaatagcagggagttcggggtgataatgacgagaatcgggttccgggatgaggccgaaagtgccaagaaatttgccatagaggacttcggggatggccctagttgatattcatttttttatcggagattctctaaccccaacaattggtccctcagcttcactccatccgaacaaaatacgataagctgctttgaccagttccattgctgaactcagctgcagctcgcccagctgcacttggaagcgtggctttacacacaaacagtcaaagcgaaagaattcgacatctttaaaaggttgatgttaaaattttcagcagaaatattaaaaacaaaggactcagaatttacgcactagttgaaatttttcatttaaatgtctttttgtctgccgaatagattttttctgtaatcaaaataatgaatatattacaaaattttttaaatattgccttttgtgaaattttgcactatttttgaactagcgcgccggattttaattttggcgaccgaaacgtgagcccagaaaaatattgaagccatctcaagcctctaatcattgaaaatcgaaaacttctacacccaaaaatccctagaaatcgagaactggatgtcgataaacggagcactgttttctgtatttatttctctcagtgatcaaacagatttgaacaattggatctatgttatgtattctaataatttaatatcttaaccattttaaatccaattaaccaaccctcctctctcatttggtcatgaatgattgctgtagaaattgttgctggtgctgaactcgttgaacttgatgctcctccattcctgacatgttgctgttgttgctttttcaccatacattcccaacttttgacatatgcgtcggctgccaacgctttgattttccaactttcacaaatccgtttcaattcgtcaacggattttgctcggatttggtttggttggattttgatgccgtattggcagccccactttgccatcatattacgccaaaagaagcggttgcttaatgccaatgcctttgccatatcgtcctgctctgagctgtcatctgtagacacaacgaaaaatggatcggcaccaacaacaacaaaaatgaccaactgttgaaatataaatgccgaaacgaatgatgcgcggccgtttaacattaacatcgtcgaattttatcagtcaaattaaagcaaaaaaaaaagttttaaataaatatttttaatatgcaatatagaatattaagatataggattattctatgtctttcggatgagaaataaaaatttttattacacatattatatttaatttttatataaaatcgatgttcaattttatatttcctgtcgtagcaattataaaatgtcgctcttattattatgaaacaaattacgtggatattcaaagctctggaggaaccaagaattataaactcaaaatacactcctaagaatcgacctaaaaattttttcaaaaatacaccccttaagcaccgaaaaattttctaaagcacccctaacacatgaaaaatttctcaaaaattcatctccacaatttttttattttcttgacatgggttttggttttaaaaattatttatctcaatactgattttggtagaatttttttacttttttgaataaattttatcattttacacccccaaatttgaggctgcttttagagcctaaagcctacctattttggtgggtttagagcctaaaaattggatccctattcatcaaactgtagaccagcagggaatagacggaatgttgatttggattgcctattttggaaagccggtttctgtcatttctgggctcgtgattccgattttcgattgtcgacatttttaggctcgtcagaattccgattactgaaattcgatgaagatacgtaatttttggcaattttgaaaatacttttcagctttctaatttgagcgacagtgcgcaaatccattctacaaattatttaaatttgaatattaaattttggattttcttgactatttattaatagggcttcgatttttaggtaaatacctaaaatttttgcgcacttgtaacgttgagataagcataaaaaacgagtttttagcttggtttggagcttctacacccacttttataatacctatttttacctatttcgggatttttctacctattaggtacctatttttatacctatttcggcattttggttacctattttaaggattttcaaaaaattcttaacaaaaatgcaataaaatcaaaaaatatacccataagaatcgaccaaaaaaattttcaaaaatgcaccctaagaattggaaaaatttctcaaaaatttatcccaaaatttatttattttttctattgacaaaatttttaatttaaaatgtcaatattatctaagaaaatattaatatatttaaattttcgtttacaaagagatatgtagaaccaaaattttccctctttgtttgcttttttccactaaaaaatcgttaataaaaatttttatttacctattttggtacctattttggaatttttgtacctatttaatacctattttgagatttttttttacctatttaagtacctattctgggatttttcttacctaaaaatcgcatccctattcatcaaacatcattaaacaatatataaatttatcgaaattccaaaatgtaaagttggcatttttatccgcacgccttttcaggcacattgtgattggttggaacacccctttcgagacgaagtgatctgggacattgaacgcatttatttcgtgcattcgcaacacgaattggacctgaacgatttcaaccatttgccagcaaagtaaaacgaaaaaataaaagaaaaagtgttggaattttcctagcaattgctgatcaattatttagcaggaaatgtggatcaaaatattattaattatccctactaaggctaatcgtcgacctttgtggcaaaaaaaaaatcgaggacaaaaa

SEQ ID NO: 14838 - DNA, 4576 bp, Heterodera glycines
tcagtcaaaaagggaggaatgtttgaggaaaatacgacattttggttctttgccgacggacacagcgatgggcaaatacgacacgatgggactgaaacagctggacaagaagctgacggaatgcatgaacgagttgaagaagtacgaaaacgtcaacaaaaaggcgctggaccaattcatgtgggttttgttttttatattttctttgcgagttaattcgcaaaatgtccaatttaggcgtgcttccactcaaaaagaggagctcaccaaacgagtggaggagctgcaaaacaatgaaaaggtgtgaaggcattcgtttaaggggggcgggactcattttgtatgaagcactgaaattctactaccattttttgaaacattattaatcaaatttttcggttgttcaccgtttccttcccgttagtcccccacccggaatttttttttattaaaaatctaaaataaatattttttaaactaggatttataaacttttgcaagtaaattattaagtatttagaaaactaaaaaaacatttttgatataggacttattttgatgtgagcattatttgaacatgacttttagacgatccaagacttactttccgtactggaaaaccgacgttttgaaacccttcaattgacttttaaacaagtggcaaagaatttcgaggacgtcttcaaaaaattgattccgcaagggacggccaatttggtgatgcaaaaggtggacccgtccatggtttgtcgagcaactctttcattccctctgattttgattgagttcaggacacttcttcccaatccgacgcttcgagtcaaccaagaaaatcacagcccaaacacgtattggagacatttgtcgggactagcattaaggttaataggaaaaattattgaatttgaatctatcgttactatttttattgtctgtccgtaggtttctttcacgggaacgcaagaagtgcgtgagatttccgcgttgtcgggtggtcagaagacactcgttgccttggcgcttattttcgccattcaaaaatgtgacccggcccctttctatttgttcgatgagatcgatgcggcattagaccaagagcaccgacgtgccgtcgccggtaaatttatgggataaaattcaattgttcttcattttaaaagtagttcaattgaatttttgactgattgtgagataaatattgtgtatccaattagtcaacaataccagtttgttttggctataatcttttaatgggtctagtagtaagtcgcactgtttcaatgtaaatttattagtcgaaaggactcatgaaatgaaatctgctaaaataatgttttagaaatgatccacgaactgtccgaaattgctcaattcatcacaactaccttccgtgccgaactgttggaacatgccgagaaattttacggtgtccgttttagggacaaaatgtcgtacattgatgacataagtcaacaacaagcgcaagactttgtgcaggatgatcagacacactcctgagaattatgacaccttttacattatgtcttaacaagttgatcgatctcactttttacattttatctcgcgcatataaaataataaaaagggctttggatttaaaactgctgattatgttttcatgctttgtttgagcagaggttttaattagagtgcagcgggaccgggacctgaacacggacaattgggtacaactgagtaccaaggtcccggttttgaccgggacttggaaatttcaggttttcccagccaaaaagtcccgggttttcaacccaaaaagtcccggtcttgcccaaatttctcggtcccgctgcactctacttttaatccataaaattttttaaaatagtggcgacgtgttttacggaaaatgaattgacgttttgttttttcttgtccttgctgatttggctgtttgctttttcttttgaattgcttcagcaattactcaattcatatttccaatttattaattcttcccttgagaaactatgaaatataaaaattctaaaaatataaaaaagtgcatatttttattatgtaggtatggattagctttctttgttttaagtaactttgttgctttcttttgtccttttcctttttggtcctttggtttttcttttgttgtattttttccttttatttacataatttccattccttcaattactttctttggtcagtcttcattaaccagttaattcctcctcaacttgcatatttcttcgtccaattacacttgcattttctacaaagtttctgaagatgaaccaattccgtgtgggtggtcagcgtgaattgttgggcgttgctgaggattatgcggacgatgtgagtgggggaggggacaatcgctgacaagggctggtggaatatgaattgttttttatttttgtgctacaattttgctgctgttttttgtcgaaccattaattctcctgtttttcagattttgcgtcatacaaaaaagattctgccgcatttggcccgacttttcctcgtttccacattcattgaggatggttgtcgcatgtgggtgcagtgggacgaccaacgcgagttcatgcaggtgacagaaaatagatgggacggatgggcgaacctttcagcgtccatttttgacttttaccacatttaaaatgttataaaacctttacaattttaggagtcttggtcatgcggttggtttcttgccatgctttttgtggttttcaatttcttcggccaaatccttcccgttgtgatggtgatgatccgaaaatatattgggattgcttgtgccattcttgcgggaggtttgtttggctttttgttactttattttattggacttttcagttgttgtgcttcaaacgtttgcttatcatattatttgggacctcaagtttcttgccaggtttggcaatatgctcgaattctttctttattattattttcctagaaatgtggccattttcggtgctctcgtcctcctctatgctgaaactgtagaggaacgaaagtcactcttcgctggtgtgcctcaaatggacgaccaaaacaaacccaaatcgtacatgattcttctcgggcgtattctcctcgtctttatgtttttgttggttttttgttttttatattcaaaaactgatacgcttaattgtaggtctctcattcattttgatcatttgtccttcttcaaagtggtaattaatgacataatgctgaataccttttcttaatttttataacccaacaattttaccataagtgatttggcttctgttttagcttgaactctcagttggcattgtgctaatgattcttgtaacaattggtttcaaaacaaaggtaaggctgaactaaactgttcatattttgtttaattttagtgttaatttggcttttttattgatgcctgacattttaattgtgctttagaaaatgaaattttattcatttttcttcagttgtccgccatgtttctctctttttggctgttcgctttaaatctgtggctgaattgctggtggaccatcccatccgaccgtttttaccgcgacttcatgaaatacgatttcttccaaacgatgtctgtcattggtggtctcttactggtcatttcttatggtcctggtggagcgtctttggacgcatggaaaaagcgcgactaacacaggattaggtacaaatgaaatgaaagggaagaggatgaagaaacgaggagagatgtagggggggggggaagaggagggaagagaaagggagttggacgttgaacagaaagggacaagcagatgaagaggcagagagacaaaccaagagaaggggggggggaagaacgaatggaaagggaaggaagaaaaagagaaagaagggaatgggtgggtgagcgagaaaaatttgaaaatgattatagttacctaattggcatttaattttgaattcatcatccttttccatgaccgtctaccgaaaatcccgtctaaaaattgttttcctattctttgatattcgagaccctttcacatttttttcttattttcgtttttgtcctttaccatattggaacataaacacgtatttattctctccatctttcgcagattcctttattattttatgtaaatctctcctctttcacgcgtttattcttttgctgtttttcaaaagcattcttttaattgtggatttttctatttctgcagcatttcttgctgatttctctaattgtttccattaacaaatggcaaaagtacatggaatttttttttgtttacccccccccccccccctaattgttgtgattaattcttcctgtttaattttgccagggatgtcatgtccacacattttatccgatcgttttgtttattcgcaaacaattgggtataccgttattttgatagtaaaacagtaatgaaaagtgataaccaattgttttagcatgaatggattgtcaatgtgttttattatgacaaaaaaagattgttggcttttaaatcttctttggctgaatttaaattttctcaaacaaagacttatgagagctaattacagattagtgaaattataa

SEQ ID NO: 14839 - DNA, 839 bp, Heterodera glycines
tctttttttattataccctttcttattattattgttcatcacattttaattcatgctttaagtacaattccattagtgagttacttcattatggaaattaattttataattcattttaattaattagattaaggacaataggctaattgcaattatgaaaggacataaagaaacactgattagtgaatattcaaaccaaaaatacgaagcacatcttggcattatgcattatatgagaaagaattggcaatgcgacaaaatagcagatgaatttgaagaatatgaacggacagaatgccaaaacttccgaaattattgggacattttatatgaatatttgagcagagaatacgtcggaattccaacaatgatgccaaaatttgtatttaaaatgcaaattgaaattgaaggaccaataacttatgcgctgaattgtttggccagaatttggcatttttattttacattatggagtaaaatttatgaatataaatttaacaaacttttcaatcattggtttgaaccaaaatgattgaatgagaagcgattgaattatggaagaataaaattggaacatgaaataaaattaccaattagcgaaatgattttgcaattggcaattgaaacagcgactgaatgggggccaacaaatgaaagtttagacgcaataattagacaaaaatttgacgaaaatttagtgaacattttcaaaaaagcggaagagatggcaaaaacagacaatgaaataaatgaagacaaatatataataattagaaaattcgacgatcaatgtacatgggtgagattttttaaattcaatgaaatttcaaaaaaaaaat

SEQ ID NO: 14840 - DNA, 639 bp, Heterodera glycines
taaataaagcatataaatccatttttagtgaaatggccccacccccggtgtttttaaattttcaataaaatatgttgtttggcttaatggaaaatgctcattaatttatttttactttttaaaaagccatccaaatctttcaaagtcgtttccggccactgaaaaacaatcgaaacaatttgaacagctttgttcaacaaatcgtccatctaaaagacaactaaatttacaaaaataaatatttgaataatttgggataaaattatccagatttacaaaaataaataatgaaattgagtcataaataatttattccaataattttggattgaaaattgcgcgaaaataaatgcaaccaaattcccaaaataaaataaaaattgactcataaataatttattccaataatttgggatagaaaattgcgtgaatgtgatattattgaggaatttaaattattttggcgttttgttcattaattttgtgtcatttttgtttgtgattttgagtgatagttagttgttagtagagaccggaaatttcaaatttgcggatcccgctgcgggactggactcaaaattttttgcgggacgggatcccgcaggattaatcccgctaatcccgcattttccaaaaatg

SEQ ID NO: 14841 - DNA, 1943 bp, Heterodera glycines
gtcttcggcattgggctgtgtttgcattgtgtttgctttgggctgttgtctgtattgctgtgtgctgtgcaacaacaacattcttaaagcccccaacaacaacaaccccctcttttttacgacttgaaaaatgacgcgcacttcggatttaatccaccttaatttgcattttggatattcttaatgtttcgaaccaatttttagtcaaaaagtttacggggaataataatttgaatatgtgtccacagtttttaattcttactcaccgtaaaaccgtcgaataatggcacattgccaacattcgaaggtggcgcaagaccaacaatcgctcgaatatttggcggagatttgagacgatcaacggcacaaagtaatcctaaaatattttaatattccattgaaaaagcattttattttacattaattttcaattataataatagttaattgttttttcttcaccaaaaatttctcttctggtttctagaaattttataggagtttttgtgtcaatgcttttcgggtggcggatgaagaaagtgccgtccaactgcattagcaatttacatatcaccagtatttcatccagacaattcaaagccttaaaaaagcaataaaaattatagggttaagcctataagcttggggataaagatatgggcgaatatttagattagttttcccgtgtctcagtcagttcgagtatatccacggttttgaaggcccgtgtgttcgagtcccagcgggcgactttccatttttcgtattactatagtcaaagaaaattttttaaagtattttattttgatacattttgatttgttttttttcatgtttttatgggaatgccgcgctaattgaccacataacattggcactataaatttatttcgatcaatccttaccgtgtttttgtaactgatcaggaactgtgccattcgcttaagcagaaagtgatcaaatacaacacacacacgaatggtggaccattttttgtggaatgggacgaagcaaattgcctcaaaaagcaattcatttgggagcacaatttttggcttcatttttaatgggaaaatgcaaaattattattatttggtcagcatttttagtaattaggaaaagatgattccttatgctgataagataattaggctgggaaattttaattgaggttttgcgcggtgggcgtgccatccttatctatacgtatgccatctctccagcctctcttcctagccctcttctcaaatgggacaaaattccccaggaaaatgataatcatatttttttggcaaacaaaatttattaaaatatttaaatgaaattttttagaaaataatatttatttattaatgggccattagttgagaatttatttagcaaagggagagaaatgaatgtgtggcaacgagttgtttaaagcgtataacgaagaaaaaaatcgcatagataaaaggacattgattaagaatattatggaagaaatatttcggagaaatataataaaagaattactataaatgtgtaaatccgcacaattgtatgcaactgtatgcttttatgcgatttatttctaaaccatttttttaaattaattaaactggtatgaaaatttattttttttgaatttattattttaaattttgttttaattgggtaatagtggataaacttgtttctgttttgcgctaaaaaagacacatttttgccctttttgggtcaatttttcaaaaaatttcggctcaatggggtccatgcggtgctgataggcgcctccggcgggaaagatttttgaaacttttaatggaaatatggcacataaaatgttttaaattttcaagattttgcccattttttcctgaaaatttttcaaatttcattgggcatgtgccccccccccccccacccctctggatacggcctggcgaaaggcctgttaaaaa

SEQ ID NO: 14842 - DNA, 1771 bp, Heterodera glycines
ccctatgtgtcctctattagcctgcaaaatttcaaaaaattcaaaaaagtttatggccaaaaatattcgtaaatctggcctcttgtggccataattttgctcaaacttgaccaaaatttttgaaatttaggtgagataatagagaactcttagggttatcaaataataccaagaattaaaaatttgagttgtctttgacaaaagttataggcatttttttttgtttaaaagtttttgcgaaatcagttttataaatttttcaaaaaaataacataaatagttttactgaaatctattaataaaattcatgaaatcggtaaaaatcgcggtccttttccgttttgtgacccccttgaaattttcaaataaaaagtcatttctagggtaatttgtggtgcagatcacggatatgactagggatgctaattttatgtaacaaaatttgctaaatatgtaaataaaatatgtataaaaaatgctaaaatatatatgaaatatgtacaaaaacctccaaatatgtactaaaatatgtaaataaaatttttttaatgattattttttggaaaaaaattcttcgtaaaaagtgaaataggcacaaaatgccataaaaatgaccaaaataggcttagaatcacatttgaatattttacaaattaatttttgatatatatgtagaaaaatccgaaaatatgtaaaaatatgtaaataaaagtcccaacttttgttcgcaaacacaaaaaagaaagtgtttttcctactaattaggctatggagaatctaggaaaaaatatgtatttacataaaattagcatccctattaatcacttattttttgtgaaaaattttcaatttttttcggccatttcttaggggtgtatttttcgtttttattttttgttaaggattttttaaaaaccgaaaaaggcacgaacaagaaaataaatattcagaacattctgacaaatcagaacatttttggtaatcgttacgatgattgcccccctatcatttaactatttttggactaaaaatgggaatttaaaattttgaattttcgactttttgttattactcctctctaaatggaaaactctcgcaactgcacaaatttattgagatttacaaaatgttatgtgattttgacatttaattaagtttttcgctaaattcaaaggaaaaatcacatatcatacataacaaaacccggaaaaggggaaaatgagaaaacgaaatgtaataacaaaggtgagaaaatgaaaagtaacatcagtgggagtaaaatgcttgcgatccatgtgaatgaaaacaatttggagacaacgatttttgggcaaataaaaacgcaagattagctgaaaagataggccgagactacacacaaattgggggggggggggaaggacgctttttaagcgaaacattgtgagaggatgaagggagtagtgataataatatcagtggccaactcgtttagtcagcttcattcattcaaaactgtcccacaacgaggagacggacgagtccatccgcagcaccaccaccaaaaccattcatcacatgtgcacagatgccgagtatctgaacacggaaaaagaatgaatctcgaaatctcgccgcccgaaatttaaaaaaattttcgaagatagataaatgtctaatgttttaatgagaaaatttcaagaaaaaaaaattcttccagcgttttttcgattccaaacgtggtaagacacttgcggcccggacatttgcggcctgctgaaaatcatacatt

SEQ ID NO: 14843 - DNA, 1347 bp, Heterodera glycines
  unsure (1)..(1347): unsure at all n locations
aattgtcaattggtttgtcggtgattnttcttgggatcgctgtttggttcagcaccagcaaatttttgccaaaggaatatcagttagtaaataaattaattattttacaatttttttataatatatattttttcatttagcttcctcaccccattttagagggggcggggatccttatttgctaactatttaaaatttaaaaaaacgagatttttttagcctaccaccacctccggcattgactggcctcctaacggtgaacaaaccgaaggtgttagaaaaattgttggagggacaagttcttgggcctgaatcggctgtcatcgaaaatggtaaaattaggagaaaataaaatgtgtcagggtcgtatgagtcccaaaacatagttagtcccaaaacatagtctcagccgtgtcatttgggaaaaagtcaattaacttttttttttaaacatgagtctttaaggaaaatgaaaactgtcaaattaaaaaaaaaagaattcaattaattaatatttattctatttttctaaaattagggaaaaactgaaaaatgttggttttttacagaaaaaaaataaatttctcaaaatattttgtttttttaaattattggcacttttccaaatggtgccccccccccccaaaaaaaagaagcaaaggaaggctttttttgcaaaattttttatcataaaagtcgttaaaatttcttcaagaggttttctgggtgctgattacgaatctgacatcaattttaaccaatccccaactcgaacaaaagtcgaaaaattcttataaatttcgttgttaatcaaattattatgtcagatttgtcaacagctagttcgggaccgggaccaaaacacgtacaactgagtacctaagtcccggttttgaccagttttgacagggaccgggaaattcccggtttttcccggttttcccagccaaaaagtcccggtttttcaactcgaaaagtcccggtcccggttttgcccaaaattcccggtcccgacctaccctaccgaaaactcctaagaacaagctttctcgaattttgcaagcccacattgtttttaataaaatttatataaaaaaaaaaaattcgggatccccacctggaaaaatgtcctttgaaatctgtcagatgtgatttacacctgcacattggatggaatgtgtttgaaaattgtggacggcaaaattgagaaaagtgtaccagtgacggcacatgcgacaaattgtgatggtaatttaatattattgttttaaaaatattgggttattaaactaacttaatatttttttaataattttcattatatgagctttgatgtcatggcaaaat

SEQ ID NO: 14844 - DNA, 2222 bp, Heterodera glycines
  unsure (1)..(2222): unsure at all n locations
atatatggactaaaaaacacanaatatggacataanatatggactaaaanctgccaaaatatatgttttaaccctcaaaaatttcaaaaaagttgtgtatattcaatatttgcttaaataaacttaaaaagtacaataaacaactaaaaaatggatttaaaacttaaaattgctaattttttattgtcgtccgttgtttaaaaaaacattctcaagtttgccaatttcaaaaaaaattcgcattaaaaaaagaaaaattgcaaaaatagcgaaaatatttattaaaaatgccaaaatgaccgacgaaaactcaaatttttcgtatttttggggtgtaatttttaaaaattttcaaaaagtctatctttaggggtgtatttttcgcttttttgcatttttcttgtgaaaatttgccaaaaatggccgaaatatggactaaaaacacaaaaatggcgaaatatggatttattcccgaaaatacccaaaatatggaatttatatggaccaaaaaccctcatcaaatcaagaaattttaacgtagaaatgctatttttaagcccttttcttcatagcatatgcgcaaaaaaaaatatgttaatccatacaattttgagccctagtaatcagaagcagagaagggaaatgatcgaatttcaatcgaaaaatttttggtgaagtgaccagaaaatatttgtacttttttattttattttttcaatgctcaaataatgtcggcgcataaagaaaatttggaatttttaccatattgtttaacagattttttcaatattttttattttatttttcaagtttgaaaatttttcattaaaattttgacatgtcatttttattgtcggcggtgtcgaaaggcgcggaatggtgaaattcttaaatccaactgtatgtaattaggcgaaactgagttgccgggttggtcatttagtgttcgcgaatccacccgtcctcccattaaaattattaataattcactttaataaatgtcaaaaattattttaaaaacaattcaacaatattcaataagcataaaatattttatgtatcaaaatattaataaaaaaaaattcgggtagttaattcagcaaaaattgtaggaggcctgaaacgcacgaaaaacatgtttttagcttagtttgaagcctctaggacggatttctatatccatattttctaaatttttccatatttcgcgatttatgtccatatttccatattttggcattttttccaaaaaaaaaactcttagaacggccccttggcctttttgaccctctaaagaccagaaaattttccaagaataattttttagcaaaatttcccacttaaatttatgtcaaaaataagcaaaaaagcgaaaaattagatattcgggttgagttattttatggccatatttcgcgtttttatatccatataattacaagccctaattatataattcagtaataatttgcttgtaaagcataaaatgattttataaatgtaaaatatgaaaaaattcaatgcttaactcagctaagtattgattaatgtaaaaaatcaaaaatttactttgatcgaaaattaactgccggtgacgtaaagataatggcataaaagaacaatgctttcccaagtgagaagcatcaattcccgatgccattcctaacaatttcatctcccttcaaattatcacccacccataaattaattacccaaacggacagaccgataatcgtttaaatgtctgtttcctgaataacaacataaaggcaactcccccggggggccttaaacccatgctcttataaacctgaaatgctcaaaccgactgatcccccgagtctcgagaatatatgcgtgtgaaaatcatcaaatttctaaaattctctatctacaaccttagatgaaatcctttttgatgtctgcaattccgaatactcatgtcattttcacgcttgataaagtgccaaaatattgcttctcccctctaattttttgagaggtttaatggcaaattgatcaatcattaatattcactttcatcaaattaatccgtccatatcatcttttcaattccgtcaaattgcccaacatttactgaagggattatacaaaatccaagattcacataaacgacttttgaaagcaaatgacaaaactcctcaattgccgcggttttttaccaaaacccaaaaaagaattgtagcatttcttttggctaa

SEQ ID NO: 14845 - DNA, 1649 bp, Heterodera glycines
  unsure (1)..(1649): unsure at all n locations
atgcaaaatgatgccagggttgccactcgtcngaaaatgaaccgggtccgacttcgctctctcgaccagaaactcgaaannccgagccgaaaaacttggtcgtggttcgtgataaaagattagatcggtaaataattgcgagagcaagagtcaaaatttagtaaactaatattaatattcaagggcatggtgccaacgcgccaaacaaacaaccgtatttactgaagggggtgcaaatcagggctgcacgcaattacggattacggatttccgtaactgagaaaatcgccgtaattacggatttccgtaattgcaaatccagttgcgtgcagccctggtgcaaattcagtaaatatgttaatttcagtgaagcactcattcatttctcgcaccctacaggaaaatatgtcatcattttaaataatttaagaaattattaacatgaaaatttcgaaaaagtcgaaattttgaagttttttctttgtcatttttctattatcatttctccgaaaaaagtcaattaaaaatcagacaattaatgaaatattatatatattaattagttttttttagcatgatcattattaatttctctgttattttatttgttttaatttcacccattttgccatcggcatttatttcaatatgcgtacgaccgaacactttgagttatgtgggacgactgatgtgtaaaagcaataacattatgcacgagattaacaaaaaaacggctgaaaaagaagatgcagtaactggtagatattcatgcatttccttatgggtggattttcgaaaatgtgatcagaatgaaacgaacgcaatgatcaaaatcaccaaaactgacaccaatgaaacggttggtactgcaaatggatgtgatttatgtaatttatcaatcaaggtcgggttgggataatccatcttgatttggaattttttgaatatccaggatttaactgtatgagcaaccaaaatttttgtgtatatcaatgcatttttagaaaatattcgaggtccaaaaaacggatctttctttttccgacttaccgattgtgctccccttcggcgatcaaccttcaaccgacaaaacattcaattttaaaagtaaaattccatggatcaacgaaggagatactcttggtattaaaattggatgcgatgttggtcttgaagattatgaacactatgcaattggaagcgcaatttatccggagaagatcaatggacagcttgccagtattcatatcaccgtcaaactgtacggtgatatgattaaggttgtgcatttatgtggcatgtttggagatatcaataacaaaattgaaatcgctattattcaaaatgggaaatggaggtaaaataaatttaaacaaaaattatttttaatttggtgcaattccttctttaaatacgtcacctctgatagttttttggcggattttttgtttcgaaaaaagatagtagaacctctaaagtgagcgtccattgctgagttgttttagtgcattttacggtgaggaaaggccgtgggttcgagtcccaccggcggagttaccttttagttttggtgtctaaactttgtgcgccatttaaggcttagtttatctattaatataataccgaggaaaaaaggtaaatttattaat

SEQ ID NO: 14846 - DNA, 1483 bp, Heterodera glycines
  unsure (1)..(1483): unsure at all n locations
tgagtccctgcgattgaaatgcttgagggtcgagtcccagttatgnaaacgcaggagaattgagtcccagtgattaaatgcaggagaattgagtcccagtgattgaaatgcagaattgagtcccagtgattgaatgttggtggattgagtcccgttgatcggaatgttggtggattgagtcccgttgatcggaatgttggtggattgagtccctgcgattgaaatgcttgagggtcgagtcccagttattgaaacgcaggagaattgagtcccagtgattgaaatgcaggagaattgagtcccagtgattgaaatgcagaattgagtcccagtgattgaatgctggtggattgagtcccgttgattgaaatgctggtgggttgagtcccagtgattgaaatgttggtggattggggaccaggtcgttttggcgccgacgatttggcgccgacgttttggcgccgacgttttggcgccagggtcgttttggcgccgacgttttggcgccaagccaaaaatgaaaaaaaggcaggaagaaattgtaaaaattataaaaaaatgaaatttttcgttaaatataataaatttaacaaaatgaagaaatggaaacaaaaaatgaaatttttcgttaaatataataaacttaacaaaatgaagaaatggaaacaatttatgggttcatatgataattgcgcgaaattccacggagaaattctaaaataatatgaaaatttggatttatgtggtaattgtgatcattttcattgttcgggttcaccgggatgcaattctgcaccaaattgaagaggcgctcatcagccgcttggtatttcttagctttccgcggtggctcaagtccagcaagaaatgacgcatacttcccatcggtgcccttctgctcagctctttgatagacttcgtcagaaaaattataacgatttcatcatttctacccccccccccctacatggcgtcaaaacgtcggcgccaaaacgttttggttgttttaatctattttagaaacaaaaagagaattttgaaattttttattttcgattttttattcgaatttcggctccgggttccgaattggtcgaaatggatgcctggttcgtgagcagcgaccctgaaaaccattggaagcatgttttcatgacttttgaaaacaaaaaaattttcttcaaaaaggggggcaaccaacaaccatcggcagtattaccttcgcgaaaaatacgtttttttgttgttttacaaaatttttcgaaaatttttaaatttgggtgtttttcttttttttattatggcttggcgccaaaacgtcggcgccaaaacgtcggcgccaaaacgaccctggcgccaaaacgtcggcgccaaaacgtcggcgccaaaacgtacggcgccaaaacgatacggaccccagtttttgaatgtggggtggcgttttgtatttgttttgcgttaaaaatgaattcaaaaaaaagaa

SEQ ID NO: 14847 - DNA, 1154 bp, Heterodera glycines
  unsure (1)..(1154): unsure at all n locations
agatcaattnaggttggttttcaaacacatatccaacagggatccaatccaaaaaaccatgcaatgtgtacagagtagcatatacgagctgagcattgtcagaattctcctaaacaaaaattaagacaaaattaagggtgtgaaaaaggcgcaccaaaatctcataacaaagtcggtacacttcttcaaactgcccacaaaattgctgcttcaactgtatagccctcgacgaggtaaggccggtcccaaagtcaaagacttcttcgctgagcagacgaagaatggccatgttgttcatgcacagagactgtccatttcgactggacccaacaatgtcactgatgaaagttggccaaagacgtggccactcatgtttcacgatctgaaggaaattagtgccgaactgcgaaaaagcgcaaaataacgacctgcaccaagacgaggttaagtttctgaagcaacagtttcattcgttcacttttttcggggtccgcactgatgtccaaaatcatgttgacaatgtaacctttgatcccttcgcattgatcccttggcaaagccttccatcgtgtttggatcagatgctccaaaatttgcaaaccaaagtatttcgtctcgagcaagtcactgaaaaaaaaacaaaataaaagttagggcttaatggcacaaaaattaaaaatgacagtacggacaaaagagtaaatttctaaacgagttcgaactcttttctttactttaaatgcaaaaatccgctttaaatatactaaaaggtttagattttcctttgtttaacgaagtatttacagcttgcttttatcaaaatgaacgatttgaagctttttgtaataattttgttggtgggaactaaaagtattaatggagaccaaaccattataataatgaatggtataataaaaataagaaaattaacctgaattccaaaattgtgtcaacttttgtccaagaatctgcgctttctttgaagcgggccaaaatgtcagaagctgctttctgtgcttcgccagtcgaacggttcataagggtgacgaccttagaaaatgtcattagttgcctcgtcaatgcctaaccaataaaggacttttattatttgcacattaaaacaatcgaaatacgaaggcaacaataaaaaaatg

SEQ ID NO: 14848 - DNA, 696 bp, Heterodera glycines
cggaccccccccccccccctctgtcccacaaaatttttggaaaaagcgcgccacaaaaaaagcgtttttaaagcagaaaaaagtcgtcgtaaatgaagaaaatgataagtgaaaacaaaaaaatgttggaaaaaatccattccggtgaaaaatacaagccatttgaataaatattaaccattttgcattgcatataataaaaattttaaatgtccttgaatttcatgaattttccccactatgtccttgcaaatcggcatacccgtccttggaaacggagcatggacgatggcaaccctggtttatagcttatttattaatatgacaatatatcctctcgcggaccatcatcattagggagtggatttataagtttttgcttattttttctgcggctttaactcgacgagaaatgcatgaaaaacatcaacccaaaaaaatttcgaaaaatatgccccctacgaatcgaccaaaaaattttctaaaaaatatacccctaagaatcggcactaaaattttcaaataataggctcataagtaatgacggtccttgtttgcatccattcaaattttgtgcaattaggtgaagcaattagaaatgtggtaggtcagggaatgccaatttttgatgcacatgcatgtattcgctagtgttcacaaggaggtggacaaggtttatggcgaaaagccaactga

SEQ ID NO: 14849 - DNA, 1053 bp, Heterodera glycines
cttaaaatgtttcaagataaaaagctttgaattattacaaaaatcaaaaaaaaaacgaaccttatcactgttcaattgttcagcacaaagtgcgcgatatatttttgaaaacgcccggcacaaatcgcgacggcactcgaattgcccaacactctgtgccgtggccatattcagacgggcgaagtcactgaatcagaaagaccaattcaacggacagtcgcggcgtaatggcgacagaacacaacgaaaaagcgtttcagaagttcttcgcttttgacaatttcttcgaccgacaaatgattaaattggcggagtcgccctgaaaatttggaagatttgtcaaatttaagtcaattttagagggaggggtgaaaatgcactaaaccagggctcccatccgtccttgaatggcaaggacgtccttgaaattgggccctctttcttgaaaataaaaaatgtccttggatgccaaggacgtccttgaaaatgaacatttagaaaagttttaaaaaaattcaaagaaatttgagaaatctttgtaattttcaacgatattttgattatattatggcattatgtaaataaaatgcaatttttcaaattttctcatgcttgtgaatgaatttgttacgcaattttatcgcgtttgcgacataatttatattttagaatgttcccaaataagcgcaaatgttctttcaatcccgattgggaaaagcaatatacttttgtcaaaagaagccgaaaagggaatggatttttttattgttccttttgtcaaaaggacttcaatgtcgaatcaatgggagtttcagccatcaagtcgcacactgaaaacagagtccataagcaaacggatgaagaaagacggaaaaacacaacaattgagagtttttctcgatccaaatcgacgcttaattcaattgaccttcaagttgcaacggctgagggtcatttttaatcttttttaagtgtaaaaatttgtttttaggcacttttgcttaccatgtgtgtaatcatcatcaatcgtttgcgtcaaatagcgcaattgga

SEQ ID NO: 14850 - DNA, 1530 bp, Heterodera glycines
tttaaaatttggattttcgatttttttgttcgaatccgggttcgaaatggatatcagattcggattctacgacaccgataacctatagaaacaactttttataaatttcaaataaatttaacaaaaaaaaaattttttgttgacacaaaacccacaagtacccgatttccttttaaatttaaaaactcaaaattttttttttggtattttggtaacaaataaaacaattgtatgatggccaattcttctcaaattgttccgagcctttctcttctcttcgcctccttttctttgctccgttcgtccttttctttccatttcttttctttcggtcccaaaagttcgtcctttttctcaaattcaacagtcaggtggcactttggcggaagagcacttaaatttagttaattaataatttctaaacaattagtcagtcgattgtctaccggatgatcatcggggcgagacaatccgccactgctgctgttcgtgaccggacaaagcggcgacaactcagacatttgttgttgttgcaatttgtccatcaaccgtcgctttttgaaccacttgttaactaattttttttaaatttgattcaaacgatgatttgttgaagagagaaaaagtggagagagaaaaatagtgagagcccctgcgctagagagaaaaagaggagagcgggggggggagagatagagagaaaatagcgagcgctcctgcgttagtaattaattaccccgtactcgttaattaacgaattaccccgcattggttaactatctaaattaccacgaatttattaattatctaattacccggcactgattaccatccattaactgattaccctgcttctccgtaagacacctctcttgcgccaaccgctgcttcacgaccgggctcgggtcggggtcggtccgataatgttctctgagtattttgctctgcaaaaatggcattttttcgaaaaagttcttcctccgctaattatgtgaatggtgacgatacgtcagtgtgaaaatgcgtcagtgattttacagtatttttaaacgagataccatagtattcattgggtgccatttggtacccatactctcaattttccccaaaataaaatgaggttctttaatttcttcattccgaatgttgaaccctcaaatgtacatggaagtgggaagtgtggccccagcggggaaaagacagcgtaaaaatgatcaaattaattgtacggtgctaatagtgaagggcgatacacgttgcaaagtgatctgaatttttaagtgtgatttgtatgagaaggaactacctacagtataccaattacagtatatatatattcacaaattctgaaaatttacaagttttacagtcttcagttacagaatttattttttaaaatacaatatcattgacgcatttgcactaatgagccgccaattatgggataattattccttgtcaatttgcactcaccgtttcttccctaaagcaaaagtccgttcttttcccggtccaaattgtgcgcggcaa

SEQ ID NO: 14851 - DNA, 1947 bp, Heterodera glycines
  unsure (1)..(1947): unsure at all n locations
tttaaatgaattttttgataccgtataaacctgcttttccctacgtatganaagctggtcagagcacgcatgttttcgctgataccgtatgaactcccctctaatttatttccctaccgtatgaaagctgatcagagcgtgtgccccgagggcagcttcatgtattggcacatcccttagcattggaagagggatttcgttattgtcccatctcccgagctgttggtatgagttgagaagctgaaaataggccgtttatagttgaatccgatgtaatgtttaggcgatctgccaaacagcccggattttggggatttgctcttttcatagtttcccaaattcaacaaattggtcaactattcgcactcctaaatgttctctctctatagcaaccacaaaaaatttggttaatttcaaaaaagtcaaggccaaaaatgttcggaaaaccaatttttagtatgagtgttttttttgtcataacttttttgaaaaataaacaaaataatttttaatatgttcgggaggagctgagaaccgatgacatttgttttcgttttttggcgaaattttcaaaaaggtacacgaaaaagctttttgtttggggtatgctttttcaacaaaaaaaactttcgatgaattatgaggggcgggcggagaaaattttggaaaatattattttataaaatgatgaaaggacgaagacccagaccccaaaaatcaagaaatttcttgactcaagactctcgcgttttcctcacagtttgtgcattagcaatttacaagacaaatttcatttattaattataattatacaataaatcatttttatgtggtttctgcttttaagacttacttttcgaattctcacatcgacattttgaagaaaagcccgttctcttttgacgagaaagtaatacaaaacggaggaagaatttcggagaacggaccaacggaaatagaaaggaaaaatatcggccaattcggcaataagttcagggggcaattgaattttgtggggacaatccatggcttaaaagcaattaaatacttaattaattaattagggggcaattgaattttgtggggacaatccatgggctaacagtaatttataaattataattgattaacgggaagtgtgcttatgtatgttgaaaaggttggcttgggattggggagggcaatggaacgcaaaaatggcgaaaatcaattagactaattaatacaaaacgaatggacaaaggcgttgttggttcttctcacaatcagcagagcagtcaggggtcaatgacaaaatgtacaaaaaacggtgattcaaaacataatttttgtagcaatgaaagctttaacttatagagttcgaccttggcctggctccaagcctgacttggccatgctttttcttggggttttgtgcagataacaaaccaaatgaaaaattaaggcccaattatggttaggaacgaaaaacctgctggttaatattttagatcaccatgacacttttctggaatttgtttgagtcattaactaattaatgcccagcaaggtcgccgaaaattccaaagggtaagaccatttttgggtgtcatggcagttcatacaatgggaggctttaggcctaagcttaagcctaggcttctgggcttaggctttgttgaaaacttttaggctcttctgtagtccttaagatcgcaaaaaacaatttcattggggagggcaaaggaaaacaaaacgacgaaaaaaaatcaattagactaatatgggaaaaaagaagtaaacggtgttggtagcgtaggaggtcaattgcaaaacgtaaaagaaagccgaagaattttgaaaatacacagccctaaaaatttaaaaacaacaaaaaatgtttgacttttctgacagctatgaaaatagatccatgtcgctttatttaaacacctcatcataacaatt

SEQ ID NO: 14852 - DNA, 2058 bp, Heterodera glycines
acggaaaaattggaattcgaaataagaaaaattcacttcacagcgaactgtgatactaatataatttaattagctaatcaatctacaacgtatttccaataaatatatagtcaattatgatgaatagccaacatataaaaatcgatgatcagatttattaatttatttatattttttaataaataaatacaaaaaatatttctctaatttgcccaaaacattttattcattttcgtcaattatatttaaaaatgaatttgtggatgttaattttaatgtttggccctattcattcagttcgaattcgaaaacattgggtaaaagggcaactaaatgatgaagtaaacagaaaagactttgaacataatgtaaccgatcattcttgcgcaaatgccaatcattctgctgatcagattgcgaattttgtcctttctgatcaatcaaaaaattgtggtaaagacagaaatgtttttgatcaatcacaacaaagtgatgaacccaatgatagagatgaaaaagccaatcactctgttgatagtttggagagtgatcaatgtcttagcaataaatccaaaagtgagaggaaatgtaaatttgctgatcaccaaaaactcagaattaccaatcaatacaatcattttatcagtgcctatttgcgaaaaggaaatcattcgaaaaatgaatggggaaactttttgaagaaattggccaatgttcttggcgtaaaagggcgtacaataataaaatggaaaaaacaattgggcattgatgtggagaagaagcacacggacgaggagagaatggcaaaattggaaatatattacaaaataaagaggcaaaatccgaaaatggcacttatggacgttgcggaggaattgggcatttccatgggcacattaattaattggaaaagcgaatttaaagacattggccaaagtgtcaatcaaagcgaagaaagcataaaacagcaacggaagagcagcaaaaaagggtaattatgtttaattaattgagttaggtatgttcaaatattttggtgcaaaaattcataaatatttaatctctataaattttgttaaaaatttatttataaaacattaatatttaacagaaatgcttttttgagcttctttcgcgaaatcattcaatttataaccctaggtaattaaagcttaatacaaggacatttctgactaacgttttttgttaaaattcccaaattttttagtcaggcttcgatttcaccgactaaatcgttctcctctaacgatgctttttgggcgtggaaaaagtcggcaaagaaaagaaccgttagaattgtattgtgaataggatggaaaaagtcggaagaccgagtgacgattcaccgactgtaattagttgccgcaatcagttctattgtatttcccagtttgtttccctagcgtttttcaatgtaaagtataaaaaagaacaatgccttgaaattcgggaatgaaattaaaagtcatttggtgtcatgcgctgcaaatcggaccttcttaggggtgtatttttcgtttttattgcatttttcataacaaattttggcaaaacgccaaaatagttgaaattattatttttttttaaattttgtaaaaaaaactagaaaatagttgctaataactcgaaaagtagcttaacaacagccgaaaaaacatgtttttcgtgcgtgcattccaagctatgggaagctcaggaaaaaaatagtgaaaaaactataaattggagccctagttattattgataggaattgaataaaatagttgaaaaattgcatctttcacccttcaccttccgacattttcacctttttgggctttcacctttttcgtctctttcatatccttttttggaccgaagaatcgctttaacttcttattttgttaattgctggtaattattgatgcggtaacactttcgaaatttttcctaaaaataagttggggtcaaaaagccccatttttcaaattaaatgttcaaatgttatattttttgattgtccattctcagggatggtccccaggattttttccaaaa

SEQ ID NO: 14853 - DNA, 1857 bp, Heterodera glycines
  unsure (1)..(1857): unsure at all n locations
aatcccatgatcggcattggcatccgcggcactcgtcggcacaaggcgtctttagtcagccgatttgtcgaaggaaattggatcatcagacactcatcagccattagcaaattttcatgtgatttggcccagaagtgtgcgcaactctctaacggaagcaaatgaaaatttttagaaagaaaccaaataaataaataaaaaagaacagcgaaatagcagtaaaatgaggagagcgagagagatagaagcgagagacagcgagttaaaaagagagagagagagagaaaagagagtaagcatcaaaattactcatacatttcaaaaaatcaatccatttaatattattaaaattgctttttttaataaaagtgcaacaaattaaaagtgcgaaaattgatcagcaacgaaagcccagcggaaatcggtggaaatttaataaattgtgggagggaagttgcgaaaatggaaatgttcacatgaattccccaagcttagctgatttttgcagagccaagacaatataaaagtcgggaaatctgaaggaaaaatcacttattaaatttaatttaataaaacaaaattttaaaaaatcgaaaatggcaccactttttatttttctgttcgttttgttggcagtcgaaaaaagcatcggcccattatcaccaaattgcagtaattcatttactaattaatacctattntaatataattaattatttttcatcagttcatttgccgcccatttcttccgttggaagtgccaatgtttcacacaaaatgtttctgttccacaaggcccaaagctaaaaatatcagcaggacaccaattattagcaaatggccaatttagtaaaatcgattaataatttgtttttatttcaccgatttttgctttttttagaattgccaaaaacggaaagccaacggaaagtttctgtaaattctgcgcagcaaattgtttctgacgagcgaaaagtttcttcttctgagctcgaaaaagtgccgggggcttttctcgaattttctttgcccgttgaaaagcaccaaaattcgcttggccaatatttggcggaactttcaaattattatcattctgcgcgactccacgttccgccgagtacaattgcgagggttttgctacggatgaaaaatgaaatgaattttcattgtatcaaaacttcggccactgaactaccgtacccccaaccttggaaaactttcgtgtcgaaaaagaatcgaacgattccaacggaatgggcggaaacattcgcatcactttcattgacgagtgccaaatttgtagtcaaagtgaattgacaatgagcaaattgatcacaatgagtccacagcaaatttcggtgacaaaaattgcgcaatttttaaaagaattttaaaaattattttaagcaaatgagacttgactccgacgaatcggacatcgattggtttttgggaagtgtcattcatttgttggctttccaaacttatccgcttgaggaatggcacagtcggaacaaaacattggctgaccaatgccaattggacggcactttcaaaatgccgcaggttttatttaatattttatttaatgtttaattttattaattttgaatatttattcagacttccgaatcattttgtatgtttctgctccaaaacagcgtcaacaaaatgctattttctgctgaaaagctccaaattcctactgattttcctcatggtttcgagaaagagtacgccattcttggccaaataatgatggtattattattaattaattaattaattcaaaaactaaaattctttcgtttttaattcatttttagaatgctctccacgccgattcggaaaagagaa

SEQ ID NO: 14854 - DNA, 419 bp, Heterodera glycines
ggggacctctagagtctgactttctcgcagtgattttgagattaccgagtcggtaaattgatcggtttcttttttatggtccctcgcattattttcatgttaatttctcgagtctgaagtccgattctctcatttatcttattgtttggcctatgcctctgatcatttaatcaacattttccctttgacaaatttaattgtcttcttttgtattcttcaattttgataacattttccataaaaatacactacattttatgttttttcaaataaataaagtaaaaaaacaaccgaccgaagggaggggggagggggatgagtggaagagattgtcagaatgataggtgaaaagggggaatatgacgagaagggaaattggcgagagagggagggggaagggaaggaggaggggggggact

SEQ ID NO: 14855 - DNA, 1450 bp, Heterodera glycines
aatcattttgcaattacattttaaaggtccatcagagtaaagaaatggcactgaggggaggtgctgcgacgtggcgaaggtccgtcccaaattgtgccgacaaaggcactgattggtgcgtccactttcagacatgttcgccttaagcatttggccactgatcagtatttgtccataatgcccatttcggaagagcgaaaagagtcggacagtcggagaccgtaaaatgggggaaaggcaaagcaaaggccgtcctcgtccccccgttcagtgcgtcgtccgttgttggccatgccaattctgccgcggatgcctttcaactcgactcgtccgccttcgttttggtgcccaaacattcggaggatccaattcgagacgacaatttgctcttctctttggacccatgcgcaaaatgcagcacagtgagtctcttctcacattggtcgacctttgtttgcttaatgcttttccatttgtttctcatcagaaagagtcgcgcgtgcccatcgacacttttggcaatttccaattcccatggcttttcctttcattttctccttttcagttcggctttaccattacaaagtgagtctctttgatccgtttccgcctgttttgtctgtctttcattcgttttgtcttttctttcccaatttatttgctcattagtccggctgttgggtgcacacgacaaacccccaaatcacctccaatttgttccactcgagcaaaaacgagaagggatgggtgaaggtcatctgcgaagggcacaaagttgacaaagaggcatttgcgctgttgccggtgccgcccaacgaagtgcgcgacttggactttgccaacgacgcgtgccgggcactgtcccaatttgtggatttgatcagaagcggacgaagtgttggaaaggaggcgatcaagtggggagggattttcgatgggaaggcaatttggataggttaacattggcacccaattgtttttcgatttccattttccccactgttcactcgacctttctttcgggactgatcgtccccttgatttttttttaattttcaaaatttttggaatttaaatttccgaggggctgggtaacgtgtggtgcctttctttcagctccaccacccaacttttggtggatgccattttcttcgtcacaaatgcgtccaatcacttggctgatccgttgcgtctcttcaatttcaccccaattcgcgatcggcaaaagttgcttcgtgagcagggagttcttgcgcaggttgaccacttccgcctgttttgccgcaatgtcttcttttgttaaggtgttcgctctgcttaaagcgcctttcatgccaaggcaagtcaaaggaatcgatgctttttgattgcattttgtgaaaatgggtcccatatttgaaatttaaatttgtgccactttaggcaaggctctggcgaagtgcaacccctt

SEQ ID NO: 14856 - DNA, 1902 bp, Heterodera glycines
tatacatcaattttaaaacgagaaaaagccaattcaatcgtcaaaatccaatgaaagagaagtatcaaagaaccaaagatcaaaaaaagttcttttgaaatttgaaaacaaaatgacaaaaaaattgccaaaaaaattttgaaattttatttttattcgaactcgaagtaaaaggtaaaaactagggttcggaccccgcccccgtcacccccgcccccgccgggggcgggacaggttttttggcttcaccccccattttttgtcaaaaaatatattcactattaaatgtgaaatgaatgctccgtgccacggcacaaaattttattgaataaaagcaaaagcttttcacatccgtcggagggataaaattcaatttttgtttgtttgtctgttcttttctgtgtgtgtgtgtttgatgaagaattcaatttaaagttcaaacattgagccgttttcacaggaggagaattttgtttaaaacttataaattttttgccaatattttccaataaaattttgggggatttaaagcgtttaaatttaaacgctaattgatttggaagattaatgtgatttatggcattttttaaaccaatttttcattcggttcgatgacatcactcaaaatttaaaaaaaaaatgaaaagaaattttttcttaaatattatgctgtagcctctaagtgttctcaattaacgattgaaaaattgtttattttgattgctaaagtcaaaagttatggtcaattattttttgattttgaagattaaatccgccgccgatgaattaatttatttgagggattaattaggtaattaaatgctaaattttggtaagccaaagaaaataggcacaattaaaatttttataaaaacattttaaaatagaattgatcagccatttttaaatatgtgcattattaacatgcaaataaaatttggtggattttagagcatattttttgaaaaaatatttataaattaattttgcaaaaaaaaaaatattaaaataatgaaaaactcagaattttttcaagaattttaaaaccaataagcgttgaaatattttcaggttaagaaagggttaattcaaaattaggcaattaatttttaaaaatttgatcatccacaactcattttaattagagttggtcgggaacgggacgggaattcccggttttttcaggtcccggtcccggtcaaaaaagttggtcccggtcccgacttttctggtcccggtaagtcccggtcccggtttttgtcaaatttcccggtcccgaccaactctaattttaattgatcaaaagctcgtcaaattttgcagagaaacgtaatggaacagttcaaaatgtttacaaattttcctagaatttttttcacccgaggaaaatttatttaatttacaacatttgcatttttttaaaataaaataatggaaaactcaaaatttcgaaaattaaaaaaaaaaaaagcgttttgctctaattgaagcagtgaattttttaaaataatttttcgaagtaccgtattccttgaaaaatcacaaattaagcgggtttaaaaattgttgaaaaaacgccggcggggccttttttcaaaatttaaaatacccaaaaccatgccaaaatatcatattttggatgccattccatctattgggcccctaattttcccattagcctcccccccccaggcccatcgtttggaggagagtaacaaattaaacgcgcttttgggagcggatgggaaaaatccatcttagaagcagccgccgccgctccagcggtcaaaaaatacgcgccgcgcctcatgggcaaattttttatgttgtgccgcttaaaaaatgccctccggggcaatgcgtgtgccgtgccgtcgtcggccggaacaatgaaacaccata

SEQ ID NO: 14857 - DNA, 1995 bp, Heterodera glycines
gccgccattattggcattttaagtgtccgtccgtcgatttggcaaacccttaaaaatcggtgaccccgcggggttattagaagcaccatttttcatgaaaacatttttcaaagcgtgccttgtgagtgggggggggggggctaaaaaactgcagcaattaaccccggcgggcacacaatgcgtaatgaatgaatggttggcacgccatccgccgcctccggcgaaaaaaaataaaaagggacgggcgaaagacggacagcggcccctcgaggcgctcattttgaagttgggttggcaaggagcgttttgtccagttaatgaaccttatatggccgaaggaaaatggtgccatggaaaaggcggcggcactttttataaatttaaaaaatttggcaaaaaaaaaaatttaatttggaaaatttggccaaaaaatttaatatttagtgtgcaatcaaaaattgccaatgaggaagagtgcctaattagtataaattaattaatatgaaaaaattaagcaaaagtagaaaagggagaaaaatggccgtacgaaatgccaaaattggaaaaaataaattaaatgccaaacaatgcgaaaaaaataaatttaaatgccaaaattggataaaaaatatatttaaatgccaaacaatggggaaaaataaattttaaatgcacaatttgattcactggacaaatggtgccattgcatccaacggagggggagaaaggccattattattcataggactaaagccttcttgacaagcccagaaaatcccccggggtgaggagcaaataaatattaaatgcaaaaacaaaatacgaaaaaaaaatattttaaaatgcatttttatgaaattaaaatttatttgatgtaaatttttgattattattgtttataaaatatatttaaagcataaaatttaaaaaaaaatgtaaatttaatgaaataaaattgaaaaaataaaaactatattaaatattaataaaataaatttttcaatatttttcgaaaatatttttcaacaaaaatttttttaataataaatttaattaaattccttcaacaaatagaatatttatttttgggacctcggatttgtagggatccagttttttttttacacatttatatcgatctaaaaatcaaaaatatattttttaataatttatttattttaagataaagaaaaaaaaaatgctgcgtgctagcgggaccgaacccgcatttgataatgtgatctgtggctgcgctgcgactgcgctatttgcatgccgccaggaactattataaatgttataaaacatatattatatttaaatcatttttataaaaaaaaaatcaaatcaatttttaagaacaaaatctcaagggaaaccagcagaaaaaatgcatattaatataaaaaataataatttaatttttaataataattttgcaaatacttaaaaagcaaataaaaatagaaaaatcatttaaatcattttgactaaattcccaaaaaatccaacaaattaataaataaaccatttatttatcaaaacaaataaatatttatttaaaaaaaaagtctattaaaattgcaactattgcaacagaaaatgccaaattaattggcattttttgccaacaaagaaattccttttgcctccgccccccggcgttttggcatttgagtgcgtcggtcggttttagcggtgccgtcgcccctcctcaaactttaattgtttatcgagtgagttttgcttccattgctgggaaaagcatgcttttcgctcaatgccttaggctcttttaatttttttttttttggaatttattgcatttcaattcgattttatgccgaggattgcgagaggcctggggatttttttttgaaactcggagccatagggccggggcacgtcagaatttttagaaagccggtgttttgccgaaaatgggagaacggcgctggggattctaaaaaagtgaacaaacaaattaaatttatt

SEQ ID NO: 14858 - DNA, 985 bp, Heterodera glycines
cgtcatttcgcctgcctaacaaaaaccaacttctgaaccgtattggctttaccagtactcattttttgaatatttccagtaaaaccgtaattttaacaaaatttagacaagactttttatttttatatccaatatgtgaatttggaaaaatttcacttttgattttttgttagaattcgggtagtggattcagaattgttcgaaattagcataatttgtgatcattgcccccctaagagaacgcttcagttaatgttttttcttttattacccattagcggagtttacaaaataaccaagtatcgggttaatttataatttattatttcgaatgaaatcttattaagcacttgcggatagttaatttggtgttaactggtgaaagttgattgaataaaattagtccaaatttaagagaggctatatgtacgtttagcaaacatttttaaatttttgaatacattcactaattacgttaaaaagaagagtgatcatccaaaaatgtcaaaagtttttgatgaaattaagttttttactcttttcgtgataaattctttaaaaaagccaaataattccaaaatagttgatttgctaaaaattcgccccaatcattcctttttttttttgtgggctttctaatgatataatttaatttttggaataatgattaataataaaattacacttgtgtagaccaacatgcctcccattttaggtggtcatatgtttattgatcactttattcaatcataataaaatcaatattatatgggccaaaaattctgaaaaaatacttgctaatctaacttttatgctgatcaaaaaagtcttttacaccaacttgatcagatcactgcttcatggtgatctgaaaacccaaaaatggcttgaaatcgggaaaattttcgaaaaaaccctagggggttggtaaaatttttctggaaatttttagtaggcccactgaaaagagcacaaaatttactac

SEQ ID NO: 14859 - DNA, 873 bp, Heterodera glycines
atgctacaaaaaatgccaagagactgtgccgttatgtgttcatcttcggtttttatcaaaagatttttagccaaatagagagtgatcataaacatatgaccatgactgtattactaaacaaatattgtctcatatagttcgcttagggttaagtagaaaaggcggattagaaattagaacaaaaaataatccttgaaaaacttaaaaaaacggaggttgcattataactgaaaagtacagaaaatcctagagagttgtaacaatttttgggaaaaaatgaaaatataataaattttcacaatcaactgaatcgcctttgtctctttgatttgtttcactgacaaatcagataggaatgatggattttaggccttattaatgtggataccttgaaataaagttatgttttgtgaacgtacagtacctttccttccggtctctacataataaacatataaacccagctaagaatggtactgatgatatacatacaatcgctttcaccagttagcaccgaacgagattaccacaaaagttgtttaattagaatctcattataaaatatatcgcaacatacatttacttaaatgagttcaattcatggttttttgtagattactgtacctaaaacgactttttgattaaaattcagatattaaaaaatttatttttttatttacgagagttaacagggaccaggtgaattcaaaaatttcactttagagtataaagcttatttcatgatataaatgttcttaaaaacttgtagaattagaaaaaaagagtaataatagacaaaattacgtgtatcaataatctaaaaaggtgaaaatttgcaggcgaaatgacatttaaggtatgggcgaaggacac

SEQ ID NO: 14860 - DNA, 2357 bp, Heterodera glycines
catgggcgaaatgtcacatactgtaagaaaatgttggaatatcttttagcacgcaattgcaaatgcctatactgtcgctagacaagtatatgaacaccggaacgttggtggcacattctttgcggccaaacacatagagatcgtgttccaacccgctgactggccgatcagcggtggctcatgtggtgcggcagcggcgattgcccttctgtcaaaagcagaaaaggaacttgcccgagtggacactgtggtgtcgggaggaataatgccaaatgggcacatttcacaagtcagtggcctggcgttgaaaattgaagggtccagacagcaccacatgcgccggatcctacttccgagcgcaaattttcaagaagttgccgaattgccgccgaatgtgacacatgggattgaaattgttttcagagcaaatatttggcaaatcatggccgatatgtacctatcgatgacaaaccttcctgctgtttagtttttattgttatgaaaaatttaccgctttttatttttggctttttattactttattgcttaaatttaaaaaagtaccatcaaagctttaggtcgtagtaaattgtcattgcatctgttttaagcgatgtttttaagaatttcagactcgagccaattgcaaatttaaactaaaaaatgaaaattataacgagaagaaaggacatttaaaaagaggatttatgggaagagagagaaggattcaatatgacaaatggcaagaggcacggctggttcccatgttttgaaaattgctggcatgtgaattttaaaatattctttattttgcaaacttttaggtgtcaagatttcgtgtttatttgctggggtttttccaaattttttgaactgtggaaggtccggcggagccgttaaaacaccgctggaattatgaatttagtgtgtttttgatattttgaaaatttggcattttcaacttttaagccaaaattatgaaaatgtaaagttccggaattttgtgctaaatggtcgaaatatggaaccggaatatggaaccagcccttgtaagcagcaatcaaacaaattttttatgaattttgtttgatgtataacagagagaagaaccatatatatgaagaaggtaaacgaaagataccaagaatgaaattttggtttgatttgaaaaaaaacagaaataagtttggtgttgtgttgtgtacgaatcacggactaacaggcattgcagcgtattcatcggagaccatttcgacggcgatggcaccggcggtgtttgtgtcggtcagagcaacggccggtgattgggtgttggaagaagaatccataggacgagagaccgacgacgaagaaactgttagggatgaagtgattttttttctgaacttggcatgggtatgggataggccgttatatacccggctgaaacgtcgccggatggttttccgaccattacttttttttattcaaattaagctttgttgatgttttcgatcaacgtttcgatcaacaacgttttgtcctgctccggaaattataaaaccattatttaaaattatatcgcctgcacaatttttttcaatattaaaaatttcagtgccgtatatttttgcgatttgggcaaggagtccgacagtaaaaacatgcgccctcggggaaaattagaattttgaaaggattttgttaagaaagggtgggtcaatttcagaaaatgctccgatttaaacaatcgcgctgaaaaattttgtttgaaatattaagtgacaaatcgcaggtagcggcacgcgctccgccccttatggccatatggccacttttcacaatgagaggccagcattgtgacggctactcctcctgggattggtcagattcgtagtcgtcctcaattctgatccgtttcgttgtcggataatttgtcgaagcagcaacagctcgatacgcagttgttgctgttttttgatatgtatgtaaaatcatcgattgcttttgtgcttatttcggggtttccccccccccccccccctcccctcgtgtcgtttcgtcccgagaatttttaaaaactttaccgagatttttttttttagaaattttccaatgtaagccaagacaataaaaaaaatccttgaaaagtgaaaagttttatgaaagaaacctttttaaaaaaattttgagtgcaaaaattaaaaatttttgaatagaattataacataagcttttgtttcatgttttttaaggaaattcaaattttcgccagattgaatattatatcaaaaattgggctgttcacaatttgcggacgatgaatttacggaatgcagagcagacaaaaatttttctcgggactcaacccttctcga

SEQ ID NO: 14861 - DNA, 1061 bp, Heterodera glycines
  unsure (1)..(1061): unsure at all n locations
cgcaaaggagcatataagaaaatgcaaatggcgaagaagggcaaggagaggaggaaggaaaagaacggacagcggagaaagggacgcgacggaggaaagacaaacggcgcaattgccacgaacggggcgaatactaaaggaaatggggggggggggatattcattggattaagaagaaatggaaaagctgatcaaaagaactggcttaactgatcagaatggctaaaactgatcaggagaattgatgaaactgatcagtcaatgtccctcctcctcctccgcccgcgtccgccatactttgtatatttcatttgctccagtccaactaagccaagtgttctccaattgcgaattgctatcggtttgaccgtccaataggcgaaaacaaaggacgatgaaaccgctatgaatggtcgaagccaaagacggaggaaccgaagcagaagtgccgaaaccgttgtcacctgctgctggacgctccaaggcgatcacttcctcgaagctaactgaaccgaaattcgaagcattgaacaatttgatcgccgctatttggcccttttgcttcttctctgttgcccccccccaccgaattcggcttttcccgcgctcattcggttcatttcctccgccatttctgcgctcgtctctccgctgtcaaaagcggcgcaatgaagaaacggataaagtgctaacagagccattagttcaattgatagattttcgttgcttcattacttacgctccgggtccacacaacgcaaaagcaatgcgcgggagagagacggacactgacggattgggtcaatttgagccaaaaaatgcgactcggagaaaggcggcgaatgattggaagaaaaccgactgaaagaaatgaacggaaatgccaaaggaataggggaaacgacggaatgagcgacttgaaagaggacgaacgcggcccaaaggcaaaaccaaacagaacgaactgagaatgaccacttgngggcattccgtccgtttggctgcccgaaaggcattctctgctcatccgatttgtgngcggcgttcgctgattgctgtaa

SEQ ID NO: 14862 - DNA, 1715 bp, Heterodera glycines
cgaatacgaagcggaaaaatatggacttaaagaagaaccgggaatggatgggaaagtaaagaacaaacgagaagcgtcaaaacggcagaacaaaggagaagcgtcaaaacggcacccaacggatgatcccaataagccaaaagatccattttttggacaaacattgaaaaggcactccttccgtgtcccaaataaaacaactcatattccttttattttcttcaaattaatttttgatagtttatttctttccaattttaagttaattaaagttacatttaccaaatactttttgtaagtacttgtcacagatataagacaatatgaccgaattccaatgcaaatttaaaattaccgatatgatataatagtgaccgggaattaatgggaatgaaagacagtcaaattgtacaataatgagctgggttttgagtgagtgacaacgtaaggcgtacatatgaacaaatacaataaatcctcacaattatatggtcaagtaactggtcaacgaaattaagagagttgaacattcagaagaggagggatagtcgggcttcatttaatgtgagttttcccaaaatttttatgttattaaattgtgccttaaattttttggagtttttaagaccagtgaattggaccagtaagaagcgcctaacaagaactatcagaatcaaagtgttaatttctcaagaattcttcactgggacgaaatctctacgcttcagaattatttcgctctctgaccaaatagcttaaattgtggttcaatttctccagaatttcgtcttcatggcgcaaatactcacattctttcaactgaaaatcttttttttttttttagaaaatgaaggctttaaattttctctcccctccataaccaataaatagggaacgggacattcccatcggaatctatggaattgtttgtatcaacttgccagtctttgctcaatatcaaagaggtgttcatcccacgctttcgggaccattctccgttgacagtcggccaatcgcaaagcgtactccaaattgcttccgcttggtcctctgcttcgaataatctaaaagccaagggaatgaaaggccaataagcagggatgggaaggatggtacttgtttgacaatttcgtcgatgctcgtgggaactgagtgataaatgttgtcgcccgcttccgagatgtacacgcacagttcaaaggggtcagacccattgtccgggtaaaactggacacattttagctgaatttaaggtaatactggagaatctgggctccacccaaaaaaaaaatttttcttgtaaaaaaatgaacccggggttttcggtgcttctgatcacgaatatgatatcaaaatttgcaaaataattgactttatcatttattttgaaaatcatagattttagaaattttgaccaacatggcagggtaataaatgttgattgtttatgttttcgattgttctatgatcatctcattggttaataaatagtgatgatcatatatggttgcctcactcggaaaaatgcagcatttgatcatgttggtcaaaatttcgataaatctatattttcaaaatcaggataaaaatcaatgatttttttacaaatctgatatcatattcgtgatcagaagctccggaaacccccgagttgaactttacacagcattaaaataatttttttaggtggagcccagattctccagtattaccat

SEQ ID NO: 14863 - DNA, 1659 bp, Heterodera glycines
  unsure (1)..(1659): unsure at all n locations
ttggagattttgaagtggaaattgtttaccacaaagacattaaattaaatcacaccaaaattgacaaatttaccggttgtcggtgtgagttgatttaatgagttttgttgtccagtttgactttgccattgttgcaatgcactgctgattggcatacctttaacatttaaaactaatttattataaatatttgtcttaaaaccttcttctgctggctttggtggaccaaacgattgtatcagttgttgttgaattaaattgtttctttctacatcccattctaatttgtaatttttccattgttcttccactaggttaattaatgcttctttgtccatgatgccgtatttccttgccaaattaaataccgtccattgctgttgtgccgggaattgtaggtaagcttcgatttgcattaattgttcaaccaacattcttcgctcatcgttcgttttactcttctccttgtccttctgtttgtcttttccatcattggtagtgttgcaactgaaggcaaataatgccaaaaacaccagacacagaagaaccaagggataactgatggtgcctttcatctttaaataattaaaattaattaaacttttattaaaggaagtaattcaaattgaaaacacagaaaaattaattatttaatttttaaaaaataattaaattatagaaaatcaaataaaatatagaaagaatttttaaataaaatcataaaaatatgaatataatatatttaatttattgatattttttctgactattttctttcaataaaatacgcattaaataggcagaaattacatcactacatattttttaacttatatgggtaaattaaagcttcataaataaaaataatatactatgcacaatatccgaaaattctctttaataatacaaaaaagaaactctgaaaatatggctaaaatttccggaaataaaaaaatcagcagtctttaaagaaatgtagaatgttgcaaaaatacacttgtcctttattgttcaaaataggcaaataatattttacattttgggttttaaattaaagttccactatgatgtctttaattttgtacatcaaacaaaataaatgatcataagaagcaaatcttaatataattgggtgatttaaattgattacttcgaatgaatgaagtaatgagttgtttttattcacatttgctacgacaaatttttaaaaatatatcatttcaatgtttcggcgatgaatatttaatgatactatgacacaatccaactttggcaattcagctttatctcaaatccctgcccaaatgtatttaattaatttttaaaattttattaaaaaaattcaatagaccttttaaagcaatttaaaagcaaattaaaaagattgggcgtgtcatacagtgcgaatagttgttttataaaaaaaataatcttacaagaaatcgtcttgaaaaatatccaaaaaatcagctacggatcaaaattaggaaaattccaaaaatccttacttctttanaattcagacactttttaatagaaatgaaataaaaatgtttttttacgcgatgacatttaattatttttaccctcttcttgtattttctctctatctctctcttttctattcgccctaatcatttatgtccctctttactctat

SEQ ID NO: 14864 - DNA, 820 bp, Heterodera glycines
tgaattattaacagattttattaagaaaatgaccaaattttgttattttcgccaatatatttacagaatttctaccaaaaatgttcaaatttgctttaataaatcttaattttccgggtctgggaaccggtcgggtacccggacccgtgcaaaaccctaaaataaaccaacaaaaaatatttttacaattatttttacataaagtaaactattattgctcatacattcgaaatgcttactacctattatttgctaaaagttgaatgttcattagttataaataaaaattaatattaatttttatacactaattacaaaaaacaattgcttttattttatatttattcacaaatatattaattataaatatttatccataagataggcaaaaaaataaaaattttcaattcgttgatcaataacaaagcaacatgtaaaactctccttgagcttgtgaaagtaaaccaatattaaattaaattgactaacttaatcacaaataatttaagttgcaattattcatattcccggattacattttaccaatatcgcaataataaatatttaactgaatgtaaaattaataatcatcgttatgtattttaaagaattgaaaaattttaaggaaaaaaacattcagcaaataaataaatattaactagtaaactatatattcattcatcacaatattactgaataatttttgggtttttttagagaaagcctacgccaagctatatggaggctacaagggataaaaattggcaaaaataatttaaaaatatttttcatagatttataattaaagttgatcctttaa

SEQ ID NO: 14865 - DNA, 979 bp, Heterodera glycines
aaaatgcgtcagtagaaaatgcgtcaatgatacaactattttaatatttagttctttagtattgctactgtaatatagaagtataattctataaaaaatctttcagaatttcgaaccccgaacccgaattcgaacaaaaagccgtaatccaaaattgtcgaaattagagtttttgttcaaaatcggtttaaaatacacggaaacaaactcaaaaccatcaatccttcaataagagatcatttatgccatttttgaaccaaaaatgctaaatttgaaaatttggactttagagttttcattcgaattcggttccggggttcggaattgtcccaaatggataccggattcgtattcagtgccctcgaaaatgcaatgaacttgtttttatgacaaaaaaattttcactgccccttttctactgacgctttttcccactgacgcatttaccgggcgccttgaaagttcgtgatttgaaaattaatttaataaaacaatataaaaaaccaaacaacctaaattaatgaaaatatagtatatttataaatttataaaagtgaattaattgaaaacatcttaaacaatgtactactggctactatattataaatttataaaatagttgcaatcgtcaaactgatcatgattttaacgaaaaatttcttttttctatattaattatttgctgattttttttaaatttaaaaacactaaaataaaaattaatccaaaatttaatgtaattaattcattttaaaatgacttaaagaagattaaacctgaatttaaagttagtaagaatgaataaataaacaacaaatattattaaatattatgaaatatgtgcgtgagaatttttataataaaacattaactaattaacagtaattttttttataatattttacttattaaaagctaaaatacaacattaaaaacaaagaaaaacacacgttcataactgaattaacttatgtgaaaa

SEQ ID NO: 14866 - DNA, 1461 bp, Heterodera glycines
  unsure (1)..(1461): unsure at all n locations
tttcgattcacctttattacaactattttatttacagataatttttaaaatggatcccggaactggcttctgtgttatctatgaaaagcacaaactgccaaattgcgtgtgccccgttttgcgtcgtcgctttgattttgtcacattccgaaggatttgcattttggcgggttgtgactacttgcagggcggccttcaaggcgttggattgaagacagccgaagaagtgttcacaaaggcatccagtcatgccactctaccgagtgtttgtcgttcatttcggtttcatttccttaatatttgcttttcaggtcctcgttcgtctgcaattgtacacaaataaacgactcaaagtaaaagtggacgctgattttgtggacgcctttgttcgcgcggagaacacctttttataccaaattgtcttcgatcctttgtatgttatcccttttccattatatttagaattctttttaattcgtagaaagcgagaacagagaccattgaatgcctatcctgagacaggggaagaaaaggttttttgtctattttattggtaatgtaaaaaattattattattaattcattcaattgcttttttcaataataaataaatttaggaaaatttgttggacaatgaaaagaagtatcattatgcgggagaagtaaggtgatttggtcagttaaattcgtcgtttttcggtcgtttctccacggaatgcccttcgccttgccttgggaaatgacgacctttccaagtcgtcgcttgaggatgaatttgttttgcccagtgaaattcccgtgtcgtcaatttggaacagcaattacaaaaaagtgttggaaacggaaaaggaccaactagaaaaagagttggacaacaaattcggggcttttcgggtacgattttaattatttaaatttttacaaaaaatttttagccaaaaaaatcactcgtgaaaagatcggctgacaatgagtcaatctctactcattgtcatgacgaacgcaaaagaacgaacaaaggggaaattgatacgatttttacgaaaagacgtcgtttctctgagattcaaatcgtaagtgatcgtttttagtaagagttgaatacctttacatgagatttggtttttaagggaagtgcagcaccgcggaatggagcatatacaaattggacagcaagggattggatgcgaatttatggccaacttacgcaaaaggaaggggaagaagaggaaaacagctcctccagaagtaagttggcttacataaaacctgcaaattttcttgaatattcccttttgccatttaggttctgaaatgtcttcccaatgagcggtggtcacttgtcttttgattgtgttttanagacttcgtttcttgaaagtttcaatctcttttttattctcttattccgaattgngcactttctttctcttttttttgaagtatcactntttcatcttt

SEQ ID NO: 14867 - DNA, 1605 bp, Heterodera glycines
gttcagaacaaattggtctcggcagagtcaagtgtctcctcctatccgttgaatttttcaaatgaaatgaatgctcggcgctccaattctccccccgtgccgccccttcctttagcccctcctccgcgtcgtgccaacaaccaacatggcaatttatgttgcaacaatcacaacgatatcctcgtcgacattttcggacaaaacaacgcacacgttcttcctgcagtgaatgccaatgaaatattcgacgacgaattcgacccgcgagcggacgagaaaaaaatgggacaaaacggtggtcagaacgacaatggagaagcgatgcctcacaatcagcaaaacactgtcgagcagtttgaagcgctgctccgtcgtgttgacaagcagtacgtttgggcaaaaatggcgaatttgacgggtatttacgaacttattgttagttcattaaaaaatctttaggtcacaaaaaggaagggtttttcttaatttttgatattttcggcttttcacacgaggaaatttttttatttaagacttgctgatgtgcagaacaatttggacgaatggaatttggagagaggcgaaacgggggactcgggccgagattggtccataattgaagacgaagagcagcaaaaggaatgcgaggaggagagagaaagaaatgactgtccgcgctaatcgaatgacagcgaaacaccactgacaattgacccatcactttcacttttcacccataataaatccgaaattgtgatgatttaataagccttgctggataacgatctacttcacttttaccctgtcagtgcaaaacctgaaaattttcagatttaatttcctaaaaatttttgcgcgctgacatttttaatacttaaatccatctaatcataatttaagccagcttgtaatttgctttctattcagattgaattttataaatttgtacacgcttttgtattgacaataaaaattagacaaacttcggaccgaaataaataattcatgtaataacaatcaatgaatatatacattttcatctaatttgttgtttatttgattttcattgctttcctacagaatatagtgaagatgccacgcgaagagaataaggacattgaggaggaaaggttggggtttttttggtatttccaaattcatttgacgtcatttttcaggcgcgcgaaaacggcctacgatttgatgcgcatcagactgaagagactggagaagaacattgtccgttgctttgctgcgcaatggccttagttttttctgtttcaggacaaacccgtgccgataccgaccaggcgagaagagcccaagccgaggcctccgccggaatttgtgcggaatgtcgtcgggtcatcagcagcagcaggcagtgccgagttccacatttgtgcgtgtttaaacaaatttataattgatattcaattaatctaatttcaatgtgcagttcgcaacaacaaacgacgggaattggaacggttggaatacatcgaaaaaatggcagtaaaagatgaaaaggacaaagaatttgaggagaggagaaaggcacggagagatgaggaggagaaaaagtcggccaaaaagagggagaaa

SEQ ID NO: 14868 - DNA, 1123 bp, Heterodera glycines
tccgaacccgaattcgaacaaaaaaccgaaattcacaaattacaaggaaaacatgtttttagggagcttcgaggtcgctgaatatggatatgaactttattttgtcaaccgccattggcgctcgtcagactgcttcctccgccctccgtctcgccccactacttgctccgtcttcgcatgctcccttttgcgaaaatttacttcattttttaatcagttcaaaaaccggtttatacttgtcggataatcccccagctaaggaaattttgagcacaattcgttcatacatgccaccaacttagcctgcacgcttttctggattatgaaaatattttgttgattttcatttgttgaaaaaatccaatttgttagagttcggattttttatttgtaaaatggatgtaatatccatattcagcgacctcgaagctccctaaaaacatgttttccttgtaatttgtgaatttcggttttttgttcgaattcgggttcggggttcgtttcgtgatcagcgccacaaattaccccagaaatggctttttatttgaaaatttcaggggggggggtcacaaaaccgaaaagaaccgaataaacgagtgaatgaaatttttacggattataaacacgggcaaagtcaacttgccatgttcgaatggagagaaagtgccagcatcgacattgatgtacgggtcgattttgatcacagtcactcggtaaccgcaacccttcaataggacaccgatgctcgacgacacaatgcctttgccaacgccgctcatcactccgccggtgacaagaatcagtttcactggttcctctgccatcgaaattgagcaacagcaaaagcagtccaattaataaatttaaaaagaaattaaaaatgtaaaccaaaccaatataaaaatgaccaatcccaaatttcagatctcgactcaaagggacccaagcagaaatattttctttcctatttttccttaaaaatttataagggcccttaggggagatggaggaggaattttcccgcaaaaatgtcaattacataatctcggaaaaggcaagaaattcaaaaagaaaacaaaaaagtatgtgatcaaatatcgtggcattttgtctgttttataaa

SEQ ID NO: 14869 - DNA, 885 bp, Heterodera glycines
ctcgcgattgcctcgcagtgatcaggaccgttacattgtccgtttttcgatcatttcttgtttatttttagttttttataaaacatttacaagattgaactctcccgttgtcgttctgccgattttacgtctgcttcgccattgattatttttgctattggaagctcctattttctggattctaagatgaagtttggtccattcagagtgcctttttacattttaattggtgtcggcacagcagcaatttctaccattctttacaagaacagttgcggacaaagagttcgtcaagccttggccgaagaactgcgcaaagaggtaacaatggctggtttgcctgggttttatggcatttcgataaaaaaagcaccgaattattggaccaaaaatattcatttttccgggtccttatttcgtaatttggcctggggttcgagcatgcttggctgcagtttatttttatgatacttgataaaaaatcatagaaaaaacattgattttcgaagtcagattaaattcgttaccagcacattttttagggagcagctcgttcccccccagagaaatttttcttaaaaaaatttgctaacttagaaatttttcaagaaaaaaacttagaaagtttgttcataagaaaatgctaagaaaaacaaatttcagcgattttttctaagatttttcaaacaattttccaaaaaatcgctgaaaatttctcgaaaattttttttcttagaattttcttatgaaaaaactttctaagattttttcttgaaaaatttctaagttatcggggggaaacgatgcgggggaaaatgaagtgcaccccattttttaccccagaaaagactaaaataaaattttaaatttattttttcggaacca

SEQ ID NO: 14870 - DNA, 1170 bp, Heterodera glycines
caaatacgggggagatggggtcacatacaataattgcatttcgtacgaataaaaaataatattaaaaaataagcaacaaatatagtaatatgagtatcgccgtcactcagttctaagcattgaatcgcgtaaatgaccacaaagtctcgtaacaaaggcgctggttgagtgaaacatagtcaatttgggaggtaccgctgagaaccgggatgaaatggggcatattgctgaaaagggagagaatgcgcaacttctttaaatggatgatataagggggtaaaggttgtaaaaaggcatatcgagtgtttaccgcttcaactccaggtaattattgcgaccacgctttgccaactcggccgcttgacggacgggagtggggagagcgggtgccaaattgacgatctgccaattgcaacacattgcaagcaaaaacctaaataggaaataatacataaaacagatgggagaacgtcaaccaaaactggttatactgtagttacccttctccgcttgaaaatttttttatatgaatttcattaaaaattaaatttttttaatcatttttttcaaaaattgttccaaccgccgaaatttctttcaaaatttagccccctcattgtcagttcattgttcttatatatgtgaatgaaagattcattcattgaattgacataaaacagctaaaatgtaacattcttttacaacacaacaacagatttacccctgaagttcttcattgttcgcattcatttggttgacagggaacacatactgcggaattctagcagtgccctaaaaatagaagcgatggaacaaaacaacttcaattgaaaaagaagagcactttaagcggagtgtgtgcttggagccaaaactcgtgagtgtccacgctggtgaccttcgaatcaatgacacatcctaaaaaacgcacagattaataaaaaaaaataatgcgatctgtgtcgggaatttatttaattgtcgtaatcgtgaaaggaccgggcgttgtgttctccgcttggtgctgctggccgcgaataaaaaagcgtttgttgtgccctttgtccacaatacaataaacgaacttcgggcgccagttggcatcgcaacgatggcacgcctccgcatacaccggaaactcgtcatgaacattctaaacgaaggacaaca

SEQ ID NO: 14871 - DNA, 1604 bp, Heterodera glycines
  unsure (1)..(1604): unsure at all n locations
caaatgcctgcaccaaacgacattccatctctccgatcattccttggtatggtaaatcattaccaacaatacgtcaaaaacatgcggttcatccgaaaaccgctcgacgatttgcttaaaaaggaaattgattggagttggagtgaaggatgcgaaaatgcatttcgaaaaattaaggaaattttggcatcagatttgctgctaacacattatgatccaaaaatggagatcattgttgcagctgacgcttccgaattgggcatcggagcggtcatttatcacaaatttcaggacggaaacatcaaagcaattgcccacgcatcaaaatcactcgcccctgcagaaaaaaattattcacagatcgaaaaagagggcttggcattgatttttgccgtacaaaaattccataaaatgatttatggacggcatttcacattgcagactgaccataagccccttgtcagcatttttggcagcaaaaagggaattaggcagtgcagtgccaatcgtcttcttcgctggtcattaatccttttggcctacgattttaccatcgaatacataaacaccaaggattttggccaggcagatgcgctctcgcgcctcatcgccaaaggaaatgagcccgaagacgagaaaatcatcgccatgatcaatgcggaaacagattttgagacgaatttcgacaacacaatttcaaaattgccattaaaattttcggacctaatcgctgcttctgagcgcgatgaaaacatttttcaagtccaaaaatttgtcaaaaatggctggccaaatgaaaaggccatggacaaagaaaatcaaattgtccgtgatttatgtcgaagaaaggaagaactttcaaccgaaaagggatgccttatgtatggagaaagagtggtgatcccgaaagtcttccagtcaaagattctgaaattgctgcacaaaggacatcccggcatgaaaaggatgaagcagctggcacgccaatacgttttctggccaaaaatcgatcaggacattgaagattttgtccatgaatgtgtgccatgtcaggctgctgcaaaagcgccgattaagacaaatttacaatcatggccaaaaacaacaggcccttggcaacgcgtgcatatggattttgccggtccgtttttcgggaagcatttcctaattgttgtcgactctttttcgaaataccccgaggtattcgaaatgtcaacaatttcgacggcaatgacaattgaaaagctaagatatttggcttcacggcacggaattccagaaacattggtttctgacaacggcacacaatttaaaagcacggaatttgccaaatttacagcggccaatggaatcaaccattttttctcggctccatataatcccatgtccaatggacaagcggagagatttgttgacacgtttaaacgtgccttcagaaaattaaaaggggagggaatgtcatcagtgaaagaaataattgagacatttttggtcacatatcggaccacccccaatgattcgttgccgaactcgaaaagtccagccgaaatgctcctgnngacgaagccacgaacaactttggacctgctgaagccacctccaat

SEQ ID NO: 14872 - DNA, 3110 bp, Heterodera glycines
gtcgactgggcgggcgacgactcggcgctgcctttgtccgccgctcccatataaattggttcaattgcgcttcatccgccgctctctccgcactttgctcctccgtccagctgctgcacgtcgactgtgccaacagttcccaaagtggcgtatcatctattaggttgtcggtttaaagcgaaccgaaagtggaaaaccgagaaaactcgatttcgggatttggttttctctttggatcgggggaccgaatcgacgcggttcggtttcggaccgaccgaggcatttgtactaaattgtaagcggcaaccctggccccgtcatcagatcagctttagcattataatcatcgtcactaccatgttggctattccgcgtgctcgttccatggcggtggtggctttgtgaattctgtgccatggcacttttttgctcgcccatccctccgagtgctccctttatctgttcctgttccgtgtccgaatttgtccgccaactgcttgtcggggaagcatttgatgagccagcattagctgaaactgtcaacattcaacctgttcattttttcaacattaagcggtaaataattaatgaattatcggagttattgtaatttgcttttgtcttatggcattttttggactaattatttaattgctctcttaatgattttcacgttttttagtacttggatttgaagctagtgcgcgacgtttttgctgaatttgcttgtgtattttttcttgttcagcaacaacgcgttgtgccgcctccgttctccaaaaattcggtccgtaattttctgtttgttcggcagaagtgtcaattctaaatttggcaaaatcagtaaataaaagctaatagtttctcttttttcttattattattatatttgattgttaattgttttattcgcctttctccagcttgacgaatcggcgccgttcgaatgccggccgaaatttcgtcgctgtccgggggactgggcgggtcatcgatgtcggggacggcacggacggcaaacaaatcgggatcatcatcatcactaaaaaaagaagttatggacaatttaaatcttgtggattttccatcacatgaaatttacaaaggaaaaatcacgagaaaccccacaatcttttgttttcatcaactacataagttcagcctttaaagtattttttaacgtgtaataaaaatatattaaaaattgaatcgatgtattattattcaacacaatgcaattcattaagggtcggataactgtcaatttttaattgctcttaattaatcatcagaccgaaaaaaatattttcaattgcttaatttgtttttaccattcttcgaccggtggaaactgtccatcgtcggcatcattttgatctgcggagtcgaacacatctttttccgtgtttaagatgtccaaattgtcaacctcttttattgtttgattgaacatcattttgaccgcctcattcctttttttaaatttatcattttttgaaaacattttaattaatttatggtaattataaaaaggaatgataaaacaatttaaaaattaccgttttgggtaaaaagtatcgagttggtaaacaaatttcgggcggccacttccgttttgaagcaccggatgaacaagtgagaaggcccacatttggcttaatgttgactcttgcgcctagagaaaaacatcataatttcacaaatttaatttttaatatttcagaatttttaaatttatcgagacctattgatagaaaaaagattctctcgccttaaaatagacaaagtcgcagtaatccgtcgtttgtccttcggtactcttaaaagttttgttttaaattattattgggaaggatcctaaagaaatattatgttgaagcgcagtgccctttcagtgtaattagtccgttttattcaatcgttaaaaaaggtattgagacatcgccgttccgtcggtgttttaaaagaagaatggaaattggtatttttttcttaacaaatatcattaaattttcatttcataaattatttcactggcaacgtttcacaacagccggtttctctataagcaaattatgccaatcgtacaataagaaatggaaaaatgttaggcctcgggtgggaatcgaacccactcgtgcaccatttccgtgggcagttctaccattgagctaccgaggcagttcttatcaactcccgctgcttttcgctttttaaagcgcccagtcagcttcttccttacagtatgccaattggtaccggctccctcaaaccccttccccccccccccccccgggtgaatgaatcatttcttccatcaatcgttttgcactttacctgctgctggagataggactgtttccgcacttgctcaaactcttcctccgtgatgtattccgccgagcctttttccatcgcattgccttccgcatcgcttgtcataatctccgccgcgcgttgcaaaatgcctccatagtcccgcgggctttcgtccctcgtctgctcgtcagtttgccggacgaattcgatgtccgcggcacaaacggggcatttgaattggttccttcggtttttcgatgtttctactctgaacgctttgtaaattaaaaaatgaaaataaaataaaaattaataatttacgaatcgacgaggcaactttcgtggaagaaatgctaaaatggcaaatttaatcgcgaagtttgtcgccactgacctcgcaattatgcaattgtctcgtcaattccccgccttcttttaaaacacttagacaaatcgagcactcggattctctgtttatctacaacaaaattgagaaacttgtaaaatatttataaatttttaatcctaattttgaatattattatttgacaaaaatattgacaaaaagttacgaaaaagtccaaaaaaaaattattattattattattagtgacgaataataacgttaaaatgaagcatttctgagcgtttttttttttgcatttctccccaaaacaaagtcgcagaaaaaaaaatagtaaactcccaaaattgcaacaaaaaaaattctccatatttttcttttatttctaagccacgtaaatcccaccggtgcctcacccgcaataaat

SEQ ID NO: 14873 - DNA, 924 bp, Heterodera glycines
  unsure (1)..(924): unsure at all n locations
aaacctaaaaagtacaataaacaaccaaaaaatgggggtttaaaacttaaaaatgcatattttttattgttgttcgttgtatcaaaaacacctccaagtttgccaaatttcgaaaaaattctcattaaaaaaaaagaaatgttcgcaaaaaaatgacgaaaatatttattgaaaatgccaaaatgacgacgaaaactcaaatttttcgtgttttgtggggtgtaatttttaaaaatttccaaaaagttgatctttaggggtgtatttttcgtttttttttcatttttcttgtgaaaatttccaaaaaatggccaaaatatggactaaaaacccaaaaatggcgaaatatggatttattcccgaaaacccccaaaatatggagactaaaaaccttcaccaaatcaaaaaattttaacgcagaaatgctatttttaagcccctttcttcatagcatatgcgcagaaaaaatatgttaatccatataatttacaaccctagtaattaaaaaatggttaaatagcaaattatgatgcaaaatggaacgtgttgttattgtcctctcgaaagtacaaaatagggacgccgaggttaaaatagaggcaaaatgtttcaaaataggagaggggcatgaaatttggtgtccggacttttcgacaaggctgtttcaacaaaatcatatcactaaacaaatattttattaaaaattgaaaaattaatatagaagaatagtaaattagttttaaaaacaaagaaatgattaatatttaaaatagttgagtaaaatttaaagcacttatcaataatgagggatgagttttttaggtgaatatctttttctgtgaagtggttatggcaaattacgaaaatttccattgctttttcggggcttctcggtccacttgatatgcanattttgcggttttt

SEQ ID NO: 14874 - DNA, 2151 bp, Heterodera glycines
  unsure (1)..(2151): unsure at all n locations
ttattagtttattaccgtttagctaataccgttttttaatcctttttttgtttagaacattgtccctgcggacgttgtgaaaattgcgccatttactcttttcccgtcgcccttcccacgcgaactttttgtccaagcgcagaaagtgcacaaagtgaggaagtgaataaagacaacaaaataaaaagatttagttattttatttataaaataaaaggcaattaattaattatttttcattaattaggccactcaattaattcatttttcattaatgaggccatccaattaatgtattttctcattaattaggccatcctttaatgatttttcattaattaggccactcaattaattcatttttcattaatgaggccattcaattaatgtattttctcattaattaggccatcctttaatgatttttcattaattaggccatccaattaattcatttttctattaattaggccatccaattaattcatttttctattaattaggccatccaattaatgtattttcgcgccgcgtcgaactttgaatttttgaaagatgtgcacaagggactgctgaaaacagaccaaaatttcatagaaacttttaaaagcattgaaagcagacacttggaaggcattaagcaaccgctgactttgttctgcaacagagcagtgagttgctgaaaattttgaagggataattaaattaattaatttatttttaatgttttagaaaaatattttaaaattgcaatattttagttacaatatttttaggattatatggcaagcaaagtcattgacgaagaaaccaatgaagagaaatatgttctaaagcaggtaagctaaagcgaatgattaaaatcaatcaattagtcaatgccaatcaaaaaaatgcaattagccgacactaaaatatcctttttcaattttgcaaagcatntaattattgccaggttgaacaaatcacggcgctatgggcggccacggcacttctccgcgtattacggcactccaccggcgaatgctgtccattgccggcgtcgactcgtcactgtcggtggtgccggagaatcaaactggcaaaatgtttgcgacggcattgtacaaagcatggtaagagcatgagaaaaagaggccaaaccgtacaaaaacatttggaagactcggataacaagaaaaaaaaacgaatgaatatcatactgtaagttatttaggctcactaaatgggtaatatatgaactaaaatgtgccaataaatgggtaaatgcaatttatttaatttattttttccttcatcgaggatttgaaaaatccccctccacatatgaatatttttattttttagtaagtcctatccccgattttttctgacgaatgatgttggaacaaatacacattaaaaaatttaaatcaatcctttagtcttataattaaatttctgtcgttcgtgtgccatttatagtcattaaattcatcgcaccctttggcacttttttgatcatcgaaattctattgtataattttgcccattttcagggaggcattcggcaacactgaggcggtgattcttttcctgcacaatccgtaccgcgactatttgctgatcgaagcgcgcgaggtgcagcacgatttggagaagattgcagacggaaaagtccaatgctttttcctcacattgaagcaggccaaagagcggtcggtttgtttaaatgaatttaattaattgaaattattaaattaatttaattaattaatttaattacataattactaaaatgattgcatttattcaaattaagattgactttccccgacgactcagactcagcaattctggacaacaaatacgttgtggctgttgcgctgagtcgatacactgcttacgccacatccgatgaaatagtcaccgcgcgtgcgcttcgccgttcaaatgccattgtaaaaaagaaaaatatttttatttaataattattttaaatataaagggatcataatccgatcgatgcctaaaaaaatttcccaaattctgtcctcttcatttttttctctgatattttccaaattattagagtattggaagatttggtgattccgagagactccgccggggggggggggtaattaataaatgaattagattaattttaaa

SEQ ID NO: 14875 - DNA, 1400 bp, Heterodera glycines
  unsure (1)..(1400): unsure at all n locations
cgccgatttggtggcactttntggagcgcatcggtgccgccctctgtccggcgcttgtccaccgcgtggggcgtctgttccgcatccgttgcagcggcacgtgtgccgcaacatcggcggcaatgccatttgccgaatttgacatcgatttacgcgccgggaatggctggtgtggatggacatggcagcgcatttgtataattttccaacaaaaaaaaaacttgggaaacttttctatagttttgggcagatttgcatcaaaaaattgctaatttgtgaatttttggaaaaattgaactaaattttttggaaaatttaggcgaagtagatttcggaggtggtaccaacaagcaaaatcaaaaattttaaataagaaactatttttgaaaaagtcggaccgcctagccctaaaaaagcttcaaaattattttaagcaaaagaaaataactgcaaaattacctcaccctcttcgattttttctttttctaaaaaatcacttgaaaaattttaagcgactttttctgaagtttttcctagaaaaaaattattaatgtttttataaggttttggatttttgtgctactttaaattaatacggtttatgaaatacagtgttttgtaacttgcagaaaaatttgaggtatacgaaaaaaatgtgattctcctcgctaataaaatattctctttttttgcattagtgcccaaaactcaaactttcctttgcaattttcgcattttattttttggcacttttgtctatgcttttcctctcctctgaaggtccccttccgccatgcgacgtgcttttcacgctgcacaagggcactctgttcgcactgctcgacggcaccgtgtcgccgctgtgcgcctatttggagggccgtgtccaaattgaggggccagtggcggacgcggcactgctcaaacacttggcatacgcaattggaggagtatcagcaacacaaccaccacaagcagcagaggaaggaatgatggggatggaacatgcgcaagaaggagaaaaggggggaggaggacagattttggatatttaatttgtatatatggaatgacggatgtggacataaaatgccaaatttggtaaagcgaattagaagaaataaagcaagagagagagagagtgagagacgtcctgagctgaagcagctcgtttccccccatgaaattttttttaaattacccaatttaggaatttttcaagaaaaatattttagaaaataattaatttggatctattgcactttatgagtccaattaattaacaatacctggttttcatacaataactttgttcatgttcgaacaagccctatctttttggtaccgttcgaaagcgggggaatctgaataatgtaagaatacgtgaaaacaagaaaatt

SEQ ID NO: 14876 - DNA, 1091 bp, Heterodera glycines
  unsure (1)..(1091): unsure at all n locations
tgaagcgcggaaattttgtgacnnatcgcaatggaatggtaaaatacttatttgctttctgtatacttcttactatacttcattttntcctaaagaggatactgtagcgttttccatttctaccaatatttagaccatttttctgattccacctctctctctgtctttctctttctctctttttctctccctatttctatcgctttttctcctctctctcgcttgctctttatctctaccgttctctctcactcatctctttgtctctaccattctctcgctttttctcctctctctctcgcttatctctaccgttctctctcactcatctctttgtctctaccattctctcgctttttctcctctctctctcgcttatctctaccgttctctctccctcatcaatttatatctaccattctctctttctcctctttttttctctctaaccccaaaatgcttccaataactctcccaaacagatcaacgtgtcgccgattgggcgcagctgttcccagtcggaacgtgatcaattcgtgcagtttgaacgcacgacgcccattcgcgcccaatttgtcgaggcattgcgccaacgattcccaattgaacagtacggactggtcttctcaatcggaggacagatcagcattggttggtggtgcaactctctgttgaaaagacggttacaaattttttttagcagatttagacaaaatggcaatgacgtattactattaaggatttttgacataattttgagattttcgagaagttttatgaaaatttatctagaaaaaaaaattttttttttttgtctattgcgttgtggcctttatgaaaagtggacgcagctgcttctctgtatggcacctttatacatttttgatttaaaaaatatattattttccaaaaaaagtaacatttttttaaattttaaattgtgactttaaggcaatttttaagaaaataaaggatttaaggacccggcggtggcgcaataggcctgccgaaaatatttttgaaattctggctggttttttgaacagatttctgccaaaaaaaggaacaaatttttcgtcaaactttaaaat

SEQ ID NO: 14877 - DNA, 2043 bp, Heterodera glycines
  unsure (1)..(2043): unsure at all n locations
atcggttcggggggactgcaccgaaaacaaaaaaatcgatttttcaagtgtccgtttggggtactcaaacaattatggggagcaaaaatccaacgcagaattaaagtacaggctatagggaagctattcccgaaggattcggtctccccataaatctgggcgcatcggttcagggggactgccccgaaaaacccaaaaaaaaattttttggataaaaattatttaaataaactgactagataatatttaaaataggttatttctcttcctttcagtatccctgcaaagtttgctgcgcttctgatcagtttctgaaaaaaagttaagcctaacatcggttcagggggactgccccgaaaacccaaaaaaaaattttttggataaaaattatttaaaaaaactgactagataatatttaaaataggttatttctcttcctttcagtatccctgcaaagtttggggcgcttctgataagtttctgaaaaaaaagttaagcctaaactttttgccctgtttaaaaaggaattaaaaatttttaaaaattttattcatctccctttttgatagaaaaagcatcagagtgcctaaactaacatgtaaataaaatttggtgcgtttcagaaccctttctgtaaaaatacttatgaattaattttgcaaaaaaataaataattaatgaaaaactcagaatttctaaaaattttgaaaaccaattatgggccagattttttcaggttaagttagtccttttacagaggagtacgcctgtaaaatttggtgagtttatattgattttagagtgcgctagattcaatgaaactttttaaaatttaagcctaaactttttggcatgcttaaaaaggaattaaaaatttttaaagtatttattcatctccctttttgataatataagagtcagagtgccttattcaacttgtaaataaattttggtgcgtttctgagcagtttctgaaaaaaagatatgaattaattttgcaaaaataaataaataatgaaccctcctccttaataattttcctgcgcccaaggtactcactcggccgcttcgcggcctcgtggggggccttcgccccgcacgcatgattccaattttccaagcaccccaccgaaagtagaacgaaataaccaaaatataaggaaaatatttttaaaagatgttattcatctcccttttgatagaaaaagcatcagagagccttatttaacttttaattaacatttggtgcgtttcagagcacgttctaaaaaatatttatgaattaattttgcaaaataataaataattaatgaaaaagtcagaatttcgaaaaattttaaaaacaacaagcgttggcattttttcaggttaagttagtcctttacaatggagaaggcctgcaaaatttggagagattatatcgattttagcgcgctaggttcgatgaaactttttaaaatatgagcctaaactttttggcctgtttaaaaaggaattaaaaatttttaaaaatttattcatctccctttttgatagaaaaagcatcagagtgcctaaactagcatgtaaataaaatttggtgcgtttcagagcattttctgaaaaaaatatttatgaattaattatgcaaaaataaataaaaatttctaaaaatttgatcgtccataaataatttgtaattgatcaggggctcaccaaattttgcagggatacgtatcggaacactagaaatgcttactaattttcctagattttttaaacccggtgaaaatttttgcagacaccaccacttttgcacttaaaaaaatttcaaaaaactttaaaaattcatagaaaatttaaattcataggtactactgctaaatcaacgcagagacgcctttccttgacctttttaggcccctgcaaaacctggtgcgcttctgatcactactcgaaaaatgagtgattgaattttcactanaaagttaagcctanactttttggcctggtttanaaaggaattaaaaatttttaaaaattttattcatctccctttttgat

SEQ ID NO: 14878 - DNA, 1631 bp, Heterodera glycines
ttatgacattttggaattatggcaaaaaagttaatttaaaacttttaataaaaaatgaaaaataaaatttaggaaaaaatatttttgacgaaaatattggccattttaatgcgcaagtgatttgcataatgctgaccaaagtgtttctgttattccctggcaatgtttctgtgccatttttgttggaaaagtttttcctaatttattcaatttggtaatttgaaaagatcggataaaaatatatttaattaaataatattttattgaataattttttaacataaattattaaaatatttctaatggtttatttaaaactattgatttatttgccatttttaaatttgaatatatttatatttattaattttgaagatctatttttagacggtaaatcgaatataatttacaatttttaactaaattgtattaatattggccgaatggaaattaaatatgccaaaagttcttagtatttttggtggataattttaaaattaaattttttaaaaaagaaaacctctttcttcctgaaaatttgccaaaatttttgataaaaatttggtgctaaaacaatttaatttaagatactgatgaggataaagtgctaagaattttggacgagcttgataaaatgaaaaatgaggaagaaaagaaaaaacatgaattgaaacacaattcggctgaaacaaaaacaaagcaaaaaacaaaaatggaaaagaacagaaaagaaattgagaaaatgggagcaaaattgaacaatttacagagtaattaataataaataaataattttaaataaatgcattattttaaatatatttcattttaattttttttaggacatgcaattcaactaaaaatattggaatttctattgacaagcgatgaattgttccgaataaatcatcgttttgatgaaagggtgacaaagcgaaatactttacaacattcataatagcttatgacattttggaattatgggcaaaaagttaatttaaaacttttaataaaaaatgaaaaataaaatttaggaaaaaatatttttgacgaaaatattggccattttaatgcgcaagtgatttgcataatgctgaccaaagtgtttctgttattccctggcaatgtttctgtgccatttttgttggaaaagtttttcctaatttattcaatttggtaatttgaaatggataaaaatatatttaattaaataatattttattgaataattttttaacataaattattaaaatatttctaatggtttatttaaaactattgatttatttgccatttttaaatttgaatatatttatatttattaattttctatgaatattaattgatatttttaaactttaccattgcaattgactggcattaaacacaaaacggaagactaattttgagttggacaacaacgacaatttctgctgaattgactaaaaactaataatttggaaaattctgtggaaatgccaatcattgcgccgatatttcctgaaacatatgttttgagtctgatcagtgcaagtgatgcgagaaaattaaaaacgaatttttgaatggtaaatatttaagaaatcaattttttatttttaaataatgcaaaaacatttttagcatttaaa

SEQ ID NO: 14879 - DNA, 1683 bp, Heterodera glycines
cctcctttttgtcttttttcatgccgctctcgacccttccttagcaacgggtgggcgtacagcagcggcaactgcagcatttaatgcagctcttcaaaagctgtccgaacatatttgtctttcgtttctaacgcatctccgattgtgagttactctctttatttgggcccggaatttttggactcgatatctcggattaaaaatgacagatgaatggcatgaccattaaacgtcgccttttgtgtcaacgtgtgtgatttgcccaggaggcgtatcagattccgatgatgcgacgctagttgttttgtggatcgtcggtagagacggtcatcgtcatctgattggaagtgggttgagacagtacgaggcgtgggtaggttgcaagactagataaaacgaagttctactgattccttatcgttaggaatcaaacttattcaggatttcgctggctgtttttcttttctaatgaacctcgaaatttgctgacgacgtatattatgcgtgatagagatttggattaatataaaaaataagtgctttttatggatgacggatatgtcagggcttcgatatctgaggatttttcctcattttgtagtcttttagagggtcaaagaggatttttgttggaaaatgaggatttgcggatttttgcggtcttttgaaaaaaaaatgacaaaaccgaatgattttttgaaaaattaggtatatttggcaaaatgttcgaactttttcttcaaatctaaaaatttttttgaaaaatcatcattttgcaataaattttaattaatttcctttagataatttttatacaaaaaaataaacagagattcgacagagggggtcaaaatctttttttttaaatctgttaacaaaccgcactcgaaatcccaaattttttccggcagcgcctattggcactgccggaccctctccccccaatgttcccaaaaagttttttgaaaaaccgcgccacgaataaagcaatttaaaacaaaaaatttaagagattatcaatttattaaaagatacaaattgaatttattttttttttgaggttttaaataagattaactattatagatttttatcaaaaattaccaatttgcgattttgggccaattttttaagaaaaaataggaattattggggtcaggcggcgcagataggcgccgtaattgttacaaacgaaaaatatgatagttaactgattttgttcgcaatttcatgtgttttaaaaaatgaggatttttcataccaaatgaggattttcaaaattttgagatcgaagccctgatttaattcattaaatccccaaaacaaaaatatttttaaaaaactgaatgactaatatttgttcatacacaaaaaaatcaataccgtatatgctctaattatagcccatgggggattatttttcaacctcctcagaaaaggggggataattagagactgggggattatgatagagggattatttttcaatacacctcgtagactgggggatcgttttgttgattggtcgtcgattgatttttgttttaatttattttgttattgacttattttaatttaatttggattgtctttttaattatttatcggataaatttattttgttttggtgtttgattttaaaagcaggtgttggccaattttacaaacaattagtccccttgt

SEQ ID NO: 14880 - DNA, 2104 bp, Heterodera glycines
aaaaaattacttcatattttcatttatttccaaattttttaccatgtagagaatgcgtgtgtcgtaccgctcaacacccggagcagggccatacacctttttcaacgattccagcagatggattcgcgcagcagaggtggtccatagggcaatggccacctgagaacggcaaataaattttaaaaatttaaaattttttcttacgttgctcgtgctgtgttccaccaatgctcatccttggccttgtagcagaccatccaaaacttttccgtcagcttatcgatgctgctgacctcaatcttcgagtcgttcagcagtttggccagctccgcatggcactcgacgatttcggttttggtgagccgatttctattgatttttttaaaattttttatatatttttctaaaaagttttaccgaagtgcgaaccggccccacagcgaattcaaacacagcttggacaggtagcggagcccggggttgtgcttgatccggtccgcctcaaggtggacttgggccttttctttggccttgtcgatgtgttcctgctttctccgtgccgactcctcctcgctgatgcccgcctcggtgcacttggctgggtacccgcttgcttaaaattttgttgattaattaatttattactatttcaaaatttaccttcaaatttcattttgagaaatttgagcaggtacgagtggaacagcccattgctccaatcgcacacaagccgccaaatgtaggcacggcacacgtgcatcaccttgtacccagagcggagggcggcctccagctcaatgtgcgtcacagttgtcgaaaatcctatcaagaaaaatatttgcttaattaaaagttactaaacccacccctttcagagtcctcaaaatgtttgcatttgtattcggggtcgatcaaaccgcgtgggtacatttccgaacacgtccggcacagggggaacagcgtgcggttgttgagccggtacggaaggaccgggatgtcgtagtgacagtggcggggcggcacggcgtagcacttgatgatgccctccaagcgaatgccgtcatcgccaacaatgtctgatggactccttcattccacgtccttgtcaaactgcaccacggtcgggtggccaaccgggtaattggtgtacatattccttaaaaagccaaaatttttcaattattaattttttccggcatttcataccgcgatgggtaaagactgttaaagtctttcactttgatcgttcggcttttccagtcgcccgtctcagggttgatcaccgatgcgcccaaatattcgggcccagttcgacctgtgccgaaaattattttaaaaaaattttaaatggcaaagtaccgccaaagaaggcgtcgtggaaatcaatggggccggagtccgggcagttgtcgaagtacgccttcatggctgggttgtcctccagcattgcgttcaggtggcactcccagatcatttccacctcgaactcccgcgcaatgtcccgggttcgcttggcatcacgggccctgagggcaccggctgtttctcctccgcccacaattgccgcatcgtcggggaagcagcttgggcatccatgccaatagcacctttttcaatgggtaaattggcacattttcaaaaatttttccttacccattgacctcaatggccaaatttttgtcctcatctggacgctccatcatcccatccaagctgtagttgccgaatttgaactcccctccagggctttcgacatggcggaggactcggccattctcccgcaactcttcttcggcacgccactgagagagaaatgaaaaggtaaaataaatttaattttttggtacaccttcaaatatttcctggcgatggagctctgtttgcctcgcttctcgtatcccaagtgtgggatgatggcaacccgttctttgtcgtggtgagccaactgcacccaatacttcatgcaaccggacgggatggtgaccgaatccgtgatgtcatgccgagtctcggacaagaacagctgccgcatctttaccataccatgcgccaggatttgaacatcttcaaaattattattaaaaatttttcttctttttataat

SEQ ID NO: 14881 - DNA, 2510 bp, Heterodera glycines
  unsure (1)..(2510): unsure at all n locations
tcatcagggcgctccatcatccccgtccaaagctgtagttgccgactttgaactcccctccagggcntttcgacatggcgcaggactcggccattctctcgcaactcttcttcggcacgccactgagaaatggcaaaatgtaaatttataatcatttttaggcaccttcaaatatttccgggcaattgtgctctgcttgccgcgcttctcgtatcccaagtgtgggataatggcgacgctctctttgtagtggtgcgccagctgtacccaatacttcatgcagccggatgggatggtaaccgaatccgtgatgtcatgccgtgtctcggacaagaacagctgccgcatttttaccataccatgtgccaggatttgaacatcttcaaaattattattattaaaaattttctttctttcttttttttttttttttttttataattttttttttacccgtcttgcagtaatccgcgatgacctcactcagctcaaaaccagtttcccggttctcgtcgtaccactgctcaaactttgcgcgctctgccgggaagagtccacctgggtaatagttctcaattggtggcagggtgtccagcacagtgccataattttccgcctaagattgtattaatttttatttatttttttttttttataaattcctcttaccttattgaatttgtgtggaaaatatttcttgttttccacgccctcaatttccaggccaaacgtcttgacaaaatttgccaatttgatcgggatcagcttgtagctgaaaggacaaaataaaaattattcagtttgaatttttacctgtcccgaaacacggtgggtgtgtagactcctgttttgcgcgccttcatttccaggagatggttgccttggcggatgagttcagggcggacacccatgcgcagcatttccccgtatatcagcacgtgatcataccgagagcctttaattttgtttattttatatttcaaaaattttttttaaataattgaatttaccggcatgtgcatatgcgtaagtcgtcaccgactccggcttttcccccgcttcctcataacccaacatccaattattctcggcgtcctcatccacggcatcctcttcctcatctgcttccatggcctccccgtcggtgttgtcaatgtttttcctctttctgcgcttctttgctccgggctccatgccgaggacttccgtttcgaagttcagcaaccacttggtgaaggctgccagtgggtcttcgacgaccttgcggcattccacgtccgtgtgccagaattcgaacggggaccaggcataagttcggaatcggccacaaagcgcgcaggccttttccaattcctgatcccaaacgcccttctcaatgcagcgggtgcatgtgacatgggcaaagcagaagttgacctttgaatttttcataatttgctaaagttgaaaaaacaaaatacctggtgcttaaaccgcatgagttgcgggtcgggcttgaaatccgtagtgcactcaaagtcaaagaagacgaagcgcttctccttcttgactttaggccggtatggtatgtagcagtctcgcgggtcatggaagccgagacaaattttgcagaatttttgaccgcaaacatgcccctttttcttgtcttgatcctgtgatatttattattttattttacgaatcttaaaatacaaggcctaccgccattcggtaaatcacaccacagtcaacacatttttttcgagctcatgcagattgattttcccacaatttcctcttcgttgtcacgtttgacccggcagtttgtgcatttggcatggtgttcatagcaatcacgacttttaaatgtctaaacaaaaaaattctttgaaatgaaactcaaataactttactttattgcaccccaagcaggtctcaaaaaagttgtcattgccttggacgcagtttcctcgaaaggcagacccaacacgcaggcagttgtggcatttccatttgcattttgctgtgtgttgcgtttgttgatgaaatggcatctcacactgtaacatatttatttaattacagtataaaatatattattattatagatactccaaaacaatagttgcgggcactgaacagttttccaacatttttaaccgggtcgtaatgcccgtcaccgccgttttcgccatcgataaaaagaacgcaaagctcatttttatactattccacagttgatttccacgaaggcttcatttttccaaacgtctcaaagctgaaaagccgaaacattccgggatggagcacctcataatagtccttaatgataaatattacgaagaataaaataaattttgtgcctgaattatttctccatattcctctatggaatagaagggtaggtgcatgtcaatgttgcacccctggcccagagcctgcacgccttcaagctgttttctctcatccctcttatactcagagaagcgttgtcgggcanaaatgcatttcattcgcagcattcaaacgca

SEQ ID NO: 14882 - DNA, 1897 bp, Heterodera glycines
tgctgaatgtccaattgagtgagctgaacgcattggccaatttctaaaaagtaaaaatatgaaataaaaacaaaaaaaagagacaaaccgtcgggaattcgtttcaactgattggaggacaaaagcaaaatggaaagacaatgcaactccgaaattgaggtgggcaattccgtgattttgttctcccgcaaatccatcattttcagtcgcttcaatcgcctgaaaaaataaaattaaaaaagacaaaaataataattaacaatcaaatggaaattaaagaatatttgtaaaggaaagataaagacgacctaatttctgtagaaacatttttgattttattgtaccgcagccataagctgaaaagggacaaaaaatagaaaaggaaaagggaacaaagcttttacgtttcaagagattccatctgaaaaacgacgggaggaatttcctaaaaatggaaaataaaataaaagtgacgcaaatggaaatgcctcgctgattttgttgtgccgaaggtccaaagtttcgagttttttcaacgaagaaaggctttcgggaagggtggacagattattctggcaaaaaaagggaaaatggcaaaataaaaaaaaagcaatcgaacttcgcttaggccgaggatacgcaaattgaccaaatggcccaattcggagggtaaattagtcaatttgttctaaaatccacgtaaaaataaatttaaaaaaagggagagaaggaaaagactttgtaaacgaagagttcggtcagttgagtcaaagtttggatggacgagggaatggtggccaactgaaagggcaaagaatgggccaaatcgaagggaccaaatcgaatccgaacgaacttcggatgaattgaggtccaaccgagtctcgcccatctccttgcacctcatcagctccctgccgatgtcctgcaacacttctccctcattcgattcgtttgtttttccatggctttgccaattattccctcggctcactcactttgcgcactttctcctccgcccccaccgcgttgctctgccgttcgctcagactgttcctgtacttgccccgtgcaaagttcgatattttgttgatgaggtgtccccccggcgatttgctcctcggccccccgccctctccgccctttgccgtgccggcagaaagtgcccttccgccgccgtcacaattctgcaggaaatgacagtcccccgttaagccaatgaatattcatccaatttgccgcccttacgctgctgttgtgctgcggacggaactccaacgtctgttccatggcgccattctccgactttttgtccatggaattgcttgaggaacggattttgtcgtccaattttctgccgacgagcagtgctttctgaaagtgttagcattattaatcagtttggataacataaaaacaaaaaataagatttttgtcaaaagtgccacctgaaaacagagagcgaatttgtcggccgggagaaagtgctcccgccggtcgtcgttgcctttcggttcaaacgaaacaacggaactgtttgtgctggtgctgatcacacttgacgaggacgaacaccgctcctgctgcagcaattctttgctgtgccttcggctcaacttcttctgctggtgatggctgtgtctgtggtggtgtctgttctgatgttgtccgttttgccttgcgctcgcttccacttctcctgagaattaaaaaataagcaaaagctaaaaaaagataaattcaaacgcaaaataaaaattaaaactatgaaattaatttcaaatattttcattaaagtgagaagcatattcggcccttaacaattgacagctggcggaagaagcggcgatattcgattagccgttgcaaagggaaagggcggggggggggggcaaac

SEQ ID NO: 14883 - DNA, 1030 bp, Heterodera glycines
aaagcatttgatggaaaatggcgacaaaacgaccaaagaaaaaaggaaattctgtttttcattttaagtgcgattccctccatcagaagcgaagcccaatcaaagcacgttgcagcccttcttcttctttttcttctgctgaagtgctgcctgagttgccttctcaaatacttctcggattccctaaaatcagccgaattattttttgttttggtaatccgacgaagaccaacaaacagaaaaacaaacacacctccttggtcttcgcactgcactccaaataagcatatgcaccttaaaataacaaacttatgattagcgatttgggaaatggtaaaaaaatgcgatagaatccaacttttttatttcaaaattttgtcacaaaagatcataagttttattgagtctcgagaccgcggaacacaaatccgtcacccatttcactcacttcccgcacaaaaaatggaaatctgtagaaaacagccatttgatgctgttatacatgcttttagttttcacatacttcaaatttttctgtcccatgaaaacgaatctcgaaaatttgaactgtttattctgtggttcggaaccgacaaaaactaaggccaaattcgtacaccattgaaaccaccgattactgttgaattcgagctcagaaattaaaaaataacgtttttaaaaacatttgtttatatgtaaaagcaattaccaaccaatttgttctgcaattgcctttccctgctccgacttcaccggttcctgtttgttccgtgaaaggtcgcgaatggtctgctggtcattgcgcaagtctttcttgtttccaaccaaaatgataggcacctgagtcaggggggggagggaggggaaaatttgaccaaatgaaaaattgaggttcgtagacgacaaactaacattattactggtttaatttgattaccaaaataatgtttggtacaattagtgaatttattacaataatttttacgtttgaaattgggagagaaatttagaaagttagaggatgagagga

SEQ ID NO: 14884 - DNA, 1336 bp, Heterodera glycines
ccgtggggaattggcgcaccctccgcacaaaatgggcggggaatgtgcgggaaatggcaaagaatgggggaaagggagaggaaaagcagccaaacgacaagctaatcgctcaaaaacacattcttgaattgtaagttttaagtttaattataattcagagcggaaataaattttaaaattaaaaatgattttaaaattctaaatatcctttcatttttgagaatttcaataaattaattacttttaattatattatgttaaatgcaattgaaaatgggaaattaccaaacaatggaattaatgggcaaagaatgcgtcgctttttgatgtcatcagcaatcattcgtccctttatatggtaaataatccataaaaacaaagctccttttctcaaatttgctgcattaaatggaaaacaacttatttgtttgtttgtgtgttgcttaaattatgttgaaattatcccattgaaattagccaatgaatgctaatctcttcggcccatctttcccccccccccccccgcccgtggttatccgattttgaacaagtgttatggcatttgggcccggaattggccattgtcaagtaaatgatgacaatgcccgggggaaaactatgcccgacaaaccgcaaaatgactgacggagttgcacaactcggggggaattgtaagctgattggcccaaagggatgaatttggacggagggggggggggaggaaacggtagtgggaattggaaaatgggggggagcggattcttgtgaagaattgaaaaaagaagaactcattatacaactatcttttataagtgagagaaatgataaaaatgttgttctcagaattgaagagtgattattatattaaataagacattcaaaccctattgaaatataattccaaaaacatacaattgtatgacacaatcattaaatgaattgcaagaataattgctcaaatattattcagaaaagaatatgattaaactacagacccttttttacttgcaaatccatgtattttttgcatcaattacaaggcagttaataatcacttatccattgtgtaatgagaagagatggttgaaaatctattgtacttttttcagttggatctttcccagcgactactgaatgagagtatacattttatctttcttctcttttcacattcaacaaaatgaattcttctaaccccatctgataggccgaacacaatagtgccgcattgaccgcgaaatatatcaagacgcatttcaactaattcatcagcatgatgcccagatcgcatgcgctctttatgcgtatgacgcgcttatggaactttttggagtga

SEQ ID NO: 14885 - DNA, 1814 bp, Heterodera glycines
  unsure (1)..(1814): unsure at all n locations
ttgtatctttctaaatatgcattcaacttttgttcttaattccgtcgagtgacgtttgttttttccatttcaatcaaattttaagggaaggaagaaatattcataattcgtttaactgatttcacaaatttcaatttttcgccattctttttgccattgtttcggcatttttaccatttttcattattaggagtttgataatgatctcgtccataatgatcagcgctgtatatgaaaatataatcaaaattaattaaaactaataaataacgatttattaatccaactttacgagctaattatgttttgcttcaacaaaagcaataatggcaatttgtgtgattaatccaaaatgatcaaatgtgatcaatccacccgtccttcattagctttttcttttcacttttatgctgcttcatccttttccccacttttcctttattcttctcattcctcctcttccttctgctgcgattggcttttctcggctttctctgcaaatgtcaaaaatgccattctttcattttcttccccccccctttttttgccgtgtgcgaagcgttctttgtcctcctccgacttctgtgcccatttggctttctcagattccggcaatcggcgccactcagcgccttaatttggggatgatgcttttcatcgtattgataatcggctccccgtttctctttacttagccctatttccccaaaaacaatccttcgtccgactttgtgacatggaacaatatgaaaaacactacggatttcaagaccgaactccgttttgggctttgtgccgacctgcgacaatcgcattgaaaattgaaatgcttcttaaaaaatgaaaaataaatgcaaaattaacggggaaatggttattttaattggtgaatttctcatttatttataggctcatttttatttaggtatttgacaacagatttttgattgcttaaataaatgtggaacaaataacaacaaaaacaaaatgatccacggaatatttatgccaaatatttccattttatttactgtttatgaaattattatttaatattatttattattccgaatgaaaaagaaattgtgagaagaaaaggccaacaaaatgaaaagtgacgaaaaaacacgatgatttgttaaattgtgattttaaattgaaatattgatatattttaattgaactttggaatttgtttcgccactcatgagaggaaaaacagcggaattcaaatcagagaaaaataaaagaatatgattaataggatgcggaaaattaagttggatcacccacctactcaagaggaaatatttattttcttgtgaatctcagttttttacccccgtttttcctggggtccccggctgagtcatctgcgctttcttaaattcttgaatttttatttgttttcattccaaaaaaaattttttttcatttttattatattatgtgtcaattatcatccttatttagtgatttattaattgttttattttaattatacaaagcaccagtagattatttttaaattaattctataaatgtataagacacttatagaatattttctaatttaatagttacaattacacatatgtattaattataaaatataaaaattcaattcgccgcccctgctgctcttgagagactncgccccgattctggggaaattttagtctcgggtcttcatattagtcccgagtattagcactgctgcattcgtattaatattagggactaaaaactctattaaatgcggacaaaaacaacctgaaattttccgttctttcggatgaacgaaagtttggaaa

SEQ ID NO: 14886 - DNA, 4992 bp, Heterodera glycines
  unsure (1)..(4992): unsure at all n locations
attaaaagaaaaaaaaanattttgggcatttcatcaccaagggccggcaattaataaatttcccgatgttaattatccaaactcatgcgagttaatcatttatgaaaatgtgaaaaacggtaaacaaataataattggaacaacatgaagagatgcgaaagaaatatgccacgaaaaaagtgatcagagctgacataatgccaaaaatgatcggagagcctctaaagtttatgcactttgatcaacgacgccgtccaaacagacttaagagactccaaaagtcgccactgccaatggagagcaaatcggtgccaccgccagcgcctcgggcgccgaccagccattggcgacgatgccgcaccaacgcactctcgactgcagaaggcaatgtcgagaagttgagggaaagcatggcgaatgtaagcagcaaaagtgtggcacagaatggacgacaaaaagcattttaaaaataaataaatactaaaaaataaaaatgttaattttggaaatatttcgcctcgcgtttatacgggagatttgtaccacttttgtgccctaattagcaaagaaaaaattgcgtgggatttttcacatgaaaatgaataaaaaagtaattaaataaaccatggcgcaaaaaaacagagcaatgaaattgggtaatattctcttcccaccaaaattagcacaatttcaaccgatgcaaagagaacaaaacgatttttgatggtcattttgattaattgctgcaatgcaatgtcattaacacagattcattttgcaaattgtcattatcattagatcaaaaatgaccaaaaaaataattaaaagaagcgagagaatgcgaaaaggtgaaaataaccactttttgggacccattgggcgaaattcgggcgattcggcgcacttttcaggcacaacaaatttcaatgaattttgtgaaattttttgttgagactatgtgcccctcaaaatgctttgaaccaattttaaggggcgaaaattctaattccttcaaataaacagcacaaaaaatccaatggacttaaatttttgaaacagttagtggatgcattttgcttgtttttgttttatttgggtgtttgttttctgtgccattgacatttatttttgtaatttgtcgggtgccgcgcttctgctgcttcgctgcttcggcttgtcacgaaaaatgcggtgatgaaggttaagcacttttaactcattcctaaattattttggttttaaatttcgatcatatagcaattaatttcttatccacttttactacaaattctgcaaattgtttttttttacttgggtcttttttttggaaattgaccaaaataacagttattatgtactgttaaagcgaattatttttgttggtaattataatacataattattgaatcagtcagtgtttattattctctaaaaaataaaatccatatacagtcatggtcatagtgtacgggcactcactatatacaatttaaaatgttgaaaaccaatcaaaattgaaagtgaattaaaaaattttattttgtaattttgtagcgttttttatgggctatcaaatagcaccattcattattttgtagatgctctttatacatttagcaaattctcaaattttggttctttacggaggcattagtaaacttaaatttcccttataagtcacctgaagcgacaaccactctaagtgccgagaccgaatcccgtgtcattaccagtgccgaaactgttgccgtttcatacgacggcacaaaaaagaacgccgtatttagtggcattgaaactagaatttctttttaacactggcaaaataatgcaaaattttttactaaatttgaactaaataatttttgaaaattttatttaaaatttttttcattaaattgagattaaatacaaacccatccgtttttctaattataaatattttctttttagtcccctgaccctaattctgtgccggactctactgaaactgtgaaaatgtgcgacttcgccttcgctatttcagccattttcggtacgaataatttataattttaaatatcattaaattactaattgaaatctgatgatgataataattattcatttaagtgattatgactgtgcatttgctcattaatgctgcgtaatgaagtgaaaatgaattcagatgaaaaagaaagaatttttgttttgatcaaccaaaactaatatttatggttataaaaactgattataaaaaatgtaaagcacattttgtaaaatttattctgaatatttgtcaatatgacaaaaatgttgaaaaagttgtaataaatttaaaattccaattaaactgaaaagcagagatttttagacattttttggaaatttagttatcccgtaaaatatacaaaaagagaatgattttgtattaatctcgttgtttctgggcattgaaagaccagttttttgtctcgattggcacggcactttcacggcttttcatcttttgccgaacagactccaaaaactgccggagtctccgccggcaccgcgggcggccgacagccattgcctccgatgtcgcggagcgatgccgacggcactggcagaaccgatgccgggggcagcgtcgggaacgacgccttgggcattgtcgagaggggcacaagaagcggaaggcaaaatgatcagagcaatggcagcagcaacgagcagcagaaaagcaaacattgaagggaacgaaggacggcacattttgttgattgggagaagagatatattattatggatatttgatgctaaaattctaataaaataatcattaaaatggacaacatttaattggtttactaatgagcaaaaccaaacaaaattgccaatttgttagcatttgcaaataatcaatttaaattatttaagcttaatggtaaaaagaaaatggcaaattgctgttattagttggacaagacaattgactaattatttaaatgttgcgaaaactgttgctgattgaggcaattcactttgcttaaatacaaacagagtttggtcactggttgttatgcaacctttacgccatgaagtaaacaaggggcaataaatattctttcgaaacacaactaattagccaaagggaacaattagtccaattaaaaaccccctgaggggctaattttggatggaccgtccatttgcaaagactgatgcgcagtgtaaacaaaaaacttcgacttttgatgatcaacagcaaccaaaagcaataaattattattgccgcggggggagagaccaacgagcaaagaaaagcccacggcagaagaaccggtagagttcgtcgactttggtcggagaagcggcgcgggacgaccaaacgcagcgccattttttgggttggaaaggcggcgggggaggggaaaagtcactgcaaagatcactttgaaaagcgcctcagacgaggtgacaatcacgtgatcgcccgattattatgccaaatcagtattgagataacaaaaatacttgtcaagagagtaaataacgcatttttttaactgtattttggtcatttactaaataaatgatgtcacccgcccctcccccactctttggcatttgaatggaatcatttttttctttttttccattttgctactgatgaaaatggtcatgagcgtattgtcagcttaaaaaacaccttcagcagcaggagagtgtgatggtcccatgtgctatttttgggtgaattcctttttagaaaaaggtactgaaatttcctcaaaaactaaatcaccaatctctgaaacagaataattcgattggcataaaaaacggctgagagtcacacattttgcaacgtgtatatcatatgcttgctgagatgtttcgtagttctgccattatgtgcatttttcattttttaaagacatttttaagatttttgaaaaaaaaattcatggtttcacttaaaaacaaataaacaaattaataattcgaatgacttagtcatttattttttgatgaattttctttcttaaattcaatttttccctaaataaatttaaattcattaaatgaaaaatgaatttacctaacaaataaggggaacaaaaaaaaaataaaaaataataatttattttaaatttcaaaatgggggacaacaaacaccaaagttcattttttgtgacgaaaacggaaagagaaattgggacggacgacggggcgaaactttggtgcgcgatttttcaaaattgcatccaaagaacggaggagttaggccaaaagttaattaaagcagaggcgtccattactaattttacgcttttcatttactaattaattatcgcttctctcgggggtaaaaccaacggaagattcgtaaacatttccaagtccctccgttttttacatactttttacatgtttttcaatgttatttttgccattagaaattggtttagtgaatgaaatttccattgaatgacttataaaaaatgggaaaaatgcaatacaaatggccagcaaaatctctgatcaaagtttcgagtgtttattccatattttattttttataaatctgtgctattttccgatcacttttagcagcggatcactgtttgaccccctccggcaacaacacttcgacgcggtattctttttcgggcggaggccattgagcattaagtttacctttttttaatggaagatgttttttaggcgtttaatttttgaaaattgttttgacttaaaaaatcccattcttatattattacctctgagtggaatttgttctcgcactggcgttgcttcagcaggactctgttcaaaagcgttcaattaataattaattttcgccttttcctctaatagaggcctaataggatttttttggttgtatttatttgttattcattttactgtcatccagtcaatgtcccccaaacgttttggggtttggtggncctgcccctaaataattttatggataaatgaagaataaaaagaacacaaagt

SEQ ID NO: 14887 - DNA, 1679 bp, Heterodera glycines
cggcgaattgggcgcacttcgccacgggaaccaaatgatcaggaaaggagaggacgagaaaggggccaaaataggtgaaaattttgccacggtctttcatccaagtgccaccgacgtcctaaaaaaatatgggaaaatttggaataaaaaaatgcgcatttttttttttgttgtaaagctaggccttaagataattctgaaagaaatttcccataaattccccagcgatggctaaaccatgtcggattttgttagccaaatttatatttgaatttacaaaaatttcgttaaaaatcacaccaagacaaacaaaaaatggttgtatttcttcgctaaattttcaaaaattagactcaaaaattgagtgagtctaggtaaaaaaagcacacttaaaaatttttgcgatttaaaatttcatgaatttggtttttaagagtttttgttaaaagcgggagattcgctcgctacctgcaaatagccaaaaagtgggtcattgatggcattccaaatcagaaacaacagctgggaccagttgaaccaatactcgttgacttggaaaatgttgagaaacacctgaaaattggggtaaaacaccttttatagacccattaaaaataagaaattcttaaatttcatattttttaagaataaaataaaaaaccttgacataataaaacataaaagttgtgtgcatcagtccaatgcctaaaaattacaaaatttccggttttttcgtgtcattttttttaccaaattgcccaaaaaatattgccaacacggcattgttgttgttgctgttggcattgtcagcgacagcaactgccattggaaaaatgcagatgatcgaccaaccaattaatatacaataatagaatccaatataacgaaaaaaaattcaattcattattacacattaaaaatttgaaaatcaatttttaattttacaattttccagcaggttgcaaaaggtagcaccagccctaacctaaaatttttttccaaaatatttttttcaacattttttcttctttgaatttaagagcaacaatatgccacgccaatattttgaagcgctaaaaattcatttaatttacacaaagaaaaaaacagaaaaaaaattttcattttaatttttttaaactttgataaattgctaaaaaaagtttcaaactcaatggggacttaattcttcatttttctgaatataggcaaaagaaatgcatttacaaggatcaattttcgtcttttttgcatttttactcctccaatttcttcccttttccatctcggacagtccaattttggttaacaataacagttccattgccacgcgtggtgacgaggactgttccggttgcaaggcgtacaaatgcatggacgagagcgatgcccattgtggcaaaaggggctatttgatcggatatggcgagccgaactgtgaacgattcaattcgaaaggtccccaaatccatgggcaattcgttgaaattttttaaaaatttctgaattttctcgaatttcttgtcagaattcgaaccaaaaaattcctaagtttttagaccaaaaccttgaaggaaagttccctttttttagaaatctacgaacgtttcaacagaattggcaagaaattcatcaactgtaggacaaatgtcttatcccatgcatgggagcatacattt

SEQ ID NO: 14888 - DNA, 2385 bp, Heterodera glycines
attctaaaaccaggaatatgaagtacaaaacagaaataaaaaatggtcccggaaaatcccagtcaaaataagacaaaaatgaacggtcactcaacgaacacggaatgatgagttgagtgagagaaaatggaatgttttttgaatccaatgatttgtgaggtaatgtcagccattttgagccgtgacatttgcaattgtcactcactcatcatcatcatcatcatcacatcctccttgatagttcaaaaacatttgcactgtgagatgaccccaatcgattgttatatgtcagtgaatgaatgagaacatgtcattcattcaattcaaatttctgcgactaatgaatataattggacgggaaattaagtaattacataattttaacgatggactcatgcagaatttgctaaatctttttgaaagaatccccaccgaattttgtgcatgtgtaatgaatgcttaatgttagcgaaagtttcacaaaatctgagttgactgacattcatcagtgatcagctcatttatagggtgaatttcaagcgggagggcccattttcaaggaaagttttcgaaaaaaaattcctgaaggttggatacgccaatagaaaaagcacaaaattctttaccggattttaacatacatacaaacaaatacaacacaaaaatagacacacagtagtggcacacaaataaatatggtacaacatacagtacaatatatatacaatgaatgagtaatacataattggtagtggaatcagaaagacgtgctgatcatctcatccgtgcataggcgagcgtcatctcacgggcgcgtctgttgaactccgcacggtcattccggtacaaattggcagcttccgcattgagaggcgagttgtccgggttcgggtcattcagcagaacgatgatggagatcacaactgtaaagacagagaaacaaattaacgatttctgcagccaaaaattgtatgtgaaaaaattgatcactcaaactgcacaaataccacacaaaaccaacgccatcaaattcatgcccgattaagaccataaattccaaaaattcgctttttcgctaactctgatgaaacgcaatgaaatcttttgaatttgctaatcaaacacaaaaatagcggatcttaatgcccctgaaaaaagttaagagcattaaagtgatcaatccatttaaaaggtgatcaaatccatccaccaaatccacgccacctttttcgatggtcagcgtcggtgcccagtgcgtttgcagaatgtccagacacactttgccccgtgtgtcgatgttcgggtggaagatgcgcgtggtgaacgtgacttgcggcgctttgaacgggtagtccctcggaaatgacatgctcagttggaagttgccgttttcgtacggtgtgccggcccggcctcggatggtaaccgtccaggtggtcatggtccgttgatcaagtggccgtgcagtgcatccctcaggcagtgggttcttctccatgtccttgagttcctggaaaaggaaaaaagaaatcagcattggatgacagacagtcctgccctggaagaacagatttccagggaatttttgggcctcggaatcacaatttccgaaaaatttcgctttttggcagttgcataaactccgaaaaaatttgcatttttattggatttgatcggattttgattagattcatgagatgccgccaagaatgactttttcaaattgaaaaacaacgtcatccccaaatgagtgacacctgtcgaagccgtctcttggacattgcgctcaaccagcagcttgacgagtgtgtggtgaagacaacaaataataatatgcagcagtcgacgacgaactgtcgtaatatgtacaaatgctgacgtcacaaataaaattaggcacaataaatgtacttgtgacaaatgagggaaatgtgtgggtcggtcggtggaaaatgcctccttttatagggcgtcgccggcggggaaatagaaaattgagtgggctttttttaaatgaattttgtcataatctgcatttgattatcaaaaacagtgcttacatatagagaccggaaatttcaaatttgcggatcccgctgcgggactggaactcatttttttttgcgggacgggatcccgcgggattaatcccgcaaatcccgcatttaaaatttgcgggatcccgtgcgggattgcgggattttggaaaattcgaaaaaattcaattaaattcaaaaaatttccaaaaataaaaaaatgctgaaaaataaatttttaggggctggcgggatgcattaaaaggtgctgatgagtcgactaaaattttccgattggatccgacggtaaaatgtgatcggaaatcaaattattaacggttcataaatt

SEQ ID NO: 14889 - DNA, 2452 bp, Heterodera glycines
aaaaagaaaaattaatttttcttcgattttttgaaaagtcagtaattggacataaaattttttggaattttttacttgaatttttttataaaaaactttaagatttttttctagaaaaatttctaagtttttatatttttttttctcggggggcgggggaggcggaaacgagctgctccccaaattaagtgccaatttgaccatttgtccaagtgaaaatggcacatttgccttttttaagggcactgaacggccggcgcatccgatcgcagcgaacgcaacgccaaggacaaacggcggcagtgacttaagccattttgggacgccgactccgtccccaacccatcgtacgcctttcacaaaattccttttacagtactccaaaattactgtagggaccaggaattcgcgggcctttttttgtttttcggtttctgcattttcgtctgaatttgacttagttttttcttttcgacagaatgtgcccttttcgtccgccgattcgcccctttacgcctccgttcagaaagaaaacggccgatcgaacgctttggcgacgagtcgacggcggtccatcgacagttgggtctgatgaaagtgaattgctcttttacggattgttttgcgtgccaatcggcgggggtgccaatgccacaaatcgtctcaaaaattggtggatttatttatttggccctctgttgcaaaatggcaccccattctcgcgttggccgatttctctcgcttttattttccattcatcgcagtgcaattcgtctcccctctttttttgtcattcccttttcgtctctcacactctttctttatgcgctctttaacagtcacttggaaatgcattttatttacacatttttatctcaaattaaatgttttattacaaagagaaaaaatataattaaaaaagtttttttctctttttttttgattttttgagtatgcgaaggtaaaaaacaacaataaaaacaaatgacaaattctgcaagaattgacaagtccgccgtcgtcatcgttcattcattgctgcattcgcatcacttccgccgggttgaacagaatgttgcgcttctgctgctgttggttgcctattcgtccctccaaaaacgactgtttcagtgccgcgctgttcgtcgacaccaaatcgctcactgtcgccacattcattgccagcggcgcagcgattgagtcacactgatgggtgaacaacgactgaacacactgaacaggttcaccgttgtacaacaaacagatggactcgttgttgagcatctaatggaaatggaaagggacgggggaacatcgaaaacaattaattgccacttttattttttacatgcgcatcgaattctaacgcatcgttttgtgcctttactcttcgcaattgtgtcaacgcttctttgaagttaccatcaaaaaccgatttaaataccctgaaacgaaattctgaatatacaaaacaaaggcaaagctaattgtaagtattccgagaaaagccttggcctggatttcgtgtggaatggacctggattagatgaatttggttttaaaaaaaacaaagtttaaaaaatgagttggttgcttatttaaggaactctaaatactcaaatgacaataaaataatcttaatcaatttaaaaattgtttagtgttttaaaataatacaccggtcacttaagaaaaaattgataacttatttaaaacccaggtccaggtcgaactctaatacagtcaaattgtataaaatagaaaatttttaaatttaagaaaaaataccaacggagtgcgtcatctttgccaccatttctatttttgccaagttcgtccaaatatttgaccactttctgctcgtcgcctgtgtgcattgccatcaaaaacagcattttcaatacattcgaatgcctttgtgtcgatttggagttggcccttatccattcataaaactcaaaggcagccgaatattcctaaattataatgacaagcataattaaaggggataagtaatatttagattttcgaaaaattctatcgaaattttaggaaaacttggctgatgtaggtcttggagggggtaacaacaagtaaagttcaaaattcagcaaaaaatactatttaattggccccattgcattcacttcaccttcagtcggaacagcacacggcccttggccatccacgcctcttcaagtcgttcatgccaaatgccaagttcagaatcagtggccgcaaaattccgacgagcaatttcgatagcttttacggtattctcaataagtttgtgtacacgaaccatcgacgagtaaggcaatggtgaaaatgaggacgcttcggcatgcaaaagtcgaagagaaaaaggcaccatcgaacctttgggggatggcaatttggacgcattatgagttataagcatttattgttacgtacttatgtatttatctat

SEQ ID NO: 14890 - DNA, 2152 bp, Heterodera glycines
  unsure (1)..(2152): unsure at all n locations
ttctgttgatgcatgcggcgtgactcggtattgcaaaagaaattgcgaaactgccaaatccaaaccaatggaatcgcccatcatgtgccgaagtccatttttaaaagtctggacgaaacgctcagccaatccgttgcttttcgggtggtatggcggcgtcagtgtgtgttcaattccgcgtgatcggcagtagttctcaaattcagccgaggcgaattgtcgtccattgtcggtgacaatttgttgaggcaatccgtgtgccaaaaacaattcgaatggcctctatgttgcattggccgtgatgttcttcattttgatcacttcaggccattttgatttggcgtcgacgatgatcagccacatgtgtcccatgaaaggaccacaaaaatccatgtgaagtcgctgccaaactctgtcaggcgtttcccacggatgcaatggaaccttcctctcctcgggtgcatcagattggcaatttttgcacctctttcgttccatttcgatgtccttgtcaattcctggccaccaaattttctgtcgagccaacgctttcatccgaacaattccagaatgggtggcatgcaaaagttctaacatttttccgtgaaattttctcggaataactgttcggtttcccaacatgatgcatccatttaccaattccaaactgtttttgttcggctcgaatggcttcagctgatcactttcgacctttttcggccatcctctttcaatgagttctttgaccttcttcaaaatttggtcttttgctgtttcactggcaatcgattttgcggtgacaggcagcgagtcgatgttttccaattgtacggctctcacttctgcactgtccaaatcaatttttgctatctccggacatggaagtcgcgatagaccatcggcatttccaaattcttttgttggacaatattcgatgtcaaagtcgaagttcattaaaatgagtgaccaccggtgcagccttctcgccgccaccacgggtatttcactttttggcccaaaaatctttttcaacggttcgtgatccgtctgtaacacgaattttcggccatacaaaaattgtttaaacttttcgactccaaaaataattccgcggccttctttttcaatttgcgaatagtttcgctccgccgcattcaatgtccgtgatgcataggcgatgacgccttcctttccattttgttgacttttatggaaaagaacggcaccaacgccataatcagacgcatccgttgccaagtataatggctggctgggatcataatgaacgagcacttcggttgatgacaaaatttctttaatcctttgaaatgctttctgctgctcacttccccaatgccacttttcttccattctccgcaattggtttaatggctcggaaacggtagccatagcgggcacgaatttgccataataattaaccatacccaaaaaggattgaagctcctttaaattttggggcggtggcattttgcgaattgcttccagcttttcctctgaagcatggactccgtttttgtccactcggtgtcccaaatattctatgctttcacgcataaattcgcatttgtcccgtttaactctcaatccatttgccttgagccgctcaagcacctgcgtaattcggcaaagatgttctgcctgtgttggtgctgtgatcagtatatcgtcgagatacactgccactccttcaattccttgcaaaatttcgtccatgacctgctggaaaatcgccggtgctgacgctacgccaaaagggagtctcgtaaattggaacaatcctttgtgcgtgcatactgccaaatacttttttgcttcatcatccaacatcagctgcagataggcgtctttcaaatccacttttgaaaatttctgaccgccatttagcacactgaataggtcgtccggtcttggtagtggatattggtgcacgtccaaccattggttgacggtcactttgtaatcacagcagagccgaattcggctttgagcgcaaatggtacaggacgagccttacaccttttncgntgcactccangcttgaatttnncatgaatttgacgagtgcatcggccccattcgtctcgaatacttnctgaaatttttcgagaaatttgtccacctctttctgatc

SEQ ID NO: 14891 - DNA, 808 bp, Heterodera glycines
atttcaatgaagactctctatattcgaagatcaaatccctttttggaaagctgatggaactgatgttaagaaatttgaatgctgttaagtcattatttgtgtagaatttctattaaaaaattaggtatgtttaaaaatgcgtataaaattttgtcccttaaaaaatcgatcgaataactaaaaaaccaacgcatagccaaacaaaagtttttagtgaatgatactaaaaaaacgacgacaaaaaaaaaaaacattaccaaaatggtaatattcaggtttgtacccccccccccctttttcgggagaaatttttgggtaatactaccgatggtaggacccctttttgaaaaaatatttatcattttaaaagtcactgaaataagtttctaagccaatttgtgttaagtgaacgcataaatttgggattgaacgcggtaattgtgattgaatgtgtattttttgatcattccaacaaaaagaacaatttttatgggcacgataaaatagcctcaaaattcattttgcaactccaaaaattcaaattgatcgaccacttttaagcaattcattcgcttctgctgatcagtgatcaattgggtcgtgcgtgagcagtgttgtgaagactaaaaatagaaaccgcaataaatttgaatttcgaataatttattcactgaggtcgatgaaactaaaaatgaataggaagtatgtaattgagtttgcagaattggcaatgtttctccatcgtaatttacaacataaaattttctaaaataaaaaaatttgccaagaaaaaaaatatatattaagt

SEQ ID NO: 14892 - DNA, 3667 bp, Heterodera glycines
  unsure (1)..(3667): unsure at all n locations
gcaaaaattgcgttgacctacccccattttaatgtgtttttgattaaaaaatatatatttgaattaattcattaaaatttctcgattcccgagtcgagaaatttctcggattttttgttctcgtatcgtttcccggggttatttctcggtctcgtttctcggttcccggtaaaaagcacttctcgcagatcactacaattcatacaaaataaacagagaaagataaaaaatgcaaattgttttactcaaaagatcgggaccaaaaagccgagataggtatttgaagaaatcgggatttaaggactaattccgactgagcctaatcgtggacaattaaggaattgatggacccggacaaagggttgtatgacgaaaatgaggacaaatttacattggccattgatctcacagtgaaaaatgaaagagaaaaacatatttacgaatcaaatggaacaattgaaattacgcttttatacattaaaataccacaaagaaattagctggatattatttcttcatatcaaattttaaaattttcgagattttgttgtttgctttatcaaattagcattgaattttgaatgttaagggagaagagaagcaaaacgtttgacttcatctcggaccgatatttagggtaagtaattaaatttagatttaaaattagttatcattgtgggtactgctccgatgctataataatttacataggaatttctcgtttaatgataattcaaaaacttaaatttcggtattggggttagcttacctgaatacaagtgctacttttgtcaggacttgaaaaatttcctttcaatgttaaaaataactttctttttaatatatatatatatatatatatatatatatatatatatatatatatatatatacaaatttcctaaaatatttaatttaccaaaatatttttattattatttaatttttcgttttaaattcttcaaacataattttaaacatttgtgattgcttgatttcattgtgaaagaagcagacaattagataattgctcactctaatgattcccaaagtattaattatttactaaaatatgatgctttaaaaaatagtaaatttgaataaatatctgtttgaagatccaagctcgaatgggtgccgcaaaaccaatcaaaaatggtcgaattgacctggaccaactcagaaaaaagcatgttttgcatttgtattttgctttaaacatgaaattttttgaagattgaaacagaaaaaaatagatttaactgccccaaatgtttcaattagttaagttattgcaaaaagccataaatttgctgtcactcttcaaattacaccaagactttgtatggattttcatatatttggattttcatatattttttgcacaattatttcggtataaaaatcatgaaagtattttaagcttggtttattgcgtatagtttttgggaacgggcggagtcattatttaaaaaacatcataaagggcgttatttagaaaaccatcattataaaatatttgatgaaaaatatttaggtatttaaattaacatttttctagcatttccaagagacctttttttgctcttcgggccaaatttttttgctcttatgttaggtatatcaacaatttcaaaaccggagaaaaaaaaggaatttttagctccgaaaaatgacaattttcggtgccgataggcgccgccggaaaaattttttggaaattgtataaatgaaaattttatttatatcattataaaaaaaagagaaaaagccattcccgagggccagggaagcaaattataaattgtaccaaatcctggtaagcccttatcaatctttgattattttggaaagtttcataattcaaaaacaatttaagattaactatttaattaaatagtacttgtgttttggtaattcatgaagatccccttttttctattaacatgtggaatcattgttaggaccacaagtcaaaacatgaatgaatttataatactttttaatatcagagtcattaatgattgttctgaagaaaggagagcggattgaatgagttgaaccaactcagggagatttgtttttagaacagagcccggaattttaaatcatatttttctatgcgttattatggcgagagaagcccaaaatattttctcagaacatttttatttagggctacttataaaaaaataaaaaccgcccgaccctaaaaatatatattttcttgaaaaaattttctcaaaatctgttaacaaatcgcattagaataatttcatgaaaatcaatgaattattaaaattttattacatttttattttttcaaaaattttcaatttataaagacttccagtttccagcagggtttgatttcgctttcacccttttggagtgaaagattttcacatcactaatgaatggcatttttttgtggggaaaggcaaaaaagttcatatatctttaaatacattttaatttacaaactttttgtgttaaatgcgatccaaaatgatcaaagattgacaggagcttcccagctggtataatttatatcgtgttcaattgctgttagtctgagcaaattgaatattaggatgacttgtaaatcattaagaaagaaaaaggctgttaatctccaaaattaaatttgaaatcattatttgtgctgtcaaatatttaaattattcggttgtccttaatgctttttgatacattgcacccgttggcccttgggaaaggtttttctcttttttataatgattttcattcatttttttttgaaattgtgtatatcctcaaatgtcgggtcctcaaaaatcgggtcctcaaatgtcgggaatatccgcaaaagtcgggtcctcaaatgtcaaatcctcaaatgtcgggtcctcaaaagtcgggtcctcaaatgtcgggtcctcaaatgtcaagtcctcaaatgtcgggtagccgtaaaaagaaagccaatgtatgcaataatctccatgatgtagaccaaagcagcaagtgtctaaatgaaatagacatttaaatttagacttatacttaattgtttaataaaaaataataggctaaatatttatttattattgtttttttacctgtctgtggaaatgtgagcccaaaaagcttccaattggagcacaaatactcgtcacgggaacagaaacataaaaagatacaaaaatttcttcaattatttaagttacaaatagactagagcgaggaaacttgaagtaggaccagaatattggaaatcctaacaggtccttgtcctgttcctggccctaaaatacactaatctcttattaaaacgattcaattacattttttaataaatatttttttggttttatttaaaatataatttttgatttaacccaactgaattcaaaacatacttttatgtaattgtatgccaactcattaatcgcttcgtccattatcactgcccgccagtaaaagcagaattgtgaattcaaagctacaaatttttattttttanaaggcaatcaaaatttaattttacccattaacactacagttgnttggtgttgcaattttctcactaacactgaacaataatgtcaaaactgagaaaatgcagatgtcgacaccttcaaataatggttattaatgtgatttggcaaacatttttaattttttt

SEQ ID NO: 14893 - DNA, 3291 bp, Heterodera glycines
  unsure (1)..(3291): unsure at all n locations
tttcggaagaacattaaccttaatagtagtaataaatttctgtatcctgtggtcccggcttttctggtcccggcaaccgaatttaaaattctataataaaaaaaagactctgacatccactacgttaaaaaaagtaaaattattttattcaaagtcacatcgattatctttgacgtgcgagcaaaaagacgatgaattttcatctgtcagaggtgggggggccttgtccaattgctcgctcgacaatctccattcttcaacatatgatgataatcttattagttttaattttatttttttagcaaaaaatattaatataataaagccgcgaaattccactacccagtgctaataagggattttaattcccttcttacgcgtccgtcttaattagacccctcagggcttggaagggaagggatgatgatggatcactgttggtacctcacaggggaagcgattggccgttccactgaagtaactcccgactgacttgaaatttgtctacgaaatattgtttaaaaaagagcaaaaatatgaataatttctttaaaaaatttattaattcacttaaaatgaaattcctactcatttcgtgcctcttttttgctgtgctaattaaaagttgcagttcaacaaacaccgacaaagcacaaaaaggtccatttaaataaaaacaattttaatttagatttttaattttcatttaaaattttttaaatttaattttacatcgctgatcatctccaaattgatgcttctcgtcgccacttgagggtggcaatctcgaggctgaccccgccaggaaggcgctttgctgaaattttgntatatttccaaacaaacagtgccagacaaattctccacggcaagtgcccccactgcgacacctgccaccgttttgagggttgacataaaacccgtgccgttgttgttcgccgtgccattatttgtcgaattaattaaatgctctattagctttacaaaaagcaaaaagatttttgaaacaaatttttcaaaatttcgactttttcgcaatttcctgtataacttttttggtaattgtctaataaaaaacctataaagtgtttttatgtgtgattttgagtgtttcatattccaacaagttttgtgggtttggaaagtatttcttttttaaatgaataataataatttgtcaatttaaaacattttattttttcttaatcatttcattttgctgattgattatccatactttgtttaaaattaatataattatatgtataatataattttctctttgttctaatattctataatttttctaaacgcttctcattgtttgctatgatcatgctttttttctctttttctttttttgcgttgcccaattcccccccccacccattttcattttattaatatgcctttttacattaatatttttagttttattattttttcgcttaaataatgcttcttgtattcctgcttctattagcatcagtgtttattgagacagaagtaaatattttaaaataaattatttaactgtttttccattcattcaatggcagagatttgtttaggaaaacgaatgaataaataaattgaaatccatcccattttaactcatttaaattttccactcaaattcagtgtttaacgccaacggaactgttcaattcgcttatcattcgcctgtcatcatcatcaccaatctcatcatccaatgatgatcaactcggctcaacttccttctctgttctcccacaaaatccgccggtcgtcgaattgccattggccaatgcgcaaatgttgcagcaatgggttggccaagtcgcgcagcaaattgtcgttgaggacggcacttttgctggacattactcatgcgttgccaaaaatggcatgaaaaaagcatttttgtccgttggattgcccaaaaaacaactgaaagcaaatgcgtttcttttgggggacgaattttaaaaaatgggagagcaaaaattccattttttgaaaatgcttttcgcatttggcgcattgctaagtgccgaaattgagcaacaatcgtccatcagggaaagaagcttcccacgcatatttttgaaggcatacgaatgcgtagcggacaaaaaattcgtcggaaatgaaaaaaagtaaataattttaatatttttaattagagtgccacgggaccgggacctggtagcggacaactgagtacaactgagtaccaaggtcccggttttgaccgggactagtcccggttttttcccggttttcccagccaaaaattcccgggttttcaacccgaaaaggtcccggtcccgggtttgcccaaaattcccggtcccgtggcactctatttttaatctcccaaatgttgccttttcttaaataagtcgactaaaaaaataattttgaatattttttatgtatttatttaagttttctaccttttgcaattgtatcaaaaatggaggggcaaactgagcaattgaatattgagaaggttttgttggtaattcaaaatgaagaagatttgacggatcgtagtcttcaaatcggctgtaaatttttgaaatgtttgtaatgaaaacgatagaaaaccaaaaaataatgactaggaaattgcatataaacgatataccattggataaagcagggtcgacttctattgtgaatttttaattttagcggtgcattttgcctgcttcaaaagttacagggcctcaaaaatcgaaattttgtgcttgagggctcattttcaactttcgtgtatattttttgcagccctgtttattaatgtaagattcgaatctattgaccaaaaatattgtcaataagtaaaataatgaaaatttttcaattctactatacattaaaaaagttaaactaagttaattcaatatttgtaattaattaattaactaattaacagctcgattatatgggctatgaagactattgaaaaaatgacaaaagtttatgatacacaatttagaaaaaagaagactacacgaaatttaaatggggatttgttatataaatattttaatggcattttacctgaaaaattctggccctgattcaatatttggaattattgtagattccaatcaaggcattttgccttaatgctaataaatttttagctgaacaacaaaattacgctcatttgtcaaccactaattttcatcattttgaaattttctaatcactcacattcggattatcagtttacatattttccnaaaaaaaaaagaaattaatttttctttttttaataatagagtagaaaaaaag

SEQ ID NO: 14894 - DNA, 1642 bp, Heterodera glycines
atgattagggctgctaattttatgtaaatacatattttttcctggattctccatagcctaattaataggaaaaacactttcttttttgtgtttgcgaacaaaagttgggacttttatttacatattttgggatttttctacatatcacatatgtacatatttttatacatattttggactttttcgtacatatttcgcaatttttcgtacatatttttcattttttttacatattttgaggatttttgagaatttatagaaattttttgtaaaaaattaaaatttttttttgaaaatgtacgattttttttcaaaaaatgatatatcaaaaattaatttgtaaaaaatattcaaatgtgattctaagcctattttggtcatttttatggcattttgtgcctatttcactttttacgaagaatttttttccaaaaaataaccattaaaaaaattttatttacatattttcctacatatttgaggatttttgtacatatttcatacatattttagcattttttatacatattttatttacataattcgcaaattttcttacataaaattagcagccctacttatgataaatttcgccatttttttaatctatccatttatccgtctgaatttgtttgctcaagttttggcatgcacatcggaattgcgaccaagaaaatgccgttgcacagctgtgtgggatgccatgagggcagttatgcatacgatgacaatggcaaattcttgggcagcggtgcattgttggatggcacgagcggacggattggatgtaattaaggcgaattatgggcataattaaacactaattgttgttggtctaattaacgaatgttatatcgagttaactgaaactcgcacaatatcgtttttaaaatgtttttttttaccaaaaattttcttccataaaatctagttttttcccataaaaatcgactcaaaattcctcgaaaatttatctcttggccaaaattaaaattgcacaatagccacactggcttaaaatccagcaaaaacctggcacgaatttccaaaaccgagcaaatgctggattttccacgcaaaataaaaagtattcatttttgacccaaattttatgcttgatttaagcacttaattatgacgacctattttcggctggcacgagtggacagagcacatcggcagctggcttccgaaattttctgtacaaaaatacaggtacaggaaaaatacaggttaccgaaaaatggcctgtacctgtacctggatccaggaaaaataccaggcccggatccaggtacaggtcgagctctagtcttaatgttcttaattttaaattgttttaacaccgtccgttgcatacttactttgattaaattctaataaaatttttttggtgatgctaatgtttaaattaaaattttaagaagaaagtttccatttgttgattttttttcattattttaattggttgggattaagagcctgatgattatttaattctttcctaatttacgatatttcgataattaatgttaaatttttttacgggctctgtcgaccgtttctgccggatgcttcgatcgcccgccttagtagtagatagcttaacgaccgccgataaagatgtttttcttttttgtga

SEQ ID NO: 14895 - DNA, 2071 bp, Heterodera glycines
  unsure (1)..(2071): unsure at all n locations
ttggatttgtaaacacaaaaaaaaagttatagtccgaaaactttggctggcgcaaaaacgacccccgccncaatataccaggaaccgattcttagagaaaaaatgaatagaaaatccattagtgtggccaaattctcactttctttgtaacaaaaaaaacaccaattaaactaaaatgtgccaccatttcgatgatggcaatggcaatttggagaacaaatgcttttttgtttctttggacgcttcacacaattccttaaaatttgatagatttaatctaaatactttttgaatttatatttaaaaattaccgcattggtatagtcgctgtagcctaagaagaaaaaacattttaaagaatttcaagcttcttggccttatatttttctatcggtgtttttttgcattagtggacacaaaattcatttacttaaaaatttttggcgaaatcttcggtttttcggaaaagaaaactagagaatttccgtcaacgatgttccggtattttttaatagaaaactgatcggtaatcaatacacttgctgattatttatgccatcagtttcttaccattactccccttttgttaatcaattttaatcataaaatatttttattaatttttgaaaatgatttttcattatttttgatcaattagacttttacttcattttatggcagtgcgccatgtagcagaagtgcgaagatggctcgcagaggtggatttcatttcgaaaatgcatcttttggacgaccttgcagtgcatggaacctgtttgttgtgtattggataaaagcagcaacacaaacaaattttgggattttgagaatcacttcattccatggggagttattttgtccaaaaatcggacatttgtcagggtttttcggtcattaaaatggagtctatttttgcagaaatatttcgttattctattaattagctatttttatagttttatttgaactttaaatttcttaaaaaacccaaatcatgggtgggttcccgactctaaaatgccactctggatcaggaccattcgaccaatatcggcattcaaggctagaaactggggtttgaatgtcgctaatccaatccggtgaatccataaatttttctgcaaaattccagtctcaaatatcatccctaccttgttctttggcatttggacgcatttgatacgaccgcacgggcaagtcttttttttttgccaaaattttgcactcatcctcgctgagcttcttctgcaaaaaattaataaattaaacgattttaggcaatcttttttttgttgctttttatttaattattaaagtaagaaacaatatttaacaacaatttatttatatttaacaacaatttatttaattttgtcattttaattcattgttttgtttttctgaaactttaaaaaatctcattgaaaatttaattatctttctaaagcagggaaataaaaaaatatttatttattttttatttttgggttcactttcattgatatctattctaatctatgggttttcctgatggttctcttttttcatttatttatttagatactaagtacattttattatccattttaagtcttaccgtctcgtttgcgaattctggccgattgttgggattttcagtgtctaaatgtggtgaaatatattaattattattattttaatatttcatcacatattttacaaaaaataaagttaagcattttgaaaatttcaaactacggttgcaattaccttcacttcatgacaaatgcggcacgcaacataaggaaaatgttgtccacaacaagaacactgccaaatgtagaaattctttccaatacgtttgccttcactaaaatgaattattttaatattttctacatcatttcttttatccattgtgcataaaactatttagaaaaacggggcgggaattttggaaaaaccgaagccacgacatgggtaattcaagacgacaaaacgggattttgtaaaagaaaataaagataaaaataacttganattctnttattcagcaantaatgtaaaaattaaatttttctattttctaaaa

SEQ ID NO: 14896 - DNA, 1659 bp, Heterodera glycines
gcttttgtacgaccacatcttccaaacacaaattgatgttcttccagcgaaaatttgtttatttgagcggaggaatttgaggacggaataattcaaagtaccttaaaatgggatgattttatctgttaacaatgctttgaatcaaattacgaaatcagaagacgattaaagcgaattttgttgggcagcggacggtcgggcaatggaaatcgcatagatttgtcatagctgataaatacggatagtttcggctttagtccaccgcccttgcgaatttcgattcgtctcaaaattgccaattcgcttttgccgtcgaaatgtttgttcactaaaacattgaaacgtggtgagagaagtgccaatttgaggccaagttcaggacgaccaaaaaatggaagaatgtccatccaaacgtcagtacaaatccagctaaaatgcggaatatagagcgattgagaattcactaatttataacccaagaaattctcacattttcttcaaaattcgtttattcattttatttgtcactcgaacacttcgccgttttccaagtgatgtgataagtgaacccatcgattgttgttcatgttcaccaattgctggtgaagaaatttggcggtggtaggcggaggaatgctttttctttttctcggcgggcggtgccattaaaaaaattaaatttcggttcctaaataaagacatttttagaaaacatttgcacaaaacaattttagagaaattttcaatttctttatatgcgtaaagccgaaaaaatacataagaaaaggaacgaatgaataaacaaacaaacaaattgatcaatgatcacactcattgttcacaccatcccaaaaacgaaatcagagaaaacaaaaagcattttttctctaatttttcctctccttttagcgtactatctaatattttcattattcggaaaaataacatttaatcgccacattttttctattcattttgggctcataatcagtttccgggggttttcgagggtgcttattacgaatctaaacttagatttgcccaattccaaaccccaaacccgaattccagcaaaaaattattttttttcaaaacacgcgttaaaatcgaccaaatttttgcgcaaattgcgtactttttattcacttttaataacttaagtattgttttgcatcaaaataaagttttaggtaaatgattcgaacttttccccagaaaaatattctttggaaaaaaatcaatttttctttgaattctggatcgatgatcgaaaataagcaaatccaagttcattttctggaactgaattattgacaagaatagtatcgtagaggttgagattgaaagatataaataaatacgtgaaattgactaattgaccataaacaatgcaaaaatatgtaatttaaacatacatcagcttgcgcatgaataattgtgtatggaaaggccatccgaagcataacaacagaagaatttggacaaaatatctggaagatttgagaaaaaagaatatcttgacttatacggggtttttttctcgcggcccaatccccaagaatatggttaccaaatcgaaaagctctcggtgaagacagatcgatctaaggggtgggggaaggttgatccgaccaagtataaacccgttttttgaaccga

SEQ ID NO: 14897 - DNA, 2325 bp, Heterodera glycines
acaaaatgaaaacccatttctttggtgaaaatttggtttttccccaaatgtgccatggttttgcaaattgttttggcccattccgtttcgaaaaggccctccatttgatcggcagggcggaggattttgcggatgctgttccccgtcaagtcgcgctttctgaacgcttccctccttgcccctattcgtctgaagaattgctgagcaatttccgcattttctcccgcttccaactccttgatcagagcatttccgaggccttggaagacgtggaatggggccaacagcatctgctcaaaactgatcgacggcagcagagatgcacaaacaatgcctttcgtcagagcccgagcctctgccgttgctttgtctcctccatgggtcagctgctggaactgatcggcttgtctctccaattcttgcacagttcgaatttggcattttgctgaactgatcagatggtctcttcggcagttacacactggggatgggaatgctgtcattgccgaaccgcaatggccaatgatggcccacagaaaacacagatcaccgccaagaaacctggaaaattttcaaaaaatcaaaaaacaaaatttattttcaccatttcactttgcgcccgtcaatttcattgaggtgctcaatttgttcccaaaacgatctgcagaaattcttcaaattcgttcgtgaatcttttgcgggaaaaacagccgcaacaaaattgttggaaggggaatttgggcgcaatgcatgggccaatgaaatggtaatttttgtgaatccctgcccgtgatcgccactgaccttcagtggcagaccacgggcagggatcaggctgatcagattgtcctttgccgtggacaatctgaaacgcagtgccccggcaatgtcagagcaaacatatccaggcccgcctggcgttgaaatgacatcatattttaaagctgagcaaattcttcgtttgattttgatcacccaaaaaaaataggtcggatgaaaaaattctgaaaaactgtacctttatcaatggtgggaaggtgtcaaagcgcctgttgatcagcctcagagtcgccttcatccgtttgtaagccatctgtgtcccaagctgggcaagcagcaggagcccatcctcagcttccatccactccttccgctcctggcccttctttggcgtgtagtgcgcgaatttgtgccggatatcccgatggatccgatccagcgatgcgcggctcgcggaacgcgagcgatcacgatcgatgacgcccacaattgcgtcgacgatgtcgcgcctggcgctgcgctgcagttcttccagccttttcttcggtcttcctctgtttggaggcgctaaaattgaaaaaagatcaattttatgaaaatgaaaaaggaatttcactcacttttgctggtcgttggtggtgccatcggtggtgccatgtgttcgtccagctggcgacgcagatcactgatcagcgcttctcggttacggacctgctcgcgcagaaatttgatggtgtcgtcccggtccttgagctgcttctccagttgttcgatgcgctctgatcgctcgtcaatggccagcggtggcggggtcgtctctccggtgtccattggcgcagttggtgttgtcgaaaacggcaccaaatcgccgattggtgtgacagatgtcgacggcagtgaaaagccaaattccaaaatttcctcgtccatttctggcgttggcactggtcctggagtcgatggaggcggttccatcgcttcttcggcggatgcagcagatgttgacggccctgcttcgtcctgctgtggcatttcggcattgggattcgactgtgaagcggctgaaattaaaaaaaatgcttttttgagttaaaattggtgaaaaactcactttttttggccaggcgggcttgtatcgccttggccgtctgcgcttttctctcctcccgcttcttctcacgctctttcactccctttttgccgtggattttaggtaataattttctttttcccatctaaaatttaaaaaataagaattttaaaagaaaagccgttataactttttagttaaccctttttttgctcttaaaaacccttacattttgttccaaatttttttctctatcgatatgcaaaatttggtatagatttaacatccagaaaaaaagttaaacatcacgaagtgaatgttgtttttcctaataatgaaaatattagatagtacgccaaaaggagacaaaaaattagagaaaaaaagataatgtttttctctggcattctctatttattggtacacatctcgttttttgggatggtgtgtgtatg

SEQ ID NO: 14898 - DNA, 2071 bp, Heterodera glycines
aacaacaaacaaaacggcattcgcacgccgagtaaatacccttacgggctctgatcagtgatcaaagaagtaagacagcacgaaattttagtaccaattctatacacacgtcacttgaggttggagttttccagatccgagaatttattccgagatttcgggtcgaaaactttcacagtttacctccggaaagtgccaactgtgcttgtgtcgctgagttccaagccgagcaaagcctcgatcagccgtgggctggtgaccacatagtcgcactgcgggtacacccgattcacaaagtccttcaggcactcgtttagctcgctgtaagccgttgcgacctgctgcatgcgcacagtcgttttgtccatcgcatcggcgccttgtcggacagcagcagctgaacattgggcattttgatggcatgaaaattctttggaatgtccatcaaaatattaatcagatttctaattgactcacaaattttgccatttgcgacagcggtcgccataatttggtcaattcgttcgcgaaatgaacgcggcacattaacgacgaatgtttgaaggtcggagcccatctccaagccgcgcatggcacacaaattgtcctggcaaaagaagaaaagggatttctattccaatgccatgccaagggattttcattccagtgccattcccttcctcctccgctttctcaccctttctcgttgaagaaagacattcatctggagcatgtcagtgtcggcaaagccatgcacagaacgaccgtggatgtaaaagccgcgcttaacgaaaaggacagtgattaaagtggcgaaatcatcaggcgcataattcttctgtttttggaacaaaattctaatgaaatttttggccaactctgtcaattgttggacggtgtcactcactcaccagcggatttgtcattgccagcacactgatgttggccaccgagcacaggtccatgaagttgcggaaagggtccaccaccctctcgacgattagcacttggaaaagccattggcccatcgcaatggcaacgtaaaaggaaaagtcaaccgcgaaacgactcatcctcgtctccacgatttcgggcggttggtcaactgcaagcggaaatttaacggcgccggaaaatgcgtcagtgtaaaatgcttcagtgaaaattttattgtcataaaacaagtttcttggttttcgagtttcaaaaatcagattttggggtcgaaaaccagaacattttgcgaaactgcttcaaaacagttgtttttacattctatttaatcaaaaacgtattaaatattatattttcagctcccattatggatttgaatagtattgaggagtaaattagcaaaccgtaatttcatggaattaaaaaatcagatttttaacaatttttttgcggcgcatttaacaaaaaaaaatttcaggaacggggggggggaagtgggtccggcggtgccgataggcgccgggaaaaaattttgaaaattgagtgcaatttgttaccagattttgtcgaaaaagagtccaattttgtgattttgagctatttttaaagaaaataatggatctttagagtccgacggtgccaataggctgccgccgaaatttttttttgaaattttatcaagttgtttaacagatttttgtccaaacgatgagcaaaattttgcgtatcagagcgtttctgataaatcagaacgagatagaaaccctgcttttggttcaaaaccggcgtaaatgatctcttattgaaggattgatggctttctattggtctccgtgtatttaaaccggtttcgaacaaaaaccctaatttcgaaaatttcgacttgtttcgaattcggacccggggttcggaattcagaacgtgttcttataaaacttaacttctaaattacgatagtaatgctatagaactttcttttaaaatatttgtatcacggacgaattttctactaacgaattttccactgacgcattttccgatcacgaatggaacggaacgctttatatgtaaagaggggtcggttgaactgatgccctaccgtattcataccagtcaa

SEQ ID NO: 14899 - DNA, 2143 bp, Heterodera glycines
  unsure (1)..(2143): unsure at all n locations
tgcgctgagcagagacaatcatccgatgtccattaaaatttgttgaaaatgacccgatttgaaagagcattgggaatgacaatatttcaantnggcaaagcatcaagaccacatncaccgaccttntaattttagttattaaatntagttatttaaaaaaattttatttaaaccatttacactaaaatacacctcttcgtgatgctttctttttgctatgttgaatttatttcgcatgtttacggcgcttggtgcgtttacacgcacatcgaccggaagttcagcccgaacatttcggacaatgtttcgactggttgtcggaaaatcacttcgagcctcttggcgaatttgctcatttgcctgtcttatctataccaaaaatagatggtttgcttttttggcttacattgagttggccaaaaactgcggcatggttgtggtcggctgacatgcgacccatcttgtaacgacttccatttgcatcgacgtgccacgccatttgaacacaatctcgcccaggacagtaagggggacgttttgggcatttccagtattcccagccttgctcgattcgagagtcgctctcataagcatattcgaacccaagacgagaaaggagaattttgccacggttggatttcgcttcttcaaatcgaacaagagccatttttggttgcagtaaacgaatgaattttcatatcgttcatttttatgcattgcaaaaactagataaggactaaacaaatatgcaaataggcaggcactcgagaacgcatgggaacgatggcgagataagaagtttgagttactaataatattcaacagttttaaagtacaatttcttttatgtaaatcatttattaaagtacaaataatcacttattttatctagagttaccatacgcaaaaagcgataaatactgtattaaagaagttgataaaaatgaaaaatttttaattttatgcatccactgacgaaaatgttcactgacgaattggaacactgacgaaaaaaatggaaaacagcaaaataaataaaaatagtacactgacgaaaatgttcactgacgaaattattcgctgacgaaaatcactgacgaaatcgttcactgacgaaaatgcttactgacgaaaatataattacacggtgggtccggcggtgccgataggcgccgggaaaaaaattgagtgcaatttgttaactgattttgtcgaaaaatagtccaattttgtgatttttgagctatttttaagaaaataatggatttttagagtccgatggtgccaataggctgccgccgaaagtttttttgaaattttttcaagtttttttacggattcttgtccaaaaatgagcaaaatttgcgtatcagagcatttctgataaatcagaacagatagaagccctgcttttggttcaaaaccggcgtgaatgatctcttattgaaggattgatggctttcagttcgtctccgtgtatttaaaccggtttcaaacaaaaaccctaatttcgcaaatttctactttcgacttgttcgaattcggacccgggtttggaattcagtacgtgttcttataaaatttaacttctaaattacaatactaatgctatagaactttcttttaaaatatttgtatcatggacgtattttctactaacgcattttccactgacgcattttccgatcacgaatggaacgctcgctttatatgtaaagaagggtctgttgaactgatgccctaccgtattcatacagtcaattattaaagactaaattttgagcgataattaaattcccgtttctcactctcgagttgcgtagttttacttcgctctcaaatcaattctcggtctcggcaaactatggctcaatattttaagccttcggtttgatagcatggttatgagtactgtatggatgggtttgtaccgtatcccctctcaatttcgtcgactttttgtttgtttacctcttccaaacccgggctgcaatttggcaaagttgccaaattccatgtagtccagcagaaacagtacaaccagcagctgcacactgagtcgagtcttacggtacagctgcaactcattccattcatttgcgatcagataagtacgccttgaatttgaggaaggggggggggg

SEQ ID NO: 14900 - DNA, 915 bp, Heterodera glycines
  unsure (1)..(915): unsure at all n locations
atgtataagatgcaaactaatgcataattgaagcagaattttccctcatcgaagataaactattcaatatttcttaggctggtttggcaattctttctggcattgttggcatcggtggtacaattaagactggcgagaaggcttgggcttttggcgctgctttaatgttggccaatattccatacacttttctatgcatttttccagtcaacaaacgtttgctggctaccaacgtaacaaaataaattggaattggaaggggtggagcccaaacaaaaaatacaaatttaactaagggagaacacttatggcctggttattatatgtagttcattaaaatatcgtaaaaattgagctgaacacgaaccatttaatagcaaaaatcctaagatttttaaaacccagaggtggaattttggttcgaattccgtatttacttatgtttgtatgcatgtaaaatgaatacatttataggcatttaaaaatgtatacgaaatctgtcccctaaacttaacaagtaccggaattttttttttttgatttctctcctctccccgtaaattggactgacccgccaaaagcatggcccaaaaatgaattaattctgtgggttctcttaaaggaagcaaatgctgatgaaaacactcgtgcagacatacagcgctggggccgacttcacgcggtgcgcactgtccttggtttaattgccactggcgtttatttatacgcagtaagcaaagaataaaaggagaaaggaactttaaatccgacaacataacataaaatgacatatttttaatgtcaattttgcatattcacaaatttgtgtgcgtacactttcaatcacatttttatatttgcactttattacataaaaacattanagcgtttacttagcttgttgatttttattaa

SEQ ID NO: 14901 - DNA, 2142 bp, Heterodera glycines
  unsure (1)..(2142): unsure at all n locations
attctcactaaaanaattccctcaaaggtcaattcttaggggtgtaataatcggatttcaaggcaaaatccgattacgattatccgattccgattatggcccaaaatccgattaattgcgattccgattacgattccgattcggcacatccctggtatgtggcgtccccccccccccnccctccccgcttttcctccttattcgccctttatattaagttttgcaaagttttggcgttctgattactaaataaataataaacctatttgcactgagagcccaaaattgggccgctgtgtatattacaaagagcactatttagagaagggtcgaaaaaatcaaagtggggttcgaaaaccaaacgagggatcctttttaaggaacaaaaatggataggctaaatgccttcgagactgaaccgtcgagtgggtaaaacatataatgttcaacaaaatctaaaacggttcctctcatttggagtttacccatcttttgtctaaaaaattctttcgaattcggcatttacagaccgagagacgtcaaatgatatatcatttatagaattgaatgaggcacacttttattagaatggcagattggatgcttagaaaataaatttacaaacaataattatgacttctctctttctctaccaccctccgttattcgtgcgcacaatcagctgctcccgtcccttcccaactccgatgtattcgacgggtacgcccagttgattttgtatgaactccaaataggcacggcatttgtccggcaactgttcccactgacgggcactggtcgttggcgactgccaaccctcaaaggttttgtaatggacgcacaaatttgcccaatcatcgacggtcgctgaaaaaagataaacacttgaaatggcataaaaacagtcgttaattttgttcagctcacctggagggtactcaatttgccgtccattcaattcgtaaccaatggcaattttaatttcatgaaattggtccaggatgtccacctttgttacagccaaactaaaattatgaaaaactataaatatgaacatataaaataataattgggtgaaacgtacgaagtgaatccgttgatcattgcagaataacgcaacagaaccaagtcaagccaaccacagcgccgttttctgcgagtggtcacgccaatctcagcaccaacttcttgcaaacgtttgccctcttcgctgggctgtccctatggaaagacaaacaatgcgatcaaattaacataatttttggggcaagtacatacatcggcgtcaagcagttcagtcgggaacggaccggagccgacacgcgtttggtaggctttgaccacgccgatgacgcgacggacggctgtcggcggaatgccaaggccggtgatgcaaccgccgacggtagaattggacgaagtgacgaacggatagggaccaatgctgccgggttgaatggtgccacgttttctgcaaattgatcggtgttcaataatttcgttttttggtttacgagttttgatccgttatggcatcgcgcgacaatgtcaatctgagaaagtgagagggtttaacaaacaaaacaacaaagcaaatgcattaaaagaaagcccaatgaacaaatactttccccagggatattttcttttattttgtaattatttccatcggcggaatgccggaatccttcggaattggtgtcccgacagaaaaaaattcaaattttctttacactttctcatgaaacctcgtatgcctctgtgaattgcaccgattcctcctccgtgttggcataacgtgccatgtcgttggaaaacaaagaccacaagcaaaagaaaaggtgcacgtatttaggaggggaaatgagaagaaaagaataaaatatgtacatttataggcagttaaaaatgtttgtgaaatctatcccgtaaactaaacaagtacccacaccgtttcaaaaaacgagatgtgtaccaatanatagagagtgccagagaaaaatgcatctctcattttggcgtanctattttttttgtctctggtattagagnaaaactgaatttacttcatccctgtttacttnttttctgctttgtaatccgctttcaatttgcatatcgatagagaaaatattctgcatc

SEQ ID NO: 14902 - DNA, 1420 bp, Heterodera glycines
aatatataaaatcgcagcgtttaggcaatttccaaaaaagatttgattaattaagtaattacttattattttcgtttgtaactttcttggaatgttcgaattttctagttttctcgtatattacattatttagtctgtactttcgaatgataccaaaaagatagggtttgttcaaacatgaacaaagttattgtataaaaccattaattgtactcataaaagtcgattggactcataaagtgcactagagccctgtttttgtttacttatcggtattatccacaatctttcattttttaatcttcagttttaactaaattagaaaatttcgcttttcgctacagttatgttaattgatttcatcctctaaatcatcattcaaattcagtgaaaaataatgacagaaatcacatccctcgagttataaataggtctcaaaagtaaaattaactgatggttgattcgccgataaattaatcaaaaagaattgatgaaaaatttaaacattaaatagtgagaccacaactaatcaagacagaaaccgcaacaaatctcggacttcattgacactccgtctcgttattccgtctctgatttcaggttcgagtgccaaaaaatcactgacgtttccagcgggaaggactatcattgctttaccagcagcaatggccgcttcgacttttgtttttaattcatcaattttcacaattcggccgtctgatttcactgtgccagtaaagcacttcgagtcttgcacgagccgatccctcccaagcgctaagaaacccattgccgctgctgaagaacaagacccgccttctctcagtgccattttagggaatatcgacacatggaactttctttgattgaaaaaggcgtcattagcgcacacttctttctagcaatcaaacgcatgctttagcgagcgctgaagataagaattttaagacaattttattattgaattatcaaattcgatacttttactgtttaaaaccaaagtgggaccctttgttttctaatttttttgtcataaaaaataatgcggaccgggtcagtttagtctgacaagccgttttcgcacataatttcttatgtttttttttgttaatcataaatgaggaaaacttaagattaaaaaaaaatttcgggaccaataatctttaccattgcccaaaaaagtcgtaacacgaaaaaattaaatttttgacttgtttccgaagggttaggggttggtcaaaattagtgtcagattcattataagcgactccgaatttttaaagctttttaaattagggtattaaaaaccttcaaacgagtatccatttcattgccaagacgtaacgattcccgtaagtagtaatgattaaatactgcatctatacggatttttatcaattttcctaaaacgaaagaatta

SEQ ID NO: 14903 - DNA, 1380 bp, Heterodera glycines
  unsure (1)..(1380): unsure at all n locations
gcgaaatgtatgttttaacattagtaggcgaaatgtcgagtaggcgaaatgtcatgtagccagggcaatcgcatcataatttccaaagacagcgttttgatcaaacaccgccctccgctattcatccaatgcgcactttccaaattcgtcatcgttcaacggataaaacgcgcgggttgcgtcattttgctcacaaagtttgtgagaaagtgaagcaaaaagttcaaactaattacaacgaagttgcggaagaattggtcaatgaatattttgacaatattgttgaagtcccatcggacccggttaattgatattattcgtaatgaaataatgcatttaaatttcaggaaaaattacaatatgatacaagaaacattcgccgtcgtgtttatgatgcgcttaatgttttaatggcgatgaacataattgaaaaagaaaagaaagagattcgttgggtgggcttgcccacttcgtcgttggccgagtgccgacggctcgaagaagaaaaggtatgacgccacagcaaattcaacgattgaattgttaaatttcatggctttaggcacaacgtcaggaacgaatccgtcaaaaaaccgaacaacttcaggaactgatagttcaggtgattgaacaaacatagttatttcacttaaattgatctttttagttagtttcttacaaatctttggtccagcgcaatagagaaagtgaacgagtgaatggcaggcctttggtgccatgtaatcccgacactgggtaatttcgacactgagtaatttcgacactgaactattttcaaaactttcactgttttacttcattttcgacactgagtatttttgacactgagtaatttcgacactaaagagttttttgaaaaaaattcatgccaaaatttgaagattggtcaaaaactaaatataaataaactgcaaatatttgtacatataattttctcattatataactggggacaaaaattcacaacagtttttaaagtttgatatactttcgttaagcagtttgagcggaaagtccaatcatttccttaacaaaaaattggtgatatgcaatagcctaacatttgtgatggcacttttgatataagcttaacttgggaacaattaagtaaaaaagacacaaaatttttaagacagcgcctagggggtttgcccagttgtacacaatgagcgttgtgattgaacattcagcagtccctaactttggaaccaactgctgaattgcagggtaaatcaatatgaaaaagctgggaatttgggattaaattaaagcgtcctatatgaaaaactttaaagaactcgtcatatattttgtaaacgctntggattgggccccgacgaannttgttgaagaagaaga

SEQ ID NO: 14904 - DNA, 1497 bp, Heterodera glycines
  unsure (1)..(1497): unsure at all n locations
atataaatacattccctgtttataacacgtgaatatctcttctaagatgttgtctattattattttcggaaatttctaactattgaattattgcaaatttgtataagaaatgttttccgacttgttgtaaaatatatgttttttatattgtaagtgtaagaaagaatttgttaaattataattattattttaaaataaaattaagatcatattattttaaaaaatgaacataaatattccataaaataagtcaggaaaaataactgtttctaaatgttaactttgaacaaaatttattttcaaaaattttattaataataacctttaacttaaaagaaatgaataattaaagataacaaattgaaaatatttaaatatttttttagaaatgccattaaaaattgacaatgccaaaagaatgcagcaaattgttcctaaagtcaaatcatcagagaatgtgacaggatatttggaaaacaaaaatgaagaaaaacagcaaagaatttcattcaaaaattattttaatgaaatcaacgcttattttaactattatggtaaaaaagcggataattaaaaaaaataaaaattataattttcagggtaattaataaatttaatatttaaattaatttagtgcctaaacatataattggactaattgctcttaaactgatcaatgcaattcaatggcacttggaactgaacaatggtcaattgacacatgtgttgacacctgatcatttggtggctatccgtgttggtgatcaatttagcaagtcggaactgctcggaaatgttcaccttgaaatcgatgccgaaattcaacgcgtggaagacccacggcagagggcacttcccagcgctgatcaaaccaaaatcatttggctaaaagacttttcttatatgagtccacagcaaataaaggtgattcattctaatcacttttttaatattatagctttagaatttttatcatttattaatcaattaattagcaatttttaaaatttaaaatttgtctatttttatattgaaaagctattaatatagtttatcatattatatttagagataaatgtttaaaatgtttatttagcacaatattattacgtcgggagaaagtgatattatttggtcatttggaatcactttatatgaaatgatcagtggtgaaacgcccatatggcatacaaataagcaatatttttattgaataattttattaaaattaaaaatgcatcttaaacatttttcacaatttttgtagtgccatcaaaccaaaacaacaatggcattggattccgttgaatgacgaaaaaggcgaaataaatgaggcaattaaaaaggtaattaatttaccaattaaatacattgagtcattaattaaaattttaagataaataaagaacaaaaatatgttgaaatgtttcgtgataaaactcaggaatttatggaagcaaattttcccattntgtcattcgttgggacttccgctga

SEQ ID NO: 14905 - DNA, 1552 bp, Heterodera glycines
agttttatttaatttgaggaaagattcataaataatttcctctccaaaaaaaaattatataagattttccctttcttatttttattgcttttaataaaataagtatatatggcattaccataaatgttaaatatttaggggagggggcggggtgtaaatcagggatggcgctgaatcccgaaaaaccagacttttaaatttaatcctttgaattcaatcaaaatttatctaatcaggatttaaaaatgcttctttttctaataatatttttaaaagaaaattattaattaaaaaggcaaaatatgaattgaatctcaaaaaattattttaaattttataaaaaaatttatttgaagttttataaaaaaagtaactattttatgtaacaaaaaaatttaaaaaggggcatctcttcagctaaaattgattttcgtttttttattgcatttttgttaggaaatttttgtcaaaaacaaaaaatggctttaaaaattaaaaaaacagaaacccaaattaatattacataatcaaagtttaaaaatctattatattatttgacaaattccgtcacaaaaaatgtcgattcaaatttacgcaaaaataaacataatgccaaaaaatttatttagtaaatacataaatgaaaaagattatgcaataataaaatttagatttttcatcactttttttctttttatttattttttttatcttttataatttgtttttttctacttaaattaaattaaatactgctatttaaattaaaattctaataaattagagagagggggaggagataagagagaagagaaaagagagagggagaaagagagaggaggagagaagagaggaacgaagagaagagagaaaaagagagagaggaggagagaagagagaaacgaagagaagagagaaaaagagagagaggaggagagaagagaggaacgaagagaagagagaaaaagagagagagggagaaggagagaggaggagagaagagaggaacgaagagaagagagaaaaagagagagatataagagaaaagaagggaaatagagaggtggaaagaagagaggaaaggagggagaaaagagggggagaaaaaagaagagagagagagagaggaaaggagagagagagagaaaagaagagagagagaggtgaaaggagaggacagaagaaaggataaaaagagagagagagagtgaggagaggataggataaaaaaggataaactaagagagagagagagataggaagagagagagagaggggttgagataagagagaggaaaggagagagagagagagagagaaaaaagagagagggagaaagagagaggaaaagagagagaggggatgagataagagagaggaaaggagaaagagagagagaggaaaggagagagagagagagagaaaaaagagagagggagaaagagagaggaaaagagagagaggggatgagataagagagaggaaaggagaaagagagagagaggaaaggagagagagagaaaaaagaaagagggagaaagagagaggagga

SEQ ID NO: 14906 - DNA, 1249 bp, Heterodera glycines
ttttttgggaaaaaaaatctttttcaaaaaatttcccccgggggggggggggggggaaaccatgtttttaaaatttttccttttttttttttttaatttaaaaaaaaacacttccgggggaaaaaaagggggttgaaaaattttttggggaaaaaaaacttttccaaaataatccccctgggggaaggggaggggaacaaatttttaaaatttttaattttttttttttttatttttccaaaaacggtttaaaaattcaaaaaaaaaacccttcccggggggaaaaaagggggttttaaaaatttttttgggaaaaaaaaccttttcaaaattattccccgggggaaagggggggggaaacatgatttcaaaattttcaattttttttaatttaattttctcaaaacggttcaaaattcaaaaaaaataacattcccggggggaaaaaaggggtttgaaaaattttttggggaaaaaaagactttacaaaataatccccctgggagaagggagtgggaaacatgatttcaaaattttcaattttttttagtttaatttactcaaaccggttcagaattcaataaaaataacattcccggtgcgaaaaatggggtttgaaaagtttattggggaaaaaaagactttacaaaataatacccctgggagaagggagtgggaaacatgatttcaaaattttcaattttttttagtctaatctactcaaaacggttcagaattcaataaaaataacattcccggtgcgaaaaatggggtttgaaaagtttattggggaaaaaaagactttacaaaataatacccctgggagaagggagtgggaaacatgatttcaaaattttcaattttttctagtctaatctactcaaaacggttcagaattcaataaaaataacattcacggtgcgaaaaatggggtttgaaaagtttattggggaaaaaaagactttacaaaataatacccctgggagaagggagtgggaaacatgatttcaaaattttcaattttttctagtctaatctactcaaaacggttcagaattcaataaaaataacattcacggtgcgaaaaatggggtttgacaagtttattggggaaaaaagactttacaaaataatacccctgggagaagggagtgggaaacatgatttcaaaattttcaattttttatagtctaatctactcaaaacggttcagaattcaataaaaataacattcacggtgcgaaaaatg

SEQ ID NO: 14907 - DNA, 1869 bp, Heterodera glycines
tgatttccgtttttttccatcgttcttaaacccattttgtccctctcaatttttcacttcattttttacgtattctgatttcatattttcatctttcttaaacccgttttttgtccctctcattatgttcaatttttcatttctattttttatttatttccatttttttctggtcttaaacccatttttcccctctcatttatgttcaaattttcatttctattttttatttatttatattttttccgttcttaaacccattttgtccttctcattatgctcaattttcacttctaatttttacttaataaaattggataattaaggcttaatgtttaattactcgcaaaaaatgtttgagcaacggccacctcttattgacatgctaccccctctgattcgtcccgatttaatcccccccacatcctcattaaatcaactgcctccccaacgccaacaatttttgactcctccgaccaattttcaacccccgcttctctctcctcaatccaccaatttgcgcccattcttttttactgctccaccgacatttgcccgccctccgctgtttgttgatcctaataccgttcattggccttctttttctgtgccacctcctcctgtccatcggccatgtctaatgcctagtgcacaaaattggtctcctcgtcctattccacaaattttaccaacagtaccactgtgtcaatttctaccacaacctgcccatccgacacaatgccatggaaattttttctccaaaccatcggaacccaagttgtcattgtctcgtctgcatgatacagcaagtatgtttctattcataaatgtaaaatactatgtattttcatcaatatgataaactatttttaactgaatttgaggatgcgacaaagaacgaatttctcgtcaaacgaaaaatcgtcgctttgacagttcaccgacgagagtcccggatgttttttcatgtgatttattgaatttatttattacgcatttaaaatttgttaagtgtaaattcaattccccattcattttaaggtgtcgttaaccgatcgaatgggattgcacgttcgccgatcaaaaatgtctcttccgaaaattgcggtaatttttagtatttcataataagttagcaaattactatttattaaattcggttgcaggaaatcgatcaaatgaaagaagcgtgcgatcgtctgttaatgcgccgagaagaatttcacgtaaatttgcttaaatcttaataatatcaaaataatcatattttaatagactgcataacatttaggtgagcgacatcggtcattgagacgaaatgcgcggtcgcccactaaaaggacgagctttaatggattttccggtatttgatttcctcttacaaaattaacactatttcatttattattcattttaaatctcaaaatttccatttttcagaggataaacgataccaaaaagtgaaacaattgggcgatcaccgagtcgtgtcccggatggcgattctcgtatgattaattttattattggtatattaataaaaatagagaaatatttacgtaacatccaattagtttttcatataccaaaatttctgaaaaatacaatccactgaaaacaaaaaaaacaattttatatttaattattgtcactttgaccattttatatttacagataaaagatcaaagggtcgccgacaaaatgatgtgtatccgtccagaggcgtgtttgaccattatcgtaataaaggtaaattccagagttgtgcatgccgtattttcactaaatatgtgcattttccattcataatccgtcacaattttttgtattttaaagaattttcgttaattttagatgacagacgtcgtc

SEQ ID NO: 14908 - DNA, 1346 bp, Heterodera glycines
  unsure (1)..(1346): unsure at all n locations
cagagagttatcaantatgggatatacgcctgatctgattatatcagatntaaagatataccaaataaaaattaaaaaaataattttcagagacttttggcttttgtcgcaaaataaattagccgatttacccagaacctttggattaaaatgttcaccaaaattatattttccgcataaatttaattcagaaaaaattatggtaaggcataaaattaatacttagataaatttgatttaaggaaaattgataactcatctcccacccatagaagattattatcccgactcattaaaaaaaaatgaatttattaagtttaaaaaatggtatgacgaaaattataatacgtcttttttgttaggtaaaaaatttaaaaaaaattttcgtcattaaaatttttagaggaccaattagaaatatactgtggccaagacaccgaaattttaatgaatgcggttttaagtatgagaagaatttttttagaaatcacaaaagatgctgatacacctcaaggatatgacgttataaaggtattaaaaatggtttatttaaaaaaaaattttttaggaggcatcgactctagcgggcgtagcgatgcgaatatttagggcaaaatttttaaaagaaaaacatttagcaataataccggaaggaggttttgaaaaaacagacacacaaagttcaatcgcgattaaatattttgagtggtttatgtacaaaaatggggttaaaggccgacacgccggaaatggcggtgaaataaagattggaggtaaaaaagcatgaaaattcagaattaaatatgttttaggttttaaattagattttatatgtggaaaaaagaaagtcattatcgaatttcaggtccctagaaaaaagtttttttttattttttaaattcttacagggttgtgcatttcacggtttgtttttaattattaaaaaggtgattataaatttaggctgcccaaaatgttataagtcaaatcatttatgtcctaatgaaaattatgcagaacaaaattttttgaagactcagagtagaatgaataaactaaaacatgtggcaaaaaaatatggattaaatgttgaagaaatatgggtatgttaaatttttatcatataaatcctattattttaaaggaatgtgatttaaaatcaatgttaaatcgaaaaaatgacacaaattataatagcgaaatgaaaaacttttttgatgaattatacgacaaaggtaaaataagctttttttaaaacggtatatttattaatgtactaggtccgattgatcctcgagatgcttttagggggggccgtacacaggctttttgcttatatgcagaat

SEQ ID NO: 14909 - DNA, 2950 bp, Heterodera glycines
  unsure (1)..(2950): unsure at all n locations
ttctcgaagataggaattgattatacaaacgatccgttcccccccgggcaaacttatgtcgcattttctcggtgcagatcttggaaaggtttaaaaataaaattggcaaatgagaatagcgaaaaaaaaataaaaaatatagtgtggcaagaaattttaaaataaacgtatatatttataaaaattaaattttggaacagaattacaataaaataattcagttaaggttaattaaattgtatggtaataaattagaatggaactttgattaaagctgaataagagatttagaaatgcataaatatttcattattatatgttttgttttggaaatttaatataaaaatattgtttttctttttttcattaataaagaaaaattatttgtttgctttttcaagaataattgaatgtataacataaaaataacacacatataagcaattttaacaaaaatatgaatgaaaattaaaacaaaaatatattaaaaacagacaaaatatatattggaaaaaattggagctaattaaggtaagttaatcgttgcattaacaaggggggtgcaacgtatgatagggcgggatataaatcatccctttaactatcatttaacccctgaaagctccaatgatacccgatgctttggtgcgttcacgccgcgggtatcgttagtaagccaaaaggccgaagccaaatccaaagcagaaaaccaaaaaattaaattaaagaaaagaaaaaaatatgacattctatggttttttaaattttagttttgaaaaatattaaaattaaaatatatataaatttaaaaaatagattgttttaagttattattatgatttttaaaaaggttttgtgaacagattattggccgataaataggttaagtggtttttgatcattaattgttagcatccagtgctttgttggccggtaaatgtgttgttagaaaagttgtcgcggtgttttcttcaaaagtaaataaaaacaacttttacattaatacatattatgttaaataaataaagttaattcattcttttctttaaaaaataattcaaatggatctttcatttaattccgagaaaactcctccaaagcgtgccaaacgttcaccaattcaacgattaaaagctggagaaacgatgatgtgcgtataaaaatataattaattaataaaataaaaataatatggttaagtgatataaaattggttttgattatggccgattctgtgcggattgttggagaaaaaagcaaagtttggacgattattggtagcgatggagatgattacatcaacggtggaacgtctaatcccgtcgttgctgccaaaactgattcgaaaaactcttttgaagtatgctgatctgcgtgctttctcttcggcagttgtggcggtggcggtggagggggcaagtggtacactggtgtcggggtctgcgtacaagcattggagcgaaaaccatggtcaacgttaaaaacacggcctttgtttcgaatcttacaattttaaaatttgtttcttgaattttaaaagcccaaaaaaatgatgatgatgcaggtcagaaggaaatgggtaaataaatgccaacaccgattaccgagacttttcattttctttcgttttttatcctatttccctctccaatattatggctcgccgcggacctcttctaccgatttacaagcggcgtaacgttcgccgacaaattcaaattaatcaggtataataaagttttaacgaaatttaatcatgtttatttttttaagattttcgttttgggcggacaccaaaacagctattgcctatggggttgcgccctcgcttctcctttcatggctcctttggtaacgaattgttttaatttttaaaatttgaaaatgaaactatttcagagttaaatctcgagagaatcgatggacgatgggcaaggagagagagcaattaaccgagaagaggcgtaagacaaataatttaaaataaaatctcctcaatattttttttaaaattatttttctaacctttttctaattatcaatgtttgatttaataaaatgttaatttcgatgaaatttgtttttttttacttcaaattaaaatataggtgaaaatttaaaaatcaaaatttttaaatatttccatttttaaatccattttaaaatcctttcttcaaaattcgtccatcgttctttgtgcccgttctggtctcattcggtctgaaatttgtaaaaatttgaaatgaatgaaacattcctattcactctcaccacttcaaccgcctcgtcgatggtctccagctggcccgaagtcgagacctattttgagagataaatgcataatttttccttcactcctctcccattttttaccttttccaatccgacgcgttgcgagcggcgcattgcgcactcgtccccatgtggcaaagtggggctctgaaaattttttaatattattaacaaataagtggagaatttgcttccttccctcctctcccgttttttaccttctccaatccgacgcggcgcgagcggcgcgctgcgcactcgtccccatgtggcacagcggggctctgaaaatttgtttattattaacaaataagtggaggaagtgagggaggggtggggggattacccgaggcaccgggcagaacacggtgagaggacggccggcaccctccggcggcaattcctggtgggtgcgctgacgccgatgaggatgacgagtgcgggcctggccacggacgaagaggagacagaaaatacaaaactgatttacaaaaaatgaaatttattttaataaaatttaaaaattaataaacaaaaagtttcacctgagtgatcagaatgaagaggaagaagacaacgatcagcccgctcacgctgcctttgtcattngtattgttgttgttgatctgaagcagcagatccgtcatngtgatgtccc

SEQ ID NO: 14910 - DNA, 2924 bp, Heterodera glycines
ttttggtcggcgctttgttcggctcattgctccgtcggctttcgttccaatcgcagtcccaaagtgcgctcgccgccggagtgtccggcgaagctttacaaaacattcgaacggtcaaagtgttcgccatggaagaggcagaaacggagtcagtcgaacgaatgaatgcaaaatgcagatcaaaggaatattttgcgctttctttatcagactctatcgtaaagaggtgcaaacggcgtgttccctcggcgaacggctcggcgttggcatcggtctcttccaggctttgagcaatttcttcctcaatggtccgtctaatcaccgatatgtccgttgttaaatagttttttccattgttgaggaattgtattgggtgttttatatggcgggggacaactcgtggctgatcagcaactctccgcgggcgatttgatgtcctttatggccactgctcagataatccaacgttcggtgtcccaattttcgttaattttcggaaatggaataaaggtgatgccatttgtttggtctttctttgtttgtgactccttccttccatctctctgttaggcttggacttcttgcgcccgaattctccaattcttgcgcattgacccgaattgccataatcacttgaacggtaatgaacaaatcccaaggcattcgctgatcggtgacattcatctgcacaacatttgtttttcttacccaactcgtcctgaaaaggccgtgctcaacggaatcgatttgcatttcgccggtggacagacaacggccatttgtggcccgtcgggtgcaggtgggcgccgtctgatcgaatttaaacgcaattaaatactattcccacaaattaaattcacattaagggaaaagtacaattgccgcattggtcgagcgtttatatgagccacagaatggcaaagtctgaaaggatggtaattggtgttgccgaatttcgctgctttggtttaggttactttggacggtcgggacatccgctcgttggaccccctttggttacgccaaaaagcgatcggagtgatctctcaagagcccattctcttttcgacgtccattagagagaacattcgttacggaagaccaaacgcaaccgaagaagaagtgaaagggacggactactaaaggaaaaacaaatgcatttaaagattcgatctgccgccgaattggcaaatgccgccgaatttatcgaaaactttgccaatggttacgacactttggtgggcgagaggggcgcgactttgagtgggggacagaagcaaaggtgcttgaaataaatgcaaaaagaattgccccgaaacacgaaaaggatcgcaattgctcgtgctctgatcaaagaccctccgattttgattttggacgaggcaacctcagcattggacgccgaaagcgaaagcgccgttcgttgtgccctttgggtgcacttttcgcttctccattcgcttaaggttcaactcgcattgggccgcgtaatgcgcgaccgaacggtgattatcatcgcacaccgactgagcaccattcgaaacgccgaccaaatttacgtcctgaaaaatggacaaatggttgaggtcggtcaaacgccgccggagagaatttgcaaatcgtttggttggagtgagcaaaaagcattccaattttaagaaaggcacgcatgaccaattggtgaggaacagacgcggtgtttaccattccttagtcggcgaacaacggcaaaaatctccgggagaagatgaaccgacaaaggcaggaccaatcgagaaaataaaacaaattttcaatttttaattgtttgctatttaaaatagttgaataaagttgcataagaacaaaaacttcatttcatttccccatagggcctgaaaaatagactttttcttcggacaggttcgcgcatgccaatgtttgccatttttcctttattgtttaataaagagaaaaatacatctaaaaatataccatttatagatgtacttaattttcaattttagtacattaatagatttggatttccgaccgctgaaattatgtcaatttgcctttcgaaataagcttcacttcttaagtggccttattttgtcaagcttttctgcataaaagctggttgtacactgatataaagtggggtggtgaaaagatgcccgagattgctaattcccccttgtagtttatcagcttttaattataaattaataatttatctcgcaaaaaaaagaacgacaattcgaatatgtcattaggcaattgagtgtttcattcccggattggttcatcaaaatgtctgtcggacttgctccgggttgattcgcggtgcctccaccactttcggcttcttcgtgtccctctgccccctcagccgctctttcacattttccaatgccttcctttcgattacttctcccactaaagcatttccctttccgactttgccatttcgttctttgacctcacaaatggtcaaattttcagtcggttttcgctctttccgtaggcattcgattgaatctgtgccaatttcattggctgacgatggagggactggcagaagaaattgcatcattaacaactaattaagcattttcactcggtttacccagcagaaacccgcgcttccattctttgagctccaatttgacggcattctttgaacaatcgctcatttggtcggctttggcattattggatgaatctttcttatttttcgtagtcacgaattcctttatctgtttcaaaaactgtttctcttccgactccgaatcctgaaattaaaaacccaaaattactagtaattaatgcaacgtttaatttgcacaaactttgaatcttgaaaatcaattaccatccccagtttcttaggccaactctaggggaatattacttcgggtgactcctctttcgcctcgtccttt

SEQ ID NO: 14911 - DNA, 2115 bp, Heterodera glycines
attatgaatagggcgaggatttttagttttttaattatttttttctgcggctttatttagacgagaaatgcacgaaaaacacatttttagctcggaaattcttcgttttaacgccactattcatcactatgaatcactatttttggagctttgccactaaaaaaactatttcggaagttggccactaaaatagttttttgccactattttggcgcttcttcacttattttgccactattttggcatttttggaaaatttcccaaaaaatgcaataaaaatggaaaatataccccaaaaatcgacctaaaaaattcaaaaaatacacccctaagaatcgacctaaaaattttcaaaaatacgccccctaagaattggaaaattttctcaaaaattcttcccccaaatttttttcttgctcaatatttaagaaaatgttttgtaactgcaatcagtgaataaaattgtttgccttaattttaaattattttcaaattaaaaaatagctatttaaaaaattacacccctaaatttagaactttttcgccactattttgccactattttgccattttttgtcactatttagttaattattttggggttttttttcatgcatatttgagggtttttttgctgccttttttccgttctgtaattataatatataattcaatgtcatggagatgctatgcttggaattactgctgtgtttggaatcgttttcaatttttctgtcatttttataacagttaagacaaagtgggtaaaaattcaaaattcacaaaaatatgttttaaaaacattacaattgaaaaaattaaaatttagaaaattccgtggcaccataaattaccttttggcactttgctccttttttgaattgcttcatcagcttggtcattttttgtttgtgtacatcgcattttctggccaaaatttcgtcgaattttgtttggccacaaaactggtttttgtctcggcgtttggtcttggtaattaaaaaaaaaacttatgtattaatgaagttaaagaagaaatcattaacaatttccaaactttgactaaagttcgcattaatttttggacaaattatctgttaacaaaacgcattaaaaattacaaaattttccccggcggtgtctttcggcaccgcgggtccttcaaaatttgataatttttatacaaaaaaaaaaaaaaaatttctccggcggcctctattggcaccgccgaaccctccccccccccacacgtcaccaaaatttttttgaaaaagagtgccgcaaaaaagcagttctaaaaaaaggtccatcgcctggtgctaggtcacttcacgaaaagtgcaaaaatgacgacgtcaaaaatggggcgtttcgcgaaaagtgcaaaaatgggcgtttcgcgaaaagtgcaaaatggggcgtttcgcgaaaagtgcaaaaatgggcgtttcgcgaaaagtgcaaaaatgggacgtttcgcgaaaagtgcaaaaatgggcgtttcgcgaaaagtgcaaaaattattaaaaagagactgggcctcttcaatacggtgtctctttttattaaaacttaataaaataattattccgtgtgtttcggcccttatccgtagacacacaagccacagcaataaagcaaagcaaaagcaattttattaagcaaaataaatataaattaatttatataaaagattttgttttattcaaaataatttttttaaactaattatatttaatatgactagtcgtttaataatttaaataattttttattaatattattatacttgattttaatcgtcaaatttttatgattatttattccagtaaaaattatcaaatttagcaagttaattttttttaaatgattaggatctatgatcgcctcgaaatgtcccaattcgaaatatataaagattgatttatactccctcgcctggtcaactagcatctaaatattctaatagttagacttatcatatttaaatgtgtaccgaatccagcatatccgacggataaagagataataaaaatttatgaatatatgtggaaagcacgcttagaagtaaggaataagaaaattttttatagctttttataaaatatgaaataa

SEQ ID NO: 14912 - DNA, 2878 bp, Heterodera glycines
  unsure (1)..(2878): unsure at all n locations
tttggcgcagacaagttaaaaagtttcataacttttttntattcaaccaaataaaagaatattgagatattaatctataggtctcaatgttctttattagcctgcaaagtttcaaaaagctatattaggtttaaaaagagatatggcgtgctgcaccaaaatggccagaaaatgtaattttttgaggtttttggccatcattttttttgcgtctcagctaaattttttgaaactttgcaggttaataggcccgttaaaaatcataccaagattatttaatttggttagtaaataaaaatgatatgacgttctgcgccaaaatgggcggttcccttttaatggcaacgcattcgaattgcaatgttaattaaaagcacttacaaaattcacaaaaaggtttcctctcaaatcctagtttttttctcaaatatttgaagattccgacccgaatttgggtcctcctgtgacaaccaaaaatatccatgttttgggtaaaccatttttaaccaccagcagagactattggccaaatgtggcaaaaaaaaaacaccgtgatgtaatggctaatcgaaaatagctgtgggagccgaaaaggttgtgggatcaaaagcaacagaggccaaatgaaggaaagatggcacccaaacaacagtcaatcaaacccccaagcggtggatgtggtctagtggctaagacaacggatccacgtaaggagccccgagcggcggttcaaatccggccttccaccccaatttttcgcctaaataatatggtgacacttggcggacaccccaggtcgtttggtcttcacaccactcgacactccagaaacaacagctggcactggggcaaaagaaccggaggcgcgccgatccttgcatagcgggaacggcccaacgccatctctcgagcgagggcgctcgaatatgagaggaggggaatgtaatggctgatcgaaaatagctatgggagctgaaaatgctgtgggagcaaaagcaacaggggccaaaatgaaggaaatatggccccataacaacagtcatccctccagtggtggatgtggtctagtggctaagacaacggatccacgtaaggggccccgagcggcggttcaaatccggccttccaccccaatttttcgcctaaataataccattgtttgcccataacgttgctggggcggcagtgcgtgtggtggtgccgtttgctccctcggggcttgggtgggcgctgggaagtgtccattggatacgggatgggccacctcgtaatggttggggggtggaagataatggttggcggggtactgtggggctggaggagggtatgttgcgttgttcatcatttttgggacttaggacggatcgagaaatggatcaattagctaaaataacgcataaaataaagaatgaatagaataaatagtgagaagcaaagggcgaagccgggctacgcatggcttataattacatagtgcgcgaccggttatgactctgtgagttccggcttacacttgaacgatctctctccgcccgggccgctaccgccacggcggccccagctgctgcttgggggcaacaacacgccaccaaagccgtaatcgggcaataacgaacggctaacaaaaaggcaaaaacccaggccaagcaaatgctcacagcaaaaaaggcctgcggcaacgatccaactgattgaaaaagggcaaattggatctgcggaagggtcactccccctgtgtatgtgccatttcctcccttggcgctgctgatttgtgaatattccccatgctttattaggatgaaaattaaagtcccacgcaagtcaaaaaaggtttctccacccaggcaatctaccgtacaccgtgtcatcaccacggggtgggaccaagaaaggactacagagttggggtgtcccttgggggtacaacgagttacccacatagtcccatcagtacaactaatggtagcaaatgcctcccctcgggacgatgcacaagaataattaaatcgtccacccgtccgacaactgtaacaacccattaagcgccccggggaaatagtacatttggatggggtatgttggacggctaagtgggtcccaatcatttttgcaattaaattaattggagagtacgggaatgaactccagacacggccattgccgtagccaattcgtacttggccaaatgaatttgggagtttaaatagggggtcgccaaccactctctccaagtcttggtcagcgcggcaccggcatttcacaactgccgattcgtgaaaagtgtaacacgatggacacacttcttcagagagggtgcaatttaaatgttgggcagctactctggatggacattcgaggtacgtcttccacttcgggaccagtgccacgtgagtcccgttggaaatgaaagttccccccaggattgggagcgggggaagcccactaggggaaaaagttattgacagatttgcggtagaccaatgatgagtgactcccgggtaaagatttatctcctcagtgtaagatgcccccttgatttccaaattgagcttaagtcttaagtgaaattgccaggatgggcacgtaaataattcataagcgaagggagaagcgggttgagcaaaaattcggtaaaaaagacacgcataggcgggtgacaagcagcctcttctgacaaaacctgatgcttcccgacaaaaattgaggcccgggaagtcttcccttaattcgggaaccgattggtgtggctctaaatctgagcagaatgaacccgagcaagacccagctgctggacaacggagaatagaggctatttgaatattgtaggaacgtgtccaacgccgactttcccttttacattggagagataatcccttta

SEQ ID NO: 14913 - DNA, 2502 bp, Heterodera glycines
tccccgtaattgggttttttgagttttaattccctggcccccccccatttcctttccccaatcgtccaaaatacagtcagtcccccccctttttcttatcccgcccccgggagaggtacgacttggcgctcctgggttgcgacgtaaacccatccttttggacagcgttttaaaggcgctgacgcggacaaaagcatctaactgtgtgataatttcggaaagtctcgactcatatttttcaggtttttgtaccattttgcagtaaaatgaatggacagtggtcataataatcagcgacattacaacttccgccaccgtgtgacagtgaattatatggagcaggagtcaggttcatcacaatggtctcaaaatatgggaaatataagaaattatggacaataattaaatgaaaacactcatctgattgtgcaaccaaacaatgcgcacggaaatttttcccagcccctcgaaaatcagcctttctcggcccccgcacaaaatcagtcaattcctcaaaactcgaaccatggacagcagctcgcaatccctctgaaccctgtcataaattttttcgatggaaacgagcaaaacattggaaacccccgtttggagtcaactgcagtttcacctcatatttcatatcaagaaaggggcaactattttgtgaactttcccgagggtatgcaaaatcgggatcttgttaagaaccgattcaataataaccgccaaaatcccgctcaaaattttcaaaatcctcccgtgtttgtgaattcgcagctgaaccggaacaatgaacggccaaatcggtttcaaaatccaaacgagtttccggttcgggactcaaatcgccgatccatccacaattcgccaattaccaaaacgagcaatactcggctcgagatgctcggatgtatcggcaagagacaaattcgaattttgtgaccccattaaacctgcaattctccgaaaatgaaaaccgacacaattatacccaatttcaaaatccaagaaatttccaacaaaatcccgaaatggtttatgcacagataaatccccccgtttaccaaactcaagcatttccagcccaaaccattcccatcccggacattattatggaattacacaaagtcacactttccaaccaatacgcaaacacaatgagagaaatccctacccttaatggaacggaagggagtgacaaagtccaggatttttttttaactgttgaaatgtgtgttggagagtggcgccacgaaaagaagttggaaatgttgaaaactaagctgaaaggaaaagctctgagggcacttaacatggcactgagtaaatttggaaataccgcgccattcgagacgataaaaacggaaataatgtcgacattgagggagacggattacaaggaagcaagtgcttttcaggaacttacacagacggggaaacgaaaggagggcgaaagtgttatgaaatttggtgaaagaattcaaaggctggtaaattgtgcccatgttggtttaagtgaggcacaaagagacgaaatttccaaaaaaattttcgttcttaatatcaatgacacgaacatggcaaaatttttggagtgtcagtcaaaaccgtcccaaacatacgacgaacttttaatggtcgctaatcgtcttagtttggttgaagagaagactgaggaacgttcggttcaaatccgaaattcacaaaatccattccacttgccaaacgcgaaccaaatctcataccaaaacgaacaaagtcgttattttggtcaaagaaatttccaaaattcttaccagcctcagccaaaatattttggaagaaccgggcggccaccgagtcattcttacggaaacaattttggaggacgaaattttccagtgaatcagaattttaaccggtaccctaacaatcagcaaaacagaaattttggtagcgaaagggcacagagtaacaaaccgagacaagaagtaaattttcaaggccaagggtctcaaaattccataatacctgcaagtaatgcaaatgccgtcccgttaaacgcccaaaaacaaaattttcgtcccggatatggttcgaacgcaattattgttacagaaaatactgaggacaattcgccagtgatttctgtcggtcattttggacaaaaagagccaaccgattatgaaaaattctttaacgctctttccactcattcttccgaatttccgccaaaaaacccggctcttgttaaaacgtcaaaatgtttggatatcacactgagtgttgtggacaaaaaggccaaaggcttaatggatttgggtgctgagactgatatagtaaaccctgaatttttgtaccgaatttcagtggaaaaaggaattaatctcgcagattggggtttctgtcccaattctggccttaccaaattacctttttccgtcgcatcatttactggtggaaaaattgcatttattggagtgattaatgtgccaattagaatgggagaggtcgaaacaacaa

SEQ ID NO: 14914 - DNA, 4005 bp, Heterodera glycines
  unsure (1)..(4005): unsure at all n locations
ctggttccggtttccgggaccggaagaaaccggttccggcccgggccgatctctattattgttagaccgaatgaaataaaatacgaccatcacttctcatctgagttgacaaaccacgagaccaaagccaaaaatcacatcaaaatgtcggcacttttcgccgatagaaaatttcgaattgcgacacactgcgaagcgcactcactgtcaatgtcgaattttaaaatgccggaaaacgttcaaatacgagcaggagaattggccataaggcacacaaatttcaaaatatagtagtctatttattgaattcactcaatcatttgcatcatactgtattttctcaatctttttacagtatctcttccatttgtctttactaaaatgcatttcgcacaaaatacttaattatttgataattataatcataatttattgaaataaaatttatttttgctcttttttttatcgcatcacaaaaaactcattacaaatattcatttctgatagtccataagcagcaccgccattgatggaaccaaaagtgattcatccccagaggctattatcgctattagtgatcagttcgcctcccaccccttggctaattgttgttttgaattttgcttggctttcacgggagggggggggggtggacaatttttacgcacgcaccgctcatcccgcccattggggacgtgtgggatgtgtgcggtacccgcccatttgccgcgctgcttctgccgcagggaccgcccatttgggcactgtcggccaccgcatttaagcgctgtccgatcagcgaaaaatcagtcagttcacaaatttcataagctcctaaccaaaaagcactaactaataagctggggaaggaaaaaggaaaagccaaataaaaacattttttgaaaatttaatagcgattaaaaaagatttaaataatttttttggaaactatttaaatttctttttttatttcatttttaattagaacacaaaaaatattttttggtttaatatccaatattttgtatttcattgtaacattttaggaagagatttttcctctatttctgatcccaaatcccactccaaagcaacccgtctcactctcaattttgaacatgaacaagtggcttgcacttgtgtaagttaagggagggaggaggcttgaactctggccaaatattaactctctgtccactttcagtctgttgatcgccctgatcagcgcgcaggccagcgctttttcacttggtaattaaaaatttgattaaaaaagttttttttttttgaatttctccaaggctagtagcttttttaaacagagtttcgagtctataaattcttcgctctcgggtatcacttaacacgaatacaccatcatacacaggtgatgcaagcatcattttgccggacggaaaacttggcgacacgatgtgcaattatcaatggtccaaggccaagggcgagatgcttggaccacttgagaatgcaccttttattggccctgcttttgattttgtagtcagcgttggactaccacaaatcccacacagtgataatccggatgataaagacaaagttgccgggtcaatgtgcaaaatagactatggctgtgattggggaaaatgccatccaagcgctggcaaaacggcaagcacttgctgtgcagatggctttgtgttcatctgctgcaaggatgtaagtggagataaataaggacacgagtggataaaagcacctcaaaaattcttcataatttttgtctttagactgtaagcaatcaaaatattattttcaaaattatttcatgtaaattcataaattaggacgacgacatcacagagaattgtcaaagaatattttcatggattttgaaagtaataaaaattttaatgtgttcattcaaaaatttagcctccggaggtatgtgcaaaaaatggagttggtttggtgggtgaaacttaatataacaatgccaatgttgtcagccggaaccggcacaacttacacaaatggaggagtgcaaaaaagcagccaaagctaagtgtagctgtggatggttcgcttgtgtgcgcaaacgagggaatggtgcaaccccatgctgtgcagaaaacacggaattcacgtgttgtaaaaatgtaaaataaaaaataattaataataataataatatgagagattttcaacataaaagggaaattataaaatccataaattcagaattcttttttgaattttgttaattgtaattttttagatcactattgaatcattggtttggattattttatttaaaatttttctgcgatttttgcaaatatagccgcaaatcgtgcacgacaacgagtgcaatatggcaaacaaaagttgcaaaccatgcggttggggcgagtgcgtcccggcgcaaggccgttcgccaagcccatgttgcgcccagcactacgcttttaaatgttgcgaaaaagtaaagtggatcttgaatctgtacttttcttgtgcccgggccctcataaaatgttatggccctttctccagcaatcaattagatttttcaagagtaattttgcggtgctataaagaaatgccattggagattaaaaggctgagattttgtctatgatttttatcatattcgaaaaagatttcttttaaatctaagagccataggaaatggttaagcaaaattacctaagcagtgtttggccaaaatgttaatcagctgtcaatttgaaatttagtctttcaatttctcatctacttatatatttgtcaattgtgcaaagaaagtttcgtaaaaattatttttttagcctccaccggtacgtcgacagtatgacacatttggcatatatgtactgtaatcacatttaataaaggtgaaaccagcgcaactcatccaaatcgatgactgcgaaaaagccgcgaaaagttgcgactgtggctggtacagctgcatcccgcacccgggccaaccgtcaacgccatgttgtgctgagcactacaatttcacgtgctgcgtgaaggtaaggcgacagtctttggcatttgtatagtgtttcagctgaacaatggtcactcagaaagnacacttaaaattggaattggacaagggcatttgattatagactcagacagttggccacattaatcgctacaatttttcaacacaaaaaatgaatgnaaggagtttagattaattaatccatcagcatttgtggattaattaaacaatattttaaatatccatttaaaatttatttttccattttaaattattaacatttttaaatttatttaattgaatttgtactacggtaacatagataagatgaggaagaccacgtacctatgagagtagtaatttgctataagctttaggttgtgaacctgacgagttttggtgttatttgtttttaaattttaattatttttaggctccaccggtatgtcgacagtttcacagtgtgccaattactgtaatcgcacttttgtcggtttattgaagatcaaacccccacaaattattcaaatggatgagtgcgaaaaggcagcgaaaaattgtagctgtggttggtacaattgcatcccgaaaccaggccaatcgtcaactccatgctgtgctgagcattatcagtttagctgctgtaccgatgtaagacaaaaaatttaaaatagtgagaatccaagaaatgggaaatgaattgattgaaacaaatcatttgggattaaaatgcaatttatctggggatcaagttttttaaaacgggatttggaccatgatgcttggcatatcaagagagaatcatggcaactgttgaaatgcaataccattgagacataccttacccctccatagcttttttcgaatttgcagattttgtgatataaattttgtaaaatgaacattcgaaaatttagttaatcatattaataattattattgctttcatgaaaacggcaatgttttaaaaatttaattaaaatcttctttttagttgccgacta

SEQ ID NO: 14915 - DNA, 1469 bp, Heterodera glycines
aacgcgtacactttgtcaacatttaccgttattttcctctaaaatgctcccccaccccctcatcctaattggaacaccatttttcgattcgtctcactgcattttcctacccaaattgttcaaccatttatccaacaaatttccactccccaatcgctcatttagctcaccattttcccagttcttctgcttgtcgaatgccccgttcagacagtggcgagtcctccttctccaactcggataggtctttcccccatgttttgttaatattgtcctctctttccgcgtgacgaattatccaaagtgtttggcgcacaacgggacgcttatctaaggaaaagtggcacggacttaattaattcgatcgattttttccatttttaccgatcgtccaaaatttgtcagcctcgctctcttcgtttgatgtcaatttcaattcgacattggccaattcggctttgattttgtttaaaatgtccaaatgttctttcatggaaaagtcaatgtcatattctttttcctggtgaaaacccgaaaattgtgaaaacaattaaaattcactcacgggttttttcttgttgttgactttttctataaaataattaaatttctcttccaattgaactttgatgctctccaaatccgctttgttagcttccatttttttttcatattttgtcatgtcaaacactttccgctgcttctccaaaattcgtattacctttgagtttttgaattaacttttttagagattttaataaattatttttcacctttcccattccaaatcttattatgttcaatatagggtaagaaactctaactaataactactgggtcctaagtgttggcttatcaaataagacaattacaccaagatgatcagcagatcactccttcagcagaatgatcttttcataaaaatgtaaataattttaaattcattttctatccttcgctccgcttttatcattaacattgttgaggaggagatcacggaaggaggctaatgtgtgtgtgcaaaatgccttctcttcttctgtcgctcgttgtcctctttcatcaagttgaggcgtggctgaaaattgacaaatgatcccaaatgtctgcttcatccgttccccttataattaattatgcccggacagacagtaaacgattttcgattaattggcgttttcaatggaattgctattcgaatttaaacatagaaagctctaaaaatgaccgggcacggcctccacagacagtcgaccaaaagtgatgacagaccttccattcggaagcgtagccattgccagcccaaatccttgaacttgggcaaataaagcgccaattttgccataaagaccctcacatttggagtcaagaagacctcgaattctggttgtcaacattgccaatttgggtataaatcccgtcccttaataaactaattcgtgtataaaggaactttgcataaatgatga

SEQ ID NO: 14916 - DNA, 1280 bp, Heterodera glycines
  unsure (1)..(1280): unsure at all n locations
gcggcttttatgttgattcgaaaatcgatagaaccccgaatttgggaaaggcaacacaaagaaagtaggaggaaatagtgtaaacgagagaaaaaggcaaatntaacaaagcaaaatgacatcgtttgaatgtaaaatgcgcgggctgtaagcatagtaaaatatcggcataattcccctaaatgggccatggcaataaaattggaaggattccaaggggtaaagcacacgaagggctatggtgagtggggtgggcatatccaaaaagccgaacagcttgtaaatccttgattgagcattttgtgaatcggccaaattctaatgctgctgctcatccccaattgttaaatgcacttttccattttgccataaatggaaacaaaaaaatggacaaaaaatgtgaattgatccttttagtaaatcattgacatttcaatgcttgtaaatataataattttttctaatgcgatagataatatttatatttacatattttagtcgtagagctctgattttatggcgaaaaaacggagtctctaaaaaagttttttgaaaattaattgttatattaaaaagaagattttttaattttttaaaacttattaataagttttctcaatttttaattttaaaaattatcttatgtgtggaataatactaagttcaaatgaattaaaaaacacattaagacgccataaaaacacgagaaaacgagacgagatgagacagaatttctaggattttttcaataaaaacaaataaaaaatttaatattaattaagttttgttttcaactaaaatttagtgaaataaaaattgtttctttaattattagggatgtcaaaatatgtacaaaaagtggtccaaatatgtacataaatatgtaaaaaaaaatcccgaaatatgtacaaaaaaccccaaatatgtaaataaaatttttttaaaaggttattttttggaaaaaaatcttcctaaagtttagacaggcataaaatgacataaatatgacccaaatttgcttagaatcaccttttaacattttaaaaattatttttttttgggtacattttaaaaaaaagttttttaaattttttcacaataaatttctaaaaattttcaaaaattctcaaaatatgtataataaatgaaaaaaatttgcataaattttggatttttttttgaggatttccaaaaatttccgtaaaaaaccctcaaaaaatgtaaaaaaaatgaaaaaatataagaaaaagtccaaaatatgtagcaattatggataaaaa

SEQ ID NO: 14917 - DNA, 1191 bp, Heterodera glycines
  unsure (1)..(1191): unsure at all n locations
cattttatattctctgtagaatatattttgtattcgttataaatttatagctgcatacatttacctgcaaaatataaaaaagcatgaatgcttgatttttgtcgaataaaaaattaatatatacttaacattttatattctatgtagaatatattttgtattcgttataaatttatagctgcatacatttacctgcaaaatataaaaaagcatgaatgcttgatttttgtcgaataaaaaattaatatatacttaacattttatattctctgtagaatatattttgtattcgttgtaaatttatagctgcatacatttacctgcaatcagttgcctgatattgatgctatgtccgacgataacgcggacgaaaacgagtcgattgcatcgtctgacgccgagtcggttgcatctacacaatcgcataacagtcgccttgacaaatcccataaatttgtctcgctgcgagatttttgcaaatattatctcgcgataagggacgaaaatgctgaattgaaataccaccacattttgtcatgtggtgtaggacttgcccagcgctggatcttggaccaggcggccaaaattgattggcaaatagccacttttttgcgtcgtcctgatatggatctgcgcatcagcaccccgaaaaatttgctgcagtacttggtgaaccagtacaataggcagattgcacgccaaaaccccaatgcacaacggaaaaccgttgatgacattggcagcgttgttcgcctttctgaaaataatgttaattctcttcagtattggaaaaaaatgtatgaagattgcaattgcatttttgcgcgttatcacaacccgaaaaaggcacgtctcttcataacattcacgaacaaccgtgagtggccagaattcgaaaatatctacaaaaacggccaggttttcactgaccgttttgacatgtggatgcgtgtgtggagcagcaaaattgctgtctttcaccaggaactctatgaaaagagttttttcgggacaattcttggctcaggagagtccatggagtttcaaggacgtggaggtccacacgcacacattgtcgctcagactgacctggacgctgttcccgaagtgatccaagaatatatcntgggtcacattccatcattgccccgagatggcgatgattcccccattgcacatatgcatcgcgaa

SEQ ID NO: 14918 - DNA, 2339 bp, Heterodera glycines
tgtttggccaaattgtcaagcttttgcgcaaaccctcatacaactacagagtgcttgctacggcatccaccggctgtgcagctattttgctgccatatgggaaaacggcccattccaccttccgtctgggcagagacgtgtctctcgaaaaacttccaagcattccgctggagagtttcttcgccagacggattcgtgaagcacaactgatcattattgatgagattacgatgctaaacaacacggtgattgaggtcatcaaccgagtgtgcaaagagatggcaatctatcagcacaaagacctcctcttcgggggtaaaacggtcatattcagtggcgactttaaacagtcgctgccggttgtgcctcatgagggtttaactgcgcaagttacttcttgcttccaaacgtccccgttgtttggtcagttcacaaatatgatattgacaatcaaccagagattgggacaaggacaacaagattatttggaaatgtgccgccaaatcggcctcggaaaaaccggagaattcttctggattcctccgcaattcctcgtcaagagcagggaagagctaatagactttgtctatccaaacttccaacaacttctcggtaatgacaaggagctgctcaaccgattgatcctcgcgccgcacatcgacacgtgcgacgagataaacgctattatgatggcgaatgtgccaggtcaagaacgcgaatatttgtctacggacaaacctcttgacgagcgccctctggatatcgatgaaatcgagtctgaagtggctgcgctgaacagacgcaccgactcgggaatgcccccgcacagtctccaacttaaagttggaagcgtagttgttctccttatcaacaaaagtgatagggaaggactgataaatggcactcgcatcgttattgaagagcttggtgacgatcgcttggtcggtcgcgtgatcaacagcaacgctgttggaagccaagtaaggttattccttgaacgaacccgtaatgtttacgaggacaaaacgccaggcggcgtgaaatacgagcgtttgcagtttccaataaagcctgcattcgccatgaccattctaaaaggtcaagcaaacaatcagcacggttggaatagatcttgaaagggatgtattttcccacggtcaattatataccgctttttcacgggccacggacggcaataatgtccgggtatatgcgcccaggcgggaaacagacaaccaaggctgagccaaagtgctgaacattgttgcaacaaatatgcttaagttgcaataaggcaattatgttaggtccagtgtgtgcggtactttgtgataccgctccattctcatttgcacttaaatataaattcttatgtataagtgccgccacctggactaagggagggaagagggatgacgtgcgagttagggcacttccggtttccattgcactgaaaaatgcaatgtgtcagctcatcacatgagtgaaaccaagtgcatgtcggttgacactaagaccctaacaccggcctaggtaacgaagctcgaaaagcgcgcagcgctttaaagcaccatccccatgtaagcacgccccgctagtttcatttttatatcgaaaaccgaatgagtcataattttcaagtaattgattgaattttaagctaattttaatttaaaaaattatattaagttctgaaaaattgactggaacacataaaatcgcaaaatatgcgcataaaatatgcaccaaaaatggcaaaatatgcacataaaaagtgaaaaatatgcacataaatttttccaaattgagggcaaatttcttcaagtttgttaaatttaagcataaaaatcccgaaaatatctaaaaatagtataaatgattattttagaaccaaaaaagtaatatttatttattttgaagaaaattaagcaaaaaatggagaattttctattttctgactatttttggcataaagtttcaattttttttaaagttacttttttatcagaaaatatacccaaaaatctgatatttttgaaaaattttcggtcattagagcccaaatggccgctttaatagagggggccgttttaatagaggatttattgaaaaaatgccgaaatatgcacataaaatatgaatgaaatgccgaaatatgcacaaatatgcaaatatgcacataaatcgcgaaatatgcacaaatatgcaaaatatgcatatggaaatccatcctagaagcttcaaaccaggctaaaaacatgttttttttcatgcgtttcaggcctcccacagtccaggaaaaaaatatgcatgtgcatatgattctactccctactgat

SEQ ID NO: 14919 - DNA, 3904 bp, Heterodera glycines
tcagcgggagctacaataacaaaatgaacacagtatatcctttttcgaatacagtacacaatattgttgtatttgcgcgacacacacctggagtaattaattaattaaatgttaattgaggaacaaaaataattgatgaatataatgactattaaatgaccaatcaattaatccaatcaataaaatcacacctttaattacacaatacacacagaagagatgatgcacataaatcattaattaattacttataatttatataattagtcaaattaaccaataattttctaccagtgttggatgaggcggaagagaaacaaaataatgataaaagaaattaatcaatcgataaaacaatcaataaatgataaaaaaaaatggtgttcggttgattttttgcaggtagagttgtgtgtttaaaattaaaaataataaataaataaataaggtattttgttttaaatctaaaaatggaggaataaaaaacacacacagcacagagagatagaagagagaggtcaccgaatatgttgttgttgtgtcggaaggaagaagaaaaaaaaatgggtttttcaaaatatatatttgtttgtacattatgggtttgtgcggtggcaaaatttgaaatttccgagttttttaaacctcgcttggtgccatgaaattttaataatttccgacctttggcagaattttcaggcttttttaaatatatcaatcacctcaaaacgtttaaaatgccataacccatctgtttacagtgcttgtgccccataaattttggaccaggccagaagttgcaacaaatttttttctaacgcttaggggtataaaaatttttggaaaatttctcagttttcaatgaaattgcgcacacgccagccaaacccataagaaaaaggggagaacggaaaaaaatatttggacacaaaaatgaaatggatgcaaaaatttggccaaaagaagaaggagaaacggacgaacaaaaaatgaaccctcgccccataataaagaacccgaagacaaatccactcaaaattcaaacaaaaacaaaaaaaaacagaaattcgttgcggtataaataaaaatttgcgtcatttctcgtctcaagactgaactggctgtggcaccattattattttaatttccccgtgtcggccccacaggggccgtcgcctccgccgcgctgctctgcagttgaagttacagcgtttgttgttgatccatttcctcatcctcatgctgctcctgcttgagcgagaccactgttgccgtcgccggcggcatggctttttgatctttttcgctgcttcttggcccttttactgtgccaatggcgccgtcctccgccgccacttccctttgatctgcgtcgccgccgtctttgccctcctccaacttcatttgttgttgattctgctgctgcttttcctccttttccttcttctcgtccgccgcggtcggaaatatttcggcggccagcttaatgtgcttaagcattttctcgtcctcggtgggcacccgggcgcggaacagctccttcgccttctcggtgacctgtagaagagataattttgaaaaaaaattttattttaaagatcgaaaatttgatttttctaaaaatttatggacaaaatttttgaatttttataatgtttttgaagcgaaaaatttgtcgcgaaaatttcggctttgtaattgaattttataaaagtctctgaagcttgggttgttctaattttcaagaaaatgcttgaaaatcagcaattttccacgtcatatttctaaatgcagtttgatttgagaaaatttcattctatttcatagttcggttttttttgagagatttcttttaaaaaaatattttagaaaacttaaaattgtgccaccctgtttttcccccctctcaaactcacaatgttcagcataacaaatgcttttgggacagtttcgtagatttggcgtgcctcctccggcccgtagatggactccaaatacctgtataagtattattacaaaaaattctaagacatccactctaacaccctctctttgtgtctaacgtcttccctacacactctctcgttcatccggcatttttgtttttctctctgctcacacattatgcacacagttatcgatctctctcccaccttttgagcagttccgtgtaggtggcgtgatgtttgaccgcagccgatttgtcctccgcgctcagatcagtgttaatgtgatggttgaacatcatgatcaggatcaccaaattgttggccatcttaaggcaagaaaaagtgatcaggaaacagggatgtgatcagagagtcagcagcactaccatcatatgctaaatacccattctgatcagaaaaatttttggcgaaaaaattgtattttcatcaacagggcaaagttttaaaaattaggtagtccaaaaaaaattatcgccaaagagcaaaaaaaaaaagtctccgggttcccgatctgcgatttttttttctctggttacggaactgctgccctgaatagtatgatcaaagccgaacgtataaaaaaaattcgtctgatcaaaaaaaaagacaaagtcgcgttcaacatcgtaattcttttggcactgcttgttgattttttgatggatttaatgcagatttgcaaaaaaaaattttgaggtacgaaacccaggcaagagcctgtgggttctttttcattgctaccaaccatttttaagatccaaaacacgccattcaatttgcgaaacatttttttccgaaaatcccttaagagaaaattcaagtttttttttttgaaatttttattttgccaaaatagtgtgctctaaatagtctgattactgctgatcaagatcatcgattgctgactgacctggtccttcatcagtgtttgatgcaactgtttgtagaagccggtcacgcgccgggtttgcatgctgccgttcagcatctggtcaagaatgttgaagttgagccgaatttcgcagttgctgatcaacggtcgtttccaacattcgttttccacgtcaacgctcacggcgctgaaaaatgggcaaaaatctaataaaattttaaaagctttatgtgtaagaaactaatgacacccaaacgaattatagggcgcgccaaaattgattggcgcccaaatggttggcgccccgaacggaacggcgaccaaactgattggcgctccaattggatggcgcccaaactaattggcgcccaaatgatttagaacgctccaaaataaaatggcgtccaaataagtttgggtgcgccgaaacggttggcgccccaaatttgacagcgtccaaactgatcggtgccaacctaactgtggcgccccaaattttacggcgcccaaactggttggcgcgaaaatgagttaaggcgcgccaagtaattggcgtcccaaacgggacggcgtccaagccctaaggacaaaagtattggcgcccaaaattggtaggcgcgcaaaagaactcggcgaccaaaatccttggcgcgtccagacggatcggcgcccaaaaatgggcgccaaactaaaataataatgacccgcgtcactcaccctctgacggtgagcatgtcaatgatagcgtctttcattagtgcaaaacggccgctctggcttagttcattgaaggcgggcaacttcttgaccaccttgaccatacggcgcagcattgtttctggaagttgcgtcaatgatttttcgtaaccaatcgattgtcaagcaattaatcccatcaataatcgatcaatcaataaagtaatcattgaaatgtcaatcaatagacgcggtcaatggcaattcgtacaaaggcacacagtggcaactcgtacaaagagcactcgtattttacaaaataaagccaaagcttatgccctcgtaa

SEQ ID NO: 14920 - DNA, 636 bp, Heterodera glycines
gtctcttctctcctccatcccatcatgcgagcgaatggagaatgcggcgtttatgttgtggaatatgcaagagcaattttggatgtaaatatttttaaatgtgaaaaaaattttatggttctcattttaaggcactatctcggaattggaacgctgaatttgattttagtcatataaactctgataacattagctcaataagacggcattggatgaaaatcattcgggaacgaactgcacttgagaaatgatacaatagacacgaacattcatgttaaattattttcgatacatacctatgtaatttggtactagttaagtttgtatcccccttttgggtcaaatttttttcaaatttttttttcttttttattgtcgcaattgctttttagattaatggaaaagcttaaaaatttcactcttgccgaacgagatttgtcagtcacagatcacttttttccacatacatttctgattttttgtggcgaaagcagtttggaggaccggacattttttataatttgtggacccaaatcgcggaattgtacccaataagcacataaatctccgttgatatgtcatttaaatcagttgcgacgacaaaaacgaaaaaaaaaatattgcaacaatgtgacc

SEQ ID NO: 14921 - DNA, 1846 bp, Heterodera glycines
  unsure (1)..(1846): unsure at all n locations
actttgcgctttcgaatgatacccaaaagataggatttgttcgaacatgaacaaagttattgtgtaaaaacccgggattgtcaatcgattggactcataaaagtcaaattggactcataaaagtcgattggactcatataagtcgaatggactcataaagtgcattagagccaaaatatttcccagcctaatgggtttgaaccataaccacaaaaacacaaatttaaccaacgggaccacttttcgctttaacattggaaactgactggcaatggggagggggcagagaagtggcgatagagtgtaggaaaaaaggagaacagattgttagaggaccgacgacagagatcgtttgcctccctccgttaatgggtcggtccaatgccaaattattttaaaaccgatttttttttccataattccgtcttccccgccttagggcacaccggacggatgaacgagcagagcagtcgttcccatgccattttcacggtgaccgtcgaatgtgcggagacagtaaaagccgctgacggacgccaactgctcacttagggaaaattgcacttggcggttggtgattggaatttacaattattgctgtaacttttatggaaattccaaaaatttcagcgacattttcaaattggtttcattcccttagggtagtgaacgccaatccaaaataaatgccactggcgaccgactaaaggaggcgtcgaagatcaatttgtccctctcgacgcttggcaatgtgatcagtgcgttggcggacgcgaaagtccgcacattccgtaccggtgtgtggtggtgaagaacggaaacttttttattccttttatagtgaatgggatttgggtggaaaggttctaaaaccctaccatatttttaataaattttgagtttattttcaaaacaggccttgggcaaatgaaaatttcatgctcaaactaacacttaatgtcggcacatttttattacttctaatcgctcggtgcctttgtgtagaaattcatagaaaaaaattttttctaataatttatgtggaatttaccccgtttttcccgagcttatcccaacccatttagaaggtaaaatttacacacccaattaaaggaaatctgttttttgaattcaaaaaagcttaaaatttttgttaaaaaaatctaaataaaaattctctcatataacatgcaagtgtttccgactaattagaaaggaaaaattagagactcattaagggactgatttgtgcatttaaatcaaaaaatccggcattatttgtaataaattctcaaattttcaaaagaatttcaatgaatttatccagtctttcacccggttaatttcgctgcatntaaaccaagtgattccgattgtgggttgagtcccagtgattgaaatgctggtggattgagtcccgttgattggaatgttggtgggttgagtcccagtgattgaaatgcaggagaattgagtctcggtggttgcgataccgaagaatcaggtgaggttaggtcccagcgattggaatgatggtgagttgagtcccggtgattggaatgccggagaattgagtcccagtgactggaatgtcggagagctgagtcccggtgattggaatgcaggtgtgttgagtcccggtgattgaaatgctggagggttgagtcccagtgattgaaatgcaggagaattgagtctcggtggttgcgataccgaagaatcaggtgaggttaggtcccagcgattggaatgatggtgagttgagtcccggtgattggaatgctggtggattgagtcccgttgattggaatgttggtgggttgagtcccagtgattgaaatgcagg

SEQ ID NO: 14922 - DNA, 3838 bp, Heterodera glycines
  unsure (1)..(3838): unsure at all n locations
ttattatatatacctatgtatatatatatatatatatatattttttttttttcttcattttatcatataaaataattttattgggtcagaattttaagcattttttacggcaaatctctgatcattttttcattttgcttttccctataattttatgaagttaaacaattagaggaataaatgaaatatcaaaaaatagaacttataaattagcaactgttcatctatttaattaaggggttaagtgaagaagggaagaaagaagtgattaatggccgaaaaaaggaaagaaaagaatgcattgagaggggataaacggggaaaaaagagcgaatgggagtggaaaagaaagaaatgaaaaacggatggacgacggaatgaacggaggaggggggggggggagaaaagtgaaggggaggagggaaagggagggggaaaggaaaagtgagagggaaaagtgagagagaaaagtgaggggaaagggggagagggaaaggcagagagaaaagggagagaagggggggggagggagcactcggctcattgctggtgagttgggcagctaacatttgcaattattttcccattttaatttaatttttcaacaaaaggtaaaagtgccaatgcctcgtcttctctcttccttcgcctttttcgttttgtcaattatttgttcgattgtcttcttcgaacccatccatggccaggacgtgtgtcgacatcagggcaaagagtaccgaaatggggacgaatgggtgggtcgaattaaaaaataaaccaattaatacataattaattaccaaaaccaaattaataggtattaattgacagattgtttccaactctttcattatgaattgcatcgtccattacaaccgatgggaaacaaaggttatttggccatgagacggcaatatttttcaaaatgccatattagctaaatgtttaaaaggtgtgaatacgggggaaggggtgacaagattcatgaagaaagggcgaatttgacttggagctcagtggaagagctgcccatggactttgtggagcgtgggatcggttcccacccgatgcctaacattttctcttcctattaagtcaaatatcactcattagcaatgtccaacaattgctctttctgccagatcatcgcctgtctgtcaatgttaggcgagagaatccccgtaaacggacagatcagtgatcagcacggagtgtggaaatgcgagcagaagccgaacggaagcacacgattggtgcagcagaagcagtgaagggaggaaaagtgatcagtgatgggagagacgaagcaaagcattgattggcagaggaaaagccatcacagcaaatcaaagactgttccacacactttttaataccctgttaattactcactaattaatgtccattttgaccctggaaaaattagtaaatgcattggttgcttcagtaacttggttaattatttttttagcaatttaattaactataaaatttttggattaatttaatactaataattacttaataattgggttgcgtgataaacttgatatcagataatttattctccgttctcaggagtgagacatgacaatctgaatttaataattaattccgttttgtctcaatttgattcaaactacaaattcactaattagctgaaccgattagaggatcaactttttgggaagagaaacggacggagaaagggaggcgaaaatcgaaattatttattgacagtccgtcgatggattcgttgggtgggcggcttcttcttttttttctttgtttttctatttgggcttttcttttttttcgtttgcccttttggccttccaatcggctcttcttttgatcagtgtgaccaaatcaaaagcaaataaatggaaggaaacagtggaaccgaatcggcgccagggctaatttattgcgcgacacatttgggatgacgcgacttagggtggtggtggatcgcccattaactaataattggcgaggcctataaataaaaggacaattccattccgccgtgttcattatccattaaaaacattcaattaattcttttttgccatttctttagtacatattaattcgattcgttcctaacttattttaaattccgtttgattccgtttttaattcccttccctccggcagttctttctgttgcaatttgtccaaaatgagccctcttccgctgctgctgcttctcatttccccgcttttcttctgtccttccgttttttctgatgacattctccgctttgaccccgcggcaccgccggccaaaatgccctcaaaatcgtcactaattaacttgtctaaaaaggaccaagttacacttgacgaaatactcattagtctcagacaaaaatcgccaattgagcaaacgcacgacatgaaagcattcgcacaactgtcgaaggcggacttatgaaagtgagcggtgatgggaaaaaggctaaacgaaacgcaaggcaattaatttcagttgaaaatcgacgccattttggaggagtatgccaaggcggtggagaagttcaagttggaaatggcacccaaattggaggccatgagtttgaaggaggcgcggtcgtgcggtgatcatgtggtgctgatcatcaccgacccgaaactgagcccagcggagaaagtggcgagagtgaacgacgcggtgagaaaaaggaccaattaaaaaggcaatccaaactgaaaattaattgatattccattaaaaggttggccgactgtcggaggacgcccaaaaggagctgaaagcgatcaatttggcagacgcagggcaaatcgtccaaaaggggggcccttttctgaacggacctgccttttggccatgaaagaacgaacgaacgaatggaagaaaagtgccgacaaattgtcacatcacaccccacccatttaagtgttttcatttcctaattagttccataaatgttaaagattttttatgttcaaaaataaataataaaataataattaacgaatatttaaagatttttgcaatcatttattgcaatctttcctcaattcgtttcatttcgtttggcatttgctccgttctcctaaaaactaaaattaaatatgcaaattagttcaaaatctttaaatcaattaaacatttaattatgaattgaaatcactcgtcggcttttcttcgctattggcttccatgcatcgaaaaatgcgccgaaatttgtcaacaaattgggcaattggcgcccgttgcttcggttttcggggtaaaactaaaaacaataaaagctgaccagaagtgaacaaaatgccaaaggtgtgcggcacctgcaaaaaaagcagaaatttttaaaatattattattattatttggtatatttttaaaaatttttcccaccatcaaactcaaatcgttgatcagaatgccaaaaaggcaccattcaatggcgatgagaaaattggccgcacaaaggggcaaagggagcatcgaagtgttccgatcccgaagcagcgatttctggggggaatttaattgcgaatgaacgattgaaggaaggaccagcattgaaagcggggcggcataagaggcgacatttaggcaagcacaaacaatgccaaggggactggtgcgcaaaaagggagtgaccagggaacagccgataaactggagcaagacgaacagaaagacgatcagaaggaagacgcagagaatttggaaactgatcagacactaaaggaaagggaagactgatcagacactnaaggaaagggaagactgatcagacactaaaggaaagagacaaataagaaccgataagaggactgatcacaaattgattgacta

SEQ ID NO: 14923 - DNA, 2814 bp, Heterodera glycines
  unsure (1)..(2814): unsure at all n locations
cagcagttccatcgccgcgacaacacctcgcgatcgcagtggttccgctacatgcttcacatcagaggcccgcacgccaactggcgagatggacactggctgtgggactggcgcactctggcncagctctacaccatcacgtttaacaaccgaatggaggcccaaaaagtccagtacatgaagcagctgcagggaagacgacgtcttgtccttccaggctcaatcattaactggataagcgctctcagggacaacaaaggtagggcaaacatttcgagtttaataatcaaatagctgctatttagggtacaagggcgacattggccgagtctacatgaccgacgagcacttccgcgggtcccggcagtactaccagcgcgagtacgccaactgcatgaccatctgcagagaagttggaaagccggaccttttgatcactctgacgatggatcccgaatgtgatgaactggaagagatgctgccaactgacccagatggccaccgccagcagtggtacgaccgtccggatgtgatttgtcgtctctttgtcgacaaattcaaagagctgcgtcatgaccttaccgtcaaggaggtcatggggcccgtccgtggctggttctactcattggagcatcagaaacggtaaactgagtcctttggttttgaatatttatgagtcatttttagtggcctcccgcatgtccatttcgcactgattttggactgggacagaatccgaagtggcggcaccatcaacacgccagaagactatatcgagcagtacatctctgcagaaatcccggacaacccctcgggccgctcatccgaagtgttgctcaagcgagagctttacaaaacactgaggatgaagcacatccacacgtgctcagctcgaagatgtttggttgacggaaagtgcctcaaacgttttccggttagtcaatattttacttcacttttatggttgtcaagcatatcaatttagaagccattctcgtacgacaatgtctacaacgaacacgcttacccgcggttacaagaaccttgtccaaaattgtgcaaggactggcgaggttcgctgtcgcaaagaagactgcaagccatcgaatgcgctgccggatggacttcttcattctgaacgcatcatcgatggtcttcatccagaggtcttcgtcagtgaggagaccacgtgctcccgcagcttcaacaaaggtagggaacacgttgccgttgacggtgcgcaatgactcccatccctttgggtcaagcacaaccaacagaagcagtcgaattgcctgtaatagaaaaaatgatcaaattggtaatgtgcttggcgttctaccccccccccccgaaaactgggctttttggaaaaaaaatatttttttgaaacctccccggcataattttttttttatttaaataacgcgtaagggaacataaaataatgccaccaattccatttaaaaaaaacccgaaaattcccccctaagaattggctttttgagttggccccccccccccccccgaaacgaaggtcctggctacgcccttgtttcacaagccatttttgatgttaagctttttttgccttaatgcgaggaaaaagtgaattgaaaatgcacgaagaagtcgccgatcaatggaggaaagaactttcgaacatcggatttgacgaatctaagcagaaaattactgcggaggacttccaactgtaacccttaaagattttgatttcaaactctatttttcaaaagcccactgatcaaaaattggtgggggagtggatagtaaccgtcaaatgttctattaatagcggttttagcaatgcttatataggaaaggttcaaaatgcctttgtcttgtgaaactcttattcatatggtctgtttttaggttcgtctgttctgctctgaaccctgtttgctcaattgtcggaagtgtcgttgcgcaagaggcaatcaaggtaaagaggataattcgttttgtctcatcaattccgtcattttcagtctttgtcgcagaacgacgaaccgttgaaaaatgcgttcttttattcagcacttgaaagttgcggaacagttgttgacatggccgtgtgatgtccgtgaaaattttgtttaaaaaattgtttttgtttgctttactaccaccagcaaggaataaaaattggtacaaatttgctatctttcaattttttaaataaatttctaactaagtattttttgtaatttttcacgttatcaaactatttttttttaaggctctgacgaggatttttaaatgttgctattaaatcgtataggtattatttttttgtgaagagattgtaaacaaaacaagcatgaggcatgataaactgtatcaatcaatgttacatgtgtaaagcggaataaaaacaatcttaacccattgccaaggtttaaattggcagccaattgcgaagaattaatccatgatgatcacaaatctttgccgagaaaggacagttaagaagtccaagaagttcatagttaagaggaaagaagaagaaaaggacgagcagaaaggccaaaagaaatgtcataattgtggaagcgacggtaatgaccagcaaacgtttgtcccctcctttggaacagaaagaaaagtacggtattacaactgaaaaggaaccgataagagaactcaaaatgggttgaaggtttgtaaaaaacgataacctaaagccatcagtgagccaaaaataaatccgaataattgagcccaattatctaaaagcaaacatatttccataataatattataaatgaactaaaaaatttaccaatgtat

SEQ ID NO: 14924 - DNA, 3537 bp, Heterodera glycines
  unsure (1)..(3537): unsure at all n locations
ttgggaatttgttgattttgttttttctttaataaaaatttgttgacaatgttacatgaaaaggttgttccacaatatacgtcttcatcttcaaaaaacaggatcaaataattgcaaattgagaaaattacatttccattccctcggacaattcatcgatgtccatgtcggacccttccgatttgtcacctccttcctgctcctcctcttccaattcgtcaccatcttcctcatcatcactgaattttgtaaaaaaaaattaattacggggagttcgttaaaacttaattttttcaggatggaccaaatgacaccatcttacacataccacacaaaaatttttgtaaaaatatcggcgagaaataattaaatatactataagttacggtatttcaaattggcggcaccgaaatggtccggccgacgtgactccgaaccggggtgagagagaggtagaccccacccctcccccacgccccgaagacaaagttctgacaagccattgatttcattagcacctaaccccaaatatctatccccccccccccaatttcacggctatcaatgatagcaaggaagcaaacaagttgatttttttaacttttggtccatccatcaccaattgttccttcctcttatataaattaatgtgacttgatcacctttcatcgtccatcacatcgcttaaaatacaggaaaataaattccattggtggtcgaagtgccaattctttgcctccgcttcgtagtgtgcccatttttgttcattgcgtttgattggggaacggacaattagaattcgcgcacccttcacatgaagttccatcgaaaacgacagtcgttctccggtcgcatggttgtcgaaacgatatggagacacttcttcattggacgcgaaatgataaatggagattatgaagtttgagcaaacatctgattccaaaaatgcctaaaaattaaaaaaaaaatttaaaaaagaattaaaatccaaatttttgattaaaaattaaaaaccaaatccgaataatagtttttgcagaaattacgaattgtttaggaaatttggtgtccaaatttctcccctacagttgcaccaccataatcaccacacctcgaccaatcgcataattttcgtgtatatttttgccacttcaacttgtttggcgtcgtatttgagcaccttcgggcactctctatcgcttgataaaagccattgggccagaacgatgccatccgccgacgcacttgtggaaccgtcggccgaaaaatcaggaaaagcggcgccaatcgacacgacataatttgatggacagcgattgacgagaaaagtaggcaaaaaatgacaaattcgcttcaatccatccggcaaaatgagggcataaatatggtcacggattgatggccaaattttttgggcaaaatcgcgaagcactttcttttttattgcttcaatgtacagattgatgggcgacgtggaaaagaggaggcgaaagtgttgaagaagtgtcaacacgttgtcactgaggctgctaaattaggcaagaaagaaagtcggataaattttaaggtattttatcacttactcaacatccacgcttttcacgcggaccaaattgtccggaattggaggagttggaggaattgacaatgggacaagcaaatccacaattcgaacaatgtttggcatttcttgacaaattgaaatctccgccaaaaaccagttttgttcttccatgaactggcgcaaaagttttcgaagaattgtttgagcgatttgttcaaatttggacggcatgttaatacacttgaagatgtcattcaataaactgtccgggagctggtggcttaaacatttagaaaagttaaaaaattaaaaatatatatttatttaccctgctggatttgccatgagagattaagcgaagacgaagacaaacaatagccaaatatgccggaaaaaaggaacctttgtttagactaaaaacaatggcatacgtattaaaaaaaagagaatggaaaatgaatatttggcatttactgaaattgcattgctgctggaaacctaatgagtgtgttcaaaagtgggggcgtcggcctactcaaatcattaattttatgtttccccatcagttcctcagttgagattatcttttgagtactttgcgggtgcattttttggggagcgggaataatttaaattaaaatttataaataaaatatattttaaattaaaattttaattcaattaaaataattttgcaggaaggtcgagccccggactattatcgtagaaacaccgtttttgacttgaagctgttgaaggagcgcgacgtggaagagggtcagccagtgctaattgcattttactctcttcgacactctcgacttgaacccggcccgggatttgctggatcccattggatttgggggataatcccgcgggattacgtccaagaaaaatgttgaatccaaatcccgcagcgggttatgcgtaaattttaaatttccggcttcttttttctactctcggctcgggaaataaaaccaaacgccacagatttggaattcaaactagaaaaatcgggaattgggacccaaaaagaaaattttaatttaaaaaatgtaaaattcaaaaaaaaaaaaattttttacagcaccgcttgaggatggcctaattccgccgggtggtcacgtgccgccggacgagcaaggctgggagagtccggtcgactcattttctccgcaaaggtcgcgacaaaatttttgttgaatttaggcgtactgtatgtttaccgtaccttcaatagtttgagctacttgaatatcttaaactatcaatagctttaagttcttatggcttttgaattaaagctgtttattgaaatattaattaaactgtgtgcctattccgtgagggggattactgtatcggtaccaaaagtatttggtttaaatattcctatggtattccgtttcttccttcctcaattacaattattgtttgattagccccataaaaaaataattttattaattaccgtaatacagcaagtcatggattgaatattatggattactgtctcaaaactcttgaattgtatacctttttacatatttttcttggcacagttccggcgtggacacaggacgacgggacggcgacgatgaagaggaggacatggagaaacggcgctttgaacggctgttacatgaaaaattggacatgccaacgtaaatttttaaaaatatatacgaaggcttttggaatgacatctttttttgcctagcccgaaatttatttcaagaaaaagctatcagaaaacccaaaagaaaaaaaaaatcaattttaatgtttatagaataacgggaccttgatatactgagtgatttaactcattaattttaattgcacgaattaattaattaaagaagtgacaatggcctctatttggctcggacggtcgctcccgtgctaaacaaagcattggnctgaggtgttgttttaaaaataaaattaaataagttttaaatccaaaa

SEQ ID NO: 14925 - DNA, 1245 bp, Heterodera glycines
ttgctaaaacataaaaactaaatatattaattaccgtttgcgaattgataattgaccttcacgttagcaattttcttttgaaaagtaaaatctgaaagtaaaagaattaaaaaaagtaaaattgtttttaaaaacaagtcgtttttcataaataccagaaaaaaattaaaaaataaattttcatagagaagcattttaaaaggaaatttttatataataatagagtattttaagaaaataataaatacgtatttccaatacggaaatgatacacaaaatatcacctgagctgttgtacgaaatcaagataaatttcggaagaaaagttcattattaaataccaacaaaaaataaataaagaaacagctttttattaataaaaaaattgcaattcattttataatttttttaaatatttataatgatcgaaatcggcactcttgcaggaattatagaatctttattatagtttttttttaaatttagcgttagattaataatttttaaattaaaaaatgtcttagctaaatgtttaaaattttggatttaatttattatactaaaatcccataagttgaacagaaaaatttttacgttgcaattgtgtgaaaagtagagaccggacgggatcgggatcccgcgggatttcttcgggatcccgcgggattaaattcgggatcccgacctcgggatccgtcccgagcgattttttaaattcatcgggattgatcgggatcgggatttcatcgggatcccgaaccgggatccctcccgaccattttaccaatcccgcgggatcccgcgggattgaagtcacgataatttttcaaaaaatctccattttttaaattaagatcttgaattttaaattaaaaaatattgtcatctgctaatttttcttaaaaaatctcttaaaaatcccaaaaaattttacaggtctccaaaataccactaaaattttcaaaatttgacgcaaaagttggccattttgtgacttttatttcttcataaaaataattattattttttaatttttaaaacattattgtaaatgttattaggtagttttatggcgcaacgctttctaagaattttgtccaataatcagaataaaaattgttgtatacgcatttttccttcggtgccaatcggacatcaccagacccaagaacccattattttttataaattagttcaaaatatggacagttttttgtataaattctgttaacaaattacatttca

SEQ ID NO: 14926 - DNA, 1629 bp, Heterodera glycines
attaatggcgattgcgcaccgccctccctctcaccctcttgcgcttttgtaacgtataaaatttctcaaaataaggagatagtcatttttcttggatataagataaatttaaaaattctctgtgaaattaaatggcgattgcgcaccgcacttcctatcatgctcgagagcatttgtaacgtataaaatttctcaaaataagagatagtcatttttcttggatataagataaatttaaaaattctctgagaaattaaatggcgattgcgcaccgccctccctctcacgctcgagcgcttttgtaacgtataaaatttctcaaaataagagatagtcatttttcttggatataagataaatttaaaaattctctgtgaaattaaatggcgattgcgcaccgcacttcctatcatgctcgagagcatttgtaacgtataaaatttctcaaaataagagatagtcatttttcttggatataagataaatttaaaaattctctgtgaaattaaatggcgattgcgcaccgcacttcctatcatgctcgagagcatttgtaacgtataaaatttctcaaaataagagatagtcatttttcttggatataagataaatttaaaaattctctgagaaattaaatggcgattgcgcaccgccctccctctcacgctcgagcgcttttgtaacgtataaaatttctcaaaataagagatagtagtagtatatggcgtcaaaagcgcacggttgcgcacgggtgtttaccgcacaaacccgtgcctatgggaggggcgcagccctttgatgttgccgcccggggacattttcccgcacaatcccaagcctataggaggggtgcgtgccaaccgaaccctatgtgaggggttgtttctttgaagtctgccgccttgtagattttatttcctcaaatccgcactggcgatttttttttcactccccctctccgcgccgcgcagcgccgcggaaggtcatcaatcatccacctgtcaccaaagtgacaggtgaaggaaattcaatttttcttttgcaaatttaaatctttttgatcccaaaccttttgggcggttttaatttctcaaatcctgagtttttttatgacggtttctctaatcctgaaattaaaaattcattttttgaaaatgtgtcaaaacagtgcgggttttttttttgcatttcctccccgctcgccccgcgccgcgatgccgccgccgcgaaaaaaaaaatcgataacggaatttggaagaagtgtgaattaattgatattagcagcaaataatatcaattataaattgcacaataaaattgattatttaaaaataaaaatcgaaaatgaataaataaattaaaaaactttttcaaaagtaggtcacctttcaaccaaaattgattgatgggtttttatttctcttccattatttcgaaatctgcacgtgactttttgttccattatttcgcaatctgcacgtgactttttgttcaaattatttcgcaatatctcccctaaattaggtcaactgtcaataaaatgtgattgattggtttcttatttaaatgtctccattatttttagttttctgttccaactatttcgcaatatggcccgtaatttgcaaa

SEQ ID NO: 14927 - DNA, 2123 bp, Heterodera glycines
tccgttgagaagccaacctatggcaaaattaattatttaattaggcaattaattaattaactttcattggtaatttatgaattttgaaaaatctttgttgccgctctcaaaactctcgataattatcccaatgtcctaattgtaagctctttgcctcaacgctgtgccatctccgttcctccttgcgtcttctgaactgtgcctttctctgctccgccggtgttacttttggcggcactgtttccaatggtggcacaattacggtattgctgctgttcccggctacggttgctttgctggttgcggcccgctccaccttttcgccctgccgtttttttgagtccacaacgggaaattcgcgctgagacatttttcgggtcggcgtttcggtcaatgctttgttacacatttgctgaaagattgaataaattgatcaaattcatccagtctcccccccccccaattattttcaatcctcaggcatttttattgacattaattcattagcagtgattaatgtattaattactaattgattgattgatcgctctttgaccttcgattgttgctggatcagcttcgacgtttgcttctgcacttcgtccggctgtgctgcgatgatcgactccaacagctctttgacctcgggccgctcgtcatagaacgggtgggcctttatgcgagcgatcagattgatgctcaccggaccacgctccatttgctcaagcacctgaacgatggctaatctccgaccgttctgatcgggtttagcatgagaattgatccgctgctaatatttttgaaaaaacccaatcccaatttcccgattttcacacatttttagtccgcttatgctctattactaatgtcatggatgaaatgctaatatctcttccaacaatcggttgcctcgcactcgcctggttcatcaacgcgttcagcgagtccgtctccagtcgccagtatcgctgcgggtccatcgctgggccaataatcgtagttgccggggtcggagctgctgttgctgcgctcgtcggcaccgtcgtcgatcccgcggcaacagcagcagccattgtcaccgtttgtggttttggcactgcgcttttttgttccttttgtgccgttggtgttgtgtctattttgacgctaaatgtacaattgaaattgctttttctccatgcttttcctcttccgcccccgaccttttctctgctggtctctgctgttccttctctcttttctccgttgtctcttgccttttcagcgatgtcttccgtttggccggcttctccttttgctgctgcttttcattattttccttctccgctttgtttgcttcttctttttctgcgccttccttttgcttttcctccgcctttttgtcctttgcatttaaatttaaattattttttttattatttccaattttattttcgggcttttccctacttctgttggcattgggctcgtccttttgccgccgctttgcagtcggttttcgagctgtttcagccgttccaatgggtcatggaatgcgtttttctccgtctccgcctccgtcagtttagctggcttaaacattttaattacctaattaaaaatggctttttctaatattttccagcattcaatgattttgcctcctttgcgggtgctttttccctcagcattttttcatctgtgctcatttcctcctccgccttcgacgctcggcgtgccttcggtggtttgatcggtgactgttcgttgtactcctccgcctctttgcgtcgtcgacggaattcctcaattttgcgacgggtcgcctggctcaggtggccaaactccatgaacacgtccgtctcgtcggccaactcttggaccaccataatctcagcacgttcattcagcggcgttgggtcagtgatctgagcgagcagagacaaatttattgtgttttgccagtgatcagagcgatggaagcaaattttgagactttgatcactatatcaaagggatgagagtgagtaattttgtttttttttggacagtgatcgaatgagaagtgagttctcctaatgggtctcattaattaagccaatacggctatttggggcccattgatctttttattgcctcaaaat

SEQ ID NO: 14928 - DNA, 1038 bp, Heterodera glycines
aaaggaaggtttgttgcaagaaaacattcatttgacgaaccaattggtcagccaatggccaatgttttcagtctgataaaacgcgcagaaaatgccgacggccatcggaagaacgtaaaccaaagagaagcagccgatgcggaacatcaacttgctcagtttgtcactggcgtctgtctgctcgaatttgtcggtcacgaaacggtggcctttgatgtacgagcgaatgcgaaggatggaaacgaacccactggcgaaaagcaccaatccgacacataaaagagggaaaataattggcaaattcaaggaaaattgaaaacaatgcaaaaagtaaaaacaaaccaatggcaatgctttgagggaccaacgcgagtcgaaagtaaaactcggggcgaagattgccaagggagcaaatgccggtgaacatatcgccatcaacggcacccatggcgacgagcagaacggagccaatggcaggtaaggaccaggcgaggatgttgaaataggaggagaaaacccaaaatggaagtggacaaattgagaaaatgagagagatagagggagagagagaaagacaaaaagggaaggacagacctggccaaccggcgcttctccccatttgagggtggtgaccagaaaccaggagaagcacagcaccaaccaccaaagagtgccggcgaagttgaaaaagtaatggacgactgccaccgcagaacagagaatattctcattgccctgcgggaaaacgaaagttgaaacaaaaaatggacacaattttggggtagactgacctgagtgaccaactgttgtttggttgcggaggaaacagcgcaggagagactgtcctcctccaccaggccgaccatataagtggcactgaccagcaaatagcaaatggccatgtaaaagatggccttttcggggaattcgaagctaaaccaaaggaaacagagtcattggccaattgaaacgaaggaaaaaccgttcgatgtcaatgagaaatgtgacaattgtgaaggcacagcaaacgcagcacgt

SEQ ID NO: 14929 - DNA, 2085 bp, Heterodera glycines
attcggcatttagataaaacaataactaacatacatatgtacaattattgtattattcagggggaaaactaaggtgggcggtcaaaaacaaatatatacattatatatatcatatatacgtgaactgtttcattcagatttaaaataatgacagagcgggatatgcccgagccaaattcgccacttcctcgcaaaagagtcggcttcaaagagccgcacacggggcttgtgaaaaatgatttcttcgggtattggtacttacaatattggtgagtctaaattgtcaaactcaaatctaccgattttctttaagccttgtgaccggtctttacatgttggagccgtgggagaggaaaatgttcaatgttttcgtcacgggtttcattgccgttttatgcagtgccttttatgccttgtggaatgcgttgattaattaatttaattttttaaaaacgtaaatttatttatactgccaattttatttatttaataaagagtcaaaagcaattttatttggttactttacaagttctcttcaacccctttaaattgaaatagtctgtgttagaatggtcaaattgttttcattctgaaatggaatttacggtcccatattgaatagtgatttaggtattctgattatttatttccaaaatgtttctgaaactttttcacaatgggatattgtagttcagtagtaaaagtcatggaaatctttcaaaatgctcttggacaaacagcacgcgaaacaaattccgatgatttgcagggcgccaagaagggcgctggcacagccaaccaccgtcgcattggtcacaatccaatgctgaactgcctgcacacagcccaccccataaagcagcggttgggccattttggcacatccgtcatgaaaatgcacgcagcacgagtcgggtgcgtagattttccaatcggtggcattatttacgccacagcagtgcaattgtcgctgaatgatttttcaattggttattgaatcagtcggttggtttccctacttggacttggttccaagccacagaaactccctttgagcggttatagcgttccattccctaaaacaaagacgtgaaatgtttgtttgtcatccattgccaatggtcaaaccgtggccccatttacttgggtcaattggcttataagtgcttcattgagtggctcgtgaagagcatagacgagaatggcaatggcagtctcggccagcagcagaagtgcgagcagaacagcgaagctgaccgttaagcagtaattctcgcggatggcgccgcaatagccgacaaaaccgagcaaagtgcacagacagccgatggccaacagaagcacgggggtggcgagccgttcatcgccaagaatgtccaaaaggcccgtgtacttgagttgaagtacgacaccggcgattagaaaggccaagccgagagtctgtagagaaagcgaataaacgaattcggtcggattaatcacccaaaggacgaagttggcgaagaagaggaggtatttgaccaaagtgattccgccctcgaccatctcggaagctgacaaaacgcaactttagaagtctaattgtggctgttgtctttgtcctccttttcccagcccccgtaattcgatgctaattaaagggaattgtcggtcgttgaattgggcggtgcgcttcctccgctttaaccttttttacttttcggtccgtccgaaattcacacgacaacaattcctgtcaactgggcaagggtcctctgggctcttggaggagcattggccctcctcccccaatggacgcctaaaaatggagatgagcgagcgcctccccccccccccccccccatgccgtgcatcgtctgcctcgccccagagggaatatcccaacggaattggcccatagtgcccacaccacccaactccttggtcggcttccgcccttcccatccctaaaacatcaataagcaacttaactaaccaaaccaatgaatgtttcttacaaggcaagtgcctttttctcccaagcattttccattcagaataatgaaaaggaacagatttataagcaatcaaaaaagatgtctgact

SEQ ID NO: 14930 - DNA, 2628 bp, Heterodera glycines
ggggctagcgctcgaattttaaaattcattgaaaagttttcgagcagcagaagcacttgtatctggagcaattggcgcgacaaagtggtgcttccatggcagtgctaatagattcaatgatggataatttaaaaaataaaggtaaattttacaaaaaatatattaaaaaatgtaaaatcataaattaaaaaacagaaaacgctgatttggtcgccccgttgtttccaatcacttttgtcatcttgggtggggaattgcttgttgaacgtgaaaacttagagatcgactacattttcaactttttgagcggctcagtgacagacgacatctaaaagaaatttgttttgagggcactgatggagaaatgaaaagcatccatagagaagagaaaaatttatcattattattgatgtatgccctagtcaaagaaaaaaaattagaagtttatctttgtgattaagtaacgatcattggttctttattttggcgattttccaaatttagcgtaaataaaatgtttgaattttaatttattcattgaaaattgattagcctagcaggcggcaataatttgaaataaaaatttttaaatatatttacaaagatttgcatttacctttacaatggcttatttattttatataataatcaaaaaaccttaatagaccgattgaagctatcgtcctaatggaaaaaaggtgcaaaaaattcgcttaatttccattccgtttccattaatatttgtgaacattttccacccgaaaatttcgcatcaaatgtttaaaaaattttgttgaaaaaattaaataattttagtgtccatctgtccaattgtgaacacataaaattttatcaacataattaaagggtgaattttcctcaaatttctattttccccggaatcattttttaacaaaattggacaaaaaaacacagaagaaaacaattcacaaactcttgtttaaaaaaccatatttttttctattcatttattaaaataaattaaatttgattcgattatatttgaatgtattttccaaattgaatttgctgagagcgctagcgccctctttggaattgctgagaaagcgctagcgccagggctgggctcaattacggattgcggatattttgatcataaaaaattctgatcaaaactttctcagaaccaacaaaattaataagcttgctattattggatagccctacgtgtcctctattagcctacaaaatttcaaaaaattttattgagtttaaaaaaatttatggccaaaaatgtgtgcaaacttggtacattgcgtacttttgcccataactttgctcaaacttgaccaaattttttgaattttgataacttgtagagaaatgttggggctatccaatgataccaagaatgtctaatttggttgattttgacaaaagttatgggcaatttttttgaaaatttccatttgatggtttttatataactactcagcaccattcattttcacatttctacagtagggtttgatttatttttcttttgcaaatgttttccttcaattaatagtattaatgtaatactttaggattaaaggtgtttcctttttagtttttaaattcttttttctattaattttgctgtagtttttttttctaagaatctttggtgctttttaaaatttgcataagcatttttctcttcaatataaacttttagcattatttttttatttatatttgaattttttatgaaaatttttttttgtttattttaaatatgaattaattttagccattaatcgaaaagggattttttgtgcacacaacttataaccaaccttcttcatcacatttacattcttttggcatggcttgtcatttttcatgcagccatacattttagcttaaataaacaaaatttataatattattatttaatttatgaaaatatatttgtaatttaattttaagtttttatgactccatttttgtatatttaggctttttcttgtgaacaatgcccacattatgaaatatatatttattttaatctgtgaatgttggaatatttatgttttgtcgccctttgtttattaaatatttattatatttataatattctatattttgaatttgttaatttatcaatcaataaactttttgttattttcagttatataaaattgtcttaatttcttttgattaactataaaaaattatcgaatgttccgatgtgtacctttcttttttatttcaatacataaaatattatatgtttcttttaattattaattatttataaatctttgaagcaattgcctttttattaaacaaaataaaggttgtactaattcatcttacaactgttttgaacgtatttggtatattttaatttttctttacattttttatattgtctcttcgtttaatacatattttcatttagctattctgtacacaaaatttatttcaggatttctaattcagttcaaaaagtttatcttttaattaattaattatgtaataaattttggcgttctacatattctcttatgtttatgatgccgaatgcaatcaattatcattctttattaagtttttaataagtgaatttgtaattattttttaattgtttttcttttg

SEQ ID NO: 14931 - DNA, 704 bp, Heterodera glycines
ttttcccgacggcacgcccttatcggtgataaaaaatctaattttattaaaatactcgaaggtggcaaattcatttttagtgacggatggttagatcagaaccgaaaaattgcaacgcagaaatacgtttttgagatcctttcatcataacaaatgaataaaaaaatagttaatcactaaagttgttgctataaaatggccttttctcttaaatttttgtacttttggggtacttgatattcaatgttcgtttctaaatgttgaaaaattcaaatgggcattatgccaaaaaaattaaaagaagagtccggtttatcctattccaatatagccggactcggacatatcgtcgcctattggctcaaaatagcaaaaattggcaaaaaaagcaaattggttatgaaaaacctgtattattgactttgtaaatttatagaaagttagtgaaaatgaacattttttgaaaaaaagtttcggattttttgggtatcggtcttgggaccatgtctcggactcgagtcgccggaatttccgttctcgaacagcctaattatgatcatgatttttgtttcaaataattttactacccacaaaatttgttagagaaaaattattttttcaaaacttcgagcttcatgcttcgagcttcgaaaaaaattgggcttcgacttcggcttcgagtgctatgccgagcttagcccgtc

SEQ ID NO: 14932 - DNA, 3800 bp, Heterodera glycines
  unsure (1)..(3800): unsure at all n locations
ttggccaaatgtcctctgttgatgagccattttgccggattctcctttccagtctagtccttccattgctggcccattttttgccccgtcgatcaataatttcccatttattccccccccccccnccccccccccccggcgttgggactttccgtccgtctgctgatcgatgtttgcgtttgttctgtgccctttctcctaccaactcgtcatatttgtgctttttctcgaattgctttctttgctgagtcatcgtttttccctttcccctgcaaaagagaatttttctaatcgcttttttaaaaatcttgtgtaatctgttggtcggctttttttccatcaaatgtttttctttggtctattttttctccttttcgtttctccgttttcggaagcaaatctttggacagaaacagcgcgaatgagcgatttgcagcaggtcattttgtgccagtttcggtcagccttgaaaagcatttggatggcatttgttcagtggcggttgctctgctcgcgttaccaagttgcgcaggcgtacatggaggacgtaaatgcacgcgttactgtgttcgccccggtcaacgacgtgtttctgtataaccctgacctgcgagcaatggaccaaaaagaagtgctttcacatatcggtaaaaaatcaaaacaaacatttggaaaggccaggccgactgcctttgctagtgagcaaagtggtcagcccaccttttcatacactgatcaatgccaaatccatcaatcttggcgaatgccccctttcagtggacacccaagtggtggagatcagttctggtcggaagtgggagaagcaaacgctgatccgaagcacgatcaacagcgggtacatctacgtcacccagttcgagaatggcccggccaattttgttgngcattgngcgggccgtcccttatcgacggttcatctccattttaagtcgtatttcgcaaacgctggcgcaatttgcaaccacgtgaccaaccaagtggggcatcatcaccggcgagcagtacttgtacaaaacgtgcactccgatgggccatcgtccataccccggcacggcactttcttttgttcgcgacgacgaaaatgccttttttgttgaccgacactatgacaacagggatttgacgtcagccatgcccagaaagcactcatccccggaaacattttagggaattgcgtgacattttggacagagtgccggacatcgccttggtcatttacggaagctccgcttggaatggcttccacacatattttctgcccaacaacaaagcattcgcaaaggtcgccgtgcatattgataaactgttggcatttttattttacatcggttaaatcattgcttaggtgatcgatcgaaatcgggttgaccgtgaggttttgttggcccatgtcagcggaatgaacagagtatcaacccaaggcattccttttgttaatcccccgttttcaggtgcttttcacttacccttggctttacgacggcggtgtccacttttacccttcaattcggtgccttttgtcatttcgttgtccctttttatcgcttcgcttttgtctctgctgtttcagtttctcctcgaatatcatagaagataattacaagttgaagctgtgcttgcgcaacatcaccgaccatcggacgggcaaatgggatttgtacgccgtgtccaccgtatacgaagtgagcggggagagagagagagggaaatggcaaaatgccaatgaacgtttttttgaatggattgagtgccatcttttcttatggtattgcttttgagcgttatggccaatttcggcggggcgctgtttgggccaaattgctggtgcccaatattccggtgcagaacggggtggtccatgtggtggacaacgtgctgggcattgtgaccaacacaattgaccaagtccgtccgtttcgttcgattcttccgatcactcgtcttttctgactgatcattttgtgatcagatgctaatggacaattaccgctgcaccactttgatgcgttatatgaacacaatcggacaagtgactccttcccttcccattctctccccatccgctgccaattgacagattgtgcgcaattatttctccgccaccggcggtttggtcacttttttcgccccgtggaacgaagcgtttgagcgaattcccgagccaatcgaacggcgccttttgcgcgacagaatttggctggaacaggcgagtcggactgatcaaccaatgaatgaatgaatgcactcatcacagatcattctgtttattcaaaagcacagattctcaaacttcacattgtcccggcgaaggaattgacaactgaagaaataaccaatgaaacggttgtggccacggtggacaacatgcgccatttgtattttgtgaggggcgaatggccaaaaaacaacgtcacttattacgtgatcggcggaggggtcagaacggcaattcaaatggtcggcacttggcagtttgctatgttttgtcggttcattcgcatttatttgtctgtttccatccgtaccttaggaggacgtgacagccgttaatggaattgtccattacatcgaccgcgtgttgggcgtgccgtatcaggtggacggagcacgggcggaatgccatgatgcccaaattattacagaggattaatcactcccctttttagtcactttgggaaattttgcgtaacgaaagtcgagcgcagcgatcatttgaaatgttgggcaatttgcaagtgattaaacagcaaaaaatgaaatcagaaatcaaacatgaccaaattgcagcttaaatacagcttggacccgtggcaagtgctgacgcccgaacaaaacttcactttctttgtgcccatcgatgaagcgtgggacaaggcattgccaagcgaaggcaaatgagcgaagaaccaaaacgaggacattttgacaggtcgcaccatcgctaaagaacagaatgatggacggaaaccattggcaagcgttgcaatacgtttacaaagtgagtgggaggatggcaaaagcaaaacaaaacgactgacggttcagcgccacgtgctgcaaggacaggcgctgatgtacacggaccttcgggagcggacttatgttatgatgaacgacgagaaagtgatcatccgaaggcggggacgatgtgagttgatcaggaaaaggaaagaaaagtgaagggccatcgaccgaatgaatgcctttcgcattcattggcatccactcgcagacttcgagttgtactggccccggggcaatcgcgtcgcgcgtgtgctggagggcggagagctcgccggcatcaacgggttcatgcacctcgtggacggggttagccccttttgcctttgccgttggcttttgctgactttcgccgtccgtttttctcaggtgctcatttatgagcctgatttgcgtgccgccgctttggtcggcgcttcgatcactgacaacaaccacactttgcttctttgcattgctttttccctatggacgcatcgctggaggcgaaggtaaaactgacaacagcgaaacgcaaaattcaatcgaccaattgatgccatgactcatttgtcacaggaattccatttctggctaatagccacttttctgagaaattaaaacgcagaaagacacttttcacattacatagacctctttattcactaatttgcatttttgtactttgagaaatttcttaggaataatgattgatctcatcattttaatttttagtcaacgaaataactttcttctacggaaaccgctttttgcttctt

SEQ ID NO: 14933 - DNA, 3348 bp, Heterodera glycines
  unsure (1)..(3348): unsure at all n locations
attaatcccaaaaatgaattttctaaaaatgggtgccctttaaaagagtaccttgtcaaattttggcggattcatcttctctcactcgtccttgctcagcttggtctagttggcgcgttctcacacaactccaccgtgtacgtctcgctgtcgtcacgcaaaatgctggccttttggtgaaaaaatttttaattttggtgtcataaaaaataattataccttgacgaagccctctgtttcgtgaggcacccaaatcagccgtttgctggcccattcagcctaaaaacagcgtaatgttaaaaaaaaattatttttttctgagatctgttttccggtgtcaatttccgattaaaatgacaaatgagtggaaatgtgactaacatgtaatgcggggtcggtgattgatgtgcgtttgaccattaaaaactggaggtctgccggcgaagatgactgttgtgagaaaggggaaaatgagtttcgatggttatttttgtttcccccccccctccagtaatttgcatcaaaatggtgttacgcatttaatttctatgctaaattaattaaccggctcacaacagaaaatcaaaaaaataacggaaaacatcctgactattgtaaatccaataagaagcacccggcttctgggccctgcttctccaaaaccggatttttccaaatagcattggaccggtttgccgggcccagtaaaaagccgcaccgggttctcccggtccgttctctaatttatgtatacattcaagaaacggaatgaatgagttttgatattgccataaatgatgggtaactcccgttgaaccaatctttctcaacatggagaggatgccttttcctctaaagaaaatcccaacgggacgcgcaatcgaaggcattcgaacgcaaaaaaaggcaaagccaaaaacctgtgccgccgtttgctgctgcggtggtgttgccgctactgcttgctggggctggccgtagtaaattttcgactgacgtgtcggcggtttgggcggcaccgcggaggacaagcgtgccgttgcggttgtgccgttgccgttcatcatcacaccgcccccattcccattgatcataaaagtgtcgttgctggtgtgttcactgtttccgcctccgttcatttgaaatttgtgtggtggtgagtcaacaagaaattttttccaacttttaatcactctgaaatttgtcactttaatgacattttaagaggcatagattacaaaagccggaaacgcgaaatcattttgggaatccatatcggggggattttaaaatcgcttctattgcacttcagggtctagctaacttttactcagggatgatacttggatggagcatttaagttctagggcaaatccaattaacagattccattttgaaaattttcacgcgctggtatcggcatttttatatgcttcacaaaatgattttaaaaggattgagcatcggtcccgacttttggatgaaattggaaaatttgaaaacaaatttgtttttaaggtgtttggcgaaatgttttaaataaatattcaagagtttaatgactgccgacaaaaaaaatccagtaaagggcaggaaaattgaacaaaaaccatcaaagtctcaacgggtgctctctctctcagtttaatctttaaatggggacacttttcagcctccccccacaaacacataaatcaacgaaaaacttttaaacaacaaattttatgtatcgcattttaaaaggcacaaaacagaagaagaaacggggggggggggagaacacaatacaatcgatgggatgggatggggcggaggtggcggcggtgatttgtgcccacataaatacgcatacatacataaatttgcctctaccgtcgttgggggaggaggaggactctcctgtcccccacccgccacaaaaagtggcgtccattccttgggatggggggggggggggaggggggcgggggaatgtgaaagaatgaacgaagaaacgaacgaacgaatgaatggtaatggaatgaatgaatgggaacgacgacagcgacgacgaagacggacggacgaatggtggtggtacaacaacagcaaaacagcagcagaaggaggaggaggaggggaatgatggtggggggtgaggaagaggaaggagcattgatttatggaggaggatggggaagagggggaggaattggatgatgatgaatagggtggggatttttaggggcgaaaaattccaatttagggacctaaataggggcaaaaaattcgcgaaataggggcgaaaaagtttcaaatgtagaggtgaaatttattaaaattgccgttttctctatgtaataagttaaaattaaggaaaaaattttattcactgattgcagttagaaatgaagtacattccgaaattttcggggtttaagggtcgattcttaggggtgtatttttccaaaattttttgggtcgattcttaggggtgtatttttccaaaattttttgggtcgattcttaggggtgtattttaccaaatttttttgggtcgatttttaggggtgtatttttcttttttattgcattcttgttaataaatttcctaaaaatcgcgaaataagggcgagaataggggcgaaacgccaaaatagggacaaaaacttattttaggggcgaacactcaaaatagggatttttaggggcgaacatccaaaatagggattcctagggattttggcgaaaaaatgattttttgaaaaatttttcgggttttgggctcaaaaaggataatttagctcataaaggnccccctcaggcgatgccggcgctggcgccacatgcatttttcccgaggcacgggagcgcccgttctttttcgacattcccaccgatgtaccagcccgttccattcttgtggacacagtggtggagccgtcgaatgccaaactgaccattgccaacatccgtgcaaacaacttggaggccgtaagcatttgggattcattttcgagtcccgacacatgacgtcataacacgataaaattttgccgcgtttttgagtctcactctcacggggccacggggacactgagaaaagacccaggcaaatctaggaccattagctttgctgagcaatactgtaactggtccattacggaaatggtattgccccgaaatgagtacgatataccaagagagtcgtatgacccgagaaaatttgagaggttttttgattcccgttctcgagagccccagggggttcggcacagataaaagtgatgagcaggtctgtcaaaaatatcaaattttcttgattctacgtagtctaatttttaccattttctgacatatttttagatt

SEQ ID NO: 14934 - DNA, 1802 bp, Heterodera glycines
aatcaaattaaaatgtgttatgtgcatataggccagcaaagtcagtagataaaagtcaattagtggtgagccgaagtgacaaaaatatcaatgtttatattatttaaaatttaattattatttttattttaattgcttaataataatcataatttagcttaaatttaatcaaatttattcatatttgaatgtagctctacatattctctatgatttatgtaatttttaaaaaaataataaaaatttacgaaaaattgtgaccaaaaaagctcgaaaaatttagactaacaattttaccctaacttttttgaaattcattaaaagtttttaaaaatttaactgaataataaagaaatctctgggctatcttttcatatcctgtgcagtttgattaattgaatgtttaaacaatttttatgtttaaacgaccttacattttttggatgaccataaaaatatataacctattaattccttcataacttttttcagaaacatccaattttaatttaatttatataattagatagcccaaagattaatggattttaaaaagttagggtcaaaattgttgagtctaaatttttgattaagctaagttatgctttattattaagcaaataaaaataataaattaaatattacaaacattgaacatacttttgtcacttcgtcctagcaccaagtcaattgacggaaaaactggcctaataataaagttgatttttttttgtaaaatttttaggttattgaacgattaaacgaaatcgtcaaagatcctcataacttcgcagaattgaccgaaaatgaccttttggtgaatgcgctagtcacttttagttttcccaaattgcgtcacattttcaaaaaatacgaagaaaaatatggggaaaaaattgaagagcaggtggacaacgcttacatcaaagaattcaaacatttatcaaaaaaccgaataaagaatctacttaaactggaccttcatgtcgagcaacatttttgggtaattattttttgtgttaaattttttgatagatgcattatgtatttgtttagcaatttttcaaaattttattcctttcgctttttagctttttctcaaaaacttttttgtttgttctgaattcggaaaaattttcacattgcaaaaaatccttgagtctgagccggacgaaataattaaatttagcaaacattgaacgcaatcttaacggatattcaatatggtcgcccatatttttttgcacaattattgaaagaaaagcttgacaaattgcgaggaaacgaaaagtgggcctcagcggacgcgctgaaagacgtgacgcgaattttgctcactcgcgcacccatcgatttggccgacattgaccaggaatttcagggattgagtggcagcttgaccataagaatttcgatttcggcttacatcgagcaaattctcggattcgaaaaagagaaaaagcaaaaaaagggaaatgtttttcgaagcttttccatacgttcaaaatcgcacgaagacattggcaccgccgttagtagcgaatccaatacggcagcagcaaaaggaaagccatcgcagaaaattgaaactttgaaggcattcaaagaaattgtcgattgggcaacggagcagcgaaggctgagtttggcgagaaatggcaacagcggggtactgtgatggtcgttagcgtaaatgatggcaccatggggagtttcgtaaatttgtcggtacttgtgcagtttacgcccgcccgccccataaaaatattttttatatatataaatttttagaactcatattt

SEQ ID NO: 14935 - DNA, 2053 bp, Heterodera glycines
aggtatattttttttaagtatttaataaatttcacagagattttacaaaatccttaatgaattttccttaattatcgatagaacagtgttcaaattttcaagcgattttcagtaaaattctccaaatttctcctgaggattgtaagtaatatatgagttctttgaaaactcatacttactgacagacgataaactcttcgcgtctacaaaattttggccgttcttcttacctaatgactagacaacgtctacagaggtatcagaaatcacaaagatgcacgatcattggtaccaaaaaacagaaagaacgctcgagtatcctgtaaaaggcatcaaaaaagtcgctccagtttttttgaggttttatggagcaaaacacctacaaaatagccaaataacctcattttcgtcatttacatgcttatcaaatgcaatatagtgaggttctccaccaaatttggatcaccaaagaattcataccaagatataagtatgaaattttggcgatcatttttcaagaaaatattttagttattagggagttaatcttcatatattgtagtcagattgagtgctagtggatgtactttggatcagttcatccatactgtattgaaagtcatcgaaaatatacaccaatgagtccgcacggccccagtttttgggccgggaccgggacttttttcaaaaatttttgaaattttgattaaaaattcggaagaaatttcatagtcttcattttagcttagaaatatatcaagccatgtagatcatcgaccttttttgcttttcaaactccttttttagggccaattttttcaaaaaaattcgtcgtacaagggggagggggggtccggcggtgctgataggcgccgccggggaaaattttttgaaaatttgtttgtttttgttaacagagttgtccaaaaattgtccaaattttggaatattaatctttttttaacacggcgatgctgaggaaaaatttgaattttaataaatttattaaggaaatttgttgagtttttcatcaaatttggaaatgttttttggtaaaaaaaaagttgtgaaaatgttactcaatttcgtatggattttggggtctttttaacagttaaaattgcccaaattttcaagaaatccaaagttctatcttgaaaatttcgaattaaagacattttgccaaaatagttattaaatattttcaaatctgagttattttcactgatgaaatttagtcccgttagtcccggcccaaatggccgggaccgggatcgggacttggaaaatgaaccgggacgggatcccgggaccgggactcccgtttttccgggactcccggtcccggtggtttgtccaaaaaagccgggaccgggagtcccggcaaaatcccggtcccgtccgggctctaattatcatatttaaaattgtaatttaatgcatattttttttgctgtatgttaaattttagatttttcatcaatgaaaaattactaattcttataattatttatgcgtttttcattttatagtgttttttaaggaaaacctcactgtttccgtttctaatctgtaacgagccaaaattgtaagtcggataactaagttctatatagcttatcagtaacagtaaataacaattttcgtgggattttttaataagttaagtattatgcactttagtaattttttcatttttagttcagtgcaagggatcatttctcgcttgcgtgtctatgtttttcgtgttcttgtgctgacaaatgagcatgtatgaaaaaataacctctttattttttgcaaaactttttaatttcatacttcattttataattataattatttttggtttggcctttatatgcaacaagattttaacgatatggttgcatattacactgcagcaattatttgtttgagcttttgaataaataataaattgtcttttttattttttttgtaatagaaatatgttatagactcttgtttttaagtcaatcacacacaaatttttaatatcttaaaataaattttttaattatcatttgtaaat

SEQ ID NO: 14936 - DNA, 1838 bp, Heterodera glycines
  unsure (1)..(1838): unsure at all n locations
ccccccccccgcctcaaattttgatgggtgttttactcagagttcgccgtgccgtcgtcgttcattttgtgcccaattttttgcccccccccccccctcaaaaagtgcacaaattttcactgaaaaaattcggagggcaccccaattttagggaggagaagaaaattacatttatttatttgtacaaaatgtacgcactcactacacaaaccattattccattctctgtgcccccattttcctatgggaaaatgccgcggggaacgaaaaaaaattaaaaaaagaaaattcggcaaaatttgggggaaatggaaatgtgaaattgcttttaaaacactttataaaatatacataaaatattcttgcccataaatggggtcaattttagagttggaatttattcattttatttttttgccttatgaataaaatggcaaattaaaatattcaaaaaatgtgtaaaaaactgattttcttattcgttcgtagttttcagaatacaaatacattagcataaaactgctaatattttgtaaaaaataaaattttatacattcagaaatttttttaacaaaattcacagacttttaaaacttaaaaattttacgaaaaatttttacatgaaattttcaaattttataaaaaggcggattctttaaaaaacttgtaaagcaaatattcagaattcatagaaaataagacttaaaatttcaaattaaagaaatttgcttaaataaagataaatttaatgaaaataaaaataaaatttaatacaatcaaaaaaatatataaaaaattcaattcaaaatgcagcaaaacaaaaaaaaacaaatggaataaaaaatgataaaaattattaaataattttaaaagcaattaaaaatctctgtttaagcaattgaatttagtgtacaacagaattttgttcattttttacattttttgagatctttacgccagaaacgcttttggcgcaatgccaatgccccgcgccttttcaaatgtaagtggcggactgtccgccgatgtcagcgctcgcgcggatggtccgcgtcagccgttccaccgccatcagtcgcccgttgcgcaggcactcctcgcgctccacgcggtcctccaccacgcggtcgccggggggaaattctagcggaaaatttgcttaaattaccgtatttattgaaattacggtaattgctacaaaatgtcaaaatgcgtacccctaaagtgcgcgtgccattcccatttgcgtggcacttgcggccgtggcgtcactctcggctccaccgacggcacattcgctgcccgaagcaccgggatacggtaggacacggtgttggcggcaccagaggctaccgtaccccgccgttggtcagtgccattgggcagcccggaagcgtggggaatggtcctcggcttcttcaaaatggacctcagccggtgggaggaggaggatgacggcatttggccattttggggcggcgaagagggaaacttagggggggggggggggtaattaaaacatttagtgaacgtatctatttttattccctgaaaaggaacccatctttgagtcggcaattattttttaggcaatcagtcaaaaatttatttaaaaatcatttaattatcccatcgaaataaatatttaaaagaaaaaaatgcttagaattatttatgaaaaattataagttgatgtaatttattgaagttaantaaattttatttatttattanaattaattatattttaattattatctttttttttttataaatttaaaatatttttaaaatcttttagggaatatacggtagtgattttctngtaaatttctcat

SEQ ID NO: 14937 - DNA, 1494 bp, Heterodera glycines
cgaaggaaagtgagtgaacggtgggcgcgttttgtgccttcttttgaacacttcggctgaatttcattcatttattaattaccctattaattattgacatttatttttgattaataattcgctaattaatttaaattacaaattttccataaagcaacacgcaacgaattggccaccgaagaacaaaatgccaaaaagcgatttggcatggaaatgccgtggaactcagcctaattaaaaaaattaaaaaaattgatttattaattagtaaatagtataaatacaattaaacttttaataattacttttttctctttgaatttcgccgattgggcagaaaaagatgatggcattttctgctataaaggagtccattttagaaaaacaaaataatcatttatttaattaattgaatttattttgtattatttttaccatttttgttgtcggttggccgtcccattgcgcaaatgtgcgcgaatttgtccaattcttttcatttttctttcgactgccgacggaccgaaatttttaatgaaattattgtttttttaattttaattaaatttattttcattcgatttccgatttatttaaaaaaaagtttcgtttaaaatagaaattgtggaaaaaagtctaattttaaatttgataatcaatggattcacagtatgtattaagaatgtaatcgtaatttcatttttcttttttttaatattttttaatttaaattttgtattggaaatatttaataattaatttaaatttttaccaaaataaatacaaagcagcggcaaaaccaacagaaatcacaatggcagagaggaaaagcacaacgaaaatggtgaaaaagagatgcaaatcatcgggaggcagagcggtggagggagtgggcaaaacgaagagaatgacagagaaacgcagaaaaagggatgccttaggcagaattggcattctgagttgaatgctttaaaaatatggaatgaataggcagtagagaccggacagtgtcgggatcctagtattgcttaagcaaatctcggtaatctctcgggatcccgaaaaagccaaaggattgatcgggattattcccactcatcagggtccatccgatttcacggaattaatttacaaatatgaaagattaaatattttaagttgctttaaagtttgaaaatccgcattcttaaaaaatgagatggttaaataactcattattaaaatgccgtaaaataaataaaataattatttttctctgttaaaaatgccatttttgtctctcatcagctgacaaatcgaccattgttaaatggaaaatgcacgcacatttaacaatttgatggcggcggtgagggtaaaatttgagtggaacagatggaatttgacgcgagaatgaggcagaaaattgtggtcccgaaattgggggggggggcaaaacaaaacaatcgatgcaattggggcgaatgggcggggggggggggggggggttttttt

SEQ ID NO: 14938 - DNA, 2232 bp, Heterodera glycines
tttcagcaccgaaaagtttttggaattttgctgtcgcttttttgggcggttactcggcatttcgactagccaattccctctggtattactcgcaatcgtactcgacggatcaccaccaattttacgacagtctcccgtgcgctctctcttacaaagtaccaaattattattaataattcgttttttgattgtttgacttttccccccaggtgcctttctattgtgcccttctgttcgagctgttcggctcctttttcctccgttttctcctccaccgtttccccctctcttcccggcatttcttcgctccgccgacaatcgccgctttcctttccttcggtgcctttccttctcttttttcctccctttttattcattttccttttcagcactcactttcatcggtgttcctggccttaatcccgtggtcacttcctcgaggcttcaaggtttagtaaacaaaaaacgtttcattaaattgtcgtcatttttgcacattttgtcaggttgtcccggcttggacttgcaatggttcattgtgcgttctttccgtcctcaacgcttttgacgtttcattttgcattttcagatgacttattggtgttgtccggtggtcggttggcttttggcctcaaaattggacaaaacgccgacaaaacagaagaaaaaaacgaccaaagaaaagacgaaacagaagaagagttgacccagcaatttgcgctttttttcgtttgtccattcttcgcacttctctcttcacactacatatccttctcctttattcttcctccattttattccgaatttgttgtgccattcttttcctccgttagtccttcatcacttttccgattttgtgccttttcattattattaaattatttaaagaatgaaattccattcataaaattgctgcgcttttcaattgttacttccaaatttccctgtttaaattcaaaaaaaataagcattttaaagggaatggccaaatcaactgaggaggaaagaattgcaaatgtccattttgaccttgaagtggtcaattcggattttattcgaccgatgcgaatgaactttcgccggagggggcgcgacttatactggtgcgaaaaacggcttagatcatgcgtttttagagggagaagtttttaaatgaatgaagtgcttgcccatttctagggacatggcgcttgggcacgacagtgtcggtaagccgttcgtcccattagtgtttcttccgttcgtttctgttttcattgccttttgtcccaattagccgcactcattttccacaccgaaaggaagcagttgctgttcgtcaagcagttcagaccacgtaaatttaattgctagatgccctcttttgacctttccccttattactttagctgttttcgttaacgtcgtccggtcactgcccgaaaacaaaaacaaatctctcgccgaagtccgctgggagaattatccgattgaaaatggatgcaccgtcgaattgtgcgccggacttatggacgaaccgggcaaaacgccgttagagcatatgaaaaaggaaatactggaagaatgcggttatcgagtggacgagtcgaacatccgcccgattcggcgttatgtgacgggcatttcgctgtcgggcgcaattcaacatttgttttacgttgagttggacgagtcgatgtgggaaccgaaggctggcggagggaatgagcacgagggcgaattcatccaaaatgttttcatggacatcggagaagccgaagcacttttggagaaggaaaatttggtgggaagtttttcaataaaaatatttatgagccaacaaaacacattttattatttgaatggattaaggtttcaccgtcttcgttccttttcgccatcagttggtgggtgctcaatgagaaggaacgtttgctcaaaaatgtgaaatgaaaagcgagcgaccaattccttttgtttttgcgggccatttttgtgcgatatttccaattaccttttttcgtcaaattatccaaccaaacggttcattatttatttaaaaatttgttttcaataaactcaaaaattaaaaagtaattttaaagtttgaaaggccttaactttcttttcaaatcttcagaattttatatgaaaaaatcgggtaaaaaataggattttggaaaaacaaaacaaagtgattaatccgctggagagggtgagtcatccatccgttttgtctctctttctctctct

SEQ ID NO: 14939 - DNA, 989 bp, Heterodera glycines
cttttttgaaacttaaccaaatttttcgaaattttgaatccaaatagagaacacttagggctatccaatgataccaaattcaatcagttcggttaacaatcaaagaatttatacttcaaaaactgggggcttgcgcacaattgtcccccagttcgcaaaattcgcctaaaaattattggtttttttttgtaagaaaattatcttttttttcaattttcgatggcagatgatctaaaaaactaacaataagcggtgaaaataaagccaacaaaaatttttttccaccccacagatttgctaccccttccggccctacctgtacctggagaccaaccagggccaggaattcattgtggccgcctacctgtccaagaaataccattttgtgcacattgaacacagcgagaaggagaatttggacttggtaatggttgccattttgccatataaatattattattttttaaaaatttcgctaaatttcctagaaaaaccatttggccggccttcgctcccgctttttgcgcatttccttcccgagcagtgccgagatggccaagttcaagcgcgacttgatgccacggatcaagaagaaccggctcaacgtccagcaatcgtccgactacacagaactgctcactgagtgaggagggaggctgtgccaaaaccaatttttggcggcttttgaattaccgaaatttgagaattttttatttttcgggtggaaccacgttttaaaaaattgcgatttttcttttgggtgggcttgagtataaaaatcttttgaaattttcctattcataatttttcggtttttttttggggggggggcgtcaaccgaaaattttgcaaacgggtcatgctcccatgtaaattgaagaaattttttttttcgtatcttttacggcacgcttttcccccaaaaattgagggggtggggatcccacggctccgaaaaaatttaatgaaattcgaattcttattttttt

SEQ ID NO: 14940 - DNA, 1921 bp, Heterodera glycines
ttttctcgtattattacattattcagactttgtgctcttctatgataccaaaaagatatgatttgttcgaacatgaacaaagttattgtataaaaacccgggattgtcaattgattggactcataaagtgcattagagccgataattttttatgtaaaacgagtctctcgagttcgaattcagcgcctaaaatgttaccctaaaaaatcgtagtggaaacaaaaaaaaatgaaaattttttaaattttaacccccccgcccttgcccatcttttcacagtgagtacgacttgcccttcgacatgcgcgtgtgcattgaccagcaatttttcgtgggccaatggtacaccgttttgggccgtgatccgaccaccaaaaagccgtcaatttgtcgcaacgaggcgctggtggacccaccggagcccgtggtattggaaaactacccaaaaaaatggggaaaaaattcacatttttccccagatttgtgcctttgacattgagacgacgaaagcgccgctcaaattcccggatgccaatgtggacaaaatcatggtgagatatcagagactacaccatggcagcccatttgatgccaacaaaattggcaatcataacccgccatttaatccgaattaaaaaagggaaaaattagaatgccaatcaaagtctaaattatttaaacggcctccctcatatgttatccaccggaaaattaaaaaagtatttttcaaacagaaatctaaatctaggacaatttgaaatgttgtcaagaagaaaaaatttgaaaaaatttctaccaattttttccgaatttccgatgagaattatttgctctccccctcccaagatgatctcctacatgatcaacgaggccggctttctgattgtcaaccgcgagattgtcgctgcggacattgacgacttcgagttcacgcctcggcccgaattccggggcgaattccgcgtgttcaacgagcccaacgagtgcgcgctgctcacccgcttctttgaccatttgctgcgcgtgcggccgcacattatggccacgtacaacggcgacttctttgactggtgagcgtttgtggtggattcattcatcatccccatggggggggggggggtgtttttttcattcgctccctaatttttcaattagaaaaaaaacaattattggatccatgtttcattgtgatgcaccactgcgtttccctcatccaccacgaaaattattattttttccttttcaaatagaaattttaaaaattttcaaagaagaaacttttgcaaaaaaaatttggtaatttgtcgtgtcgtaaaattttaaaaatagcagaattaaaaaaatatatttcatataaaaaattattttatttttttaaatttataaattgtgttgtggagcggcttcgaacctacacccattattgtttttaaaaatctaagtttggtgtcacattttcttgaattggaaaactttttatcggttttggatttggcgccggtgtcgcattttcagggagccccattcagcagagagctcccaattgtttttttttcgaaattccaaatttttggacagatagagagtataataaaacagttcctatttgggcgtttattgaaaaacgaaaatcccaacaaattttcaaatgtaaaaaaatatgaaaatccctgcaaattttcaaggccctttgtggagacgcgtgccgccgccgtgctgccgcccgcctcgcagcggatgagcgcccacctgggctttggccgggacgcgcaggacgagtacaaacaccccaactgcgtgcacatggacgtgttccgctgggtgcaacgggacagttatttgccgatgggctcccagtcgttgaaggctgcaacgcgggagaagttgcgatacgagccggtggagttggacccggaacaaa

SEQ ID NO: 14941 - DNA, 2085 bp, Heterodera glycines
tagtttatagtctatatacaataatctcaggactcgtctctaaaaccaaaatctcgggaacgggcgccgggaggggctcgggagtgtgacatcacttaaccaacttttgacggcgcatctgggaaaaatacgggttttccggtccggcggccagttcagcgccagcggcgctgaaacggcccaaaaatttttttgtccgtttttgccggcctgtatctttgcgggaagaagcgggagcgaaaaacgcttggtgggaggattttaagttggagtgtttgggaaaacttggcgtttatttggcaggcctacctgcaaaagcctggcctgtacacgttggcaaaatttgaaaaccatttttggcgtttttcgattttcgcgaataactcgctgggggttaagcggagcgggttgacgccgcttgagcatttgtgtagtttttaaagctgcatccgatggcgttttcagattttgaaaattttgaaaatttttcgagctaggccccctcgaaaatttttcgtttttgaattttattattttttgccgatttttcccaggaaaacggagaccactttcaagcaaccgtttttcgagctctatcgattggtggcatttttgaaaaaatttcaaaattttccggaaatagaaaaattttccggaattgagctccccatttccgtttgaggcttataactcgtcaggcgttgattttagcggaaatttgtcttagagcatttttgtagagaattttaagctctatctaatgtgctttatctcatgtttttaccatgagtttaaaaaaagttataaaattaattgtgattttgaaactcaaaaccataggggggaccgaccccatggttttgcatttatgaaaaatttttttactcctaaattagccaaaatgcatttttatggcataatttgaggtgctgaatacgtacgtatatacgctttatattgcgttttggattttttggagggtggtaaaaaaattttgaaaaatcaataatttttggcccttgaaaattcaacctaaattttaaaaattcataactcgcctcaaaattgtccaattcagctcatttaaagcattaaaaatcgagaaaaatatggagaattttaagttgttttttgagtttccatattttaaaaattcacaaacttaggcctggatttctcaaaaattttaaattttcagaaataaatttataactcatttcaaaaaaggcgctaaagaatatttaaatattcataaaatccgcaatttttttctctataaagagaaatttatttgacctttttataatttaaatttccttttttataaaataaggtgctgagcatgaatgtgatgtttgttttacgtttcagaatttttggaattttttaaaaattctttattttttgggaaatttttggcccttgggattttgggcgaatatttgaaaattcataacaaatcgaagggttgataaaaaatcgtcgcggttttcgtgctgtaacttttctcagggaaccgggagcggaaaaagtccgctgagagggcacaccccagacatgttggctacaactttgtcactgatcactttttgatcagatcaaatgccgagcctgtagaaattggcgactgaacggcgctcaaaatgccggttttggcttttcgtgaataactcgctgggggttaagcggagcgggttggcgccgcttgagcatttgtgtagtttttaaagctgcatccgatggcgttttcagattttgaaaattttcaaaatttttcgagctaggccccctcgaaaatttttcgtttttgaattttattattttttgcagatttttcccaggaaaacggagaccactttcaagcaaccgtttttcgagctctatcgattggtggcatttttgaaaaaatttcaaaattttccggaaatagaaatttttttaggcttgagcgggacatttcagtcccgggctcataactcgtcaggggttgattttagcgaaaaattgtaatagagcagttttgtagagaattttaagctctatctaatagggtatccggtatttttatctttaatataaaaaaag

SEQ ID NO: 14942 - DNA, 1427 bp, Heterodera glycines
tcagaaattaatgaaaataagttataaggtgttctctatgtctccgattacgaatatagcatccatttttctaattccgaacccctgacccgaaatcgaacaataataaaattaaaaaatctgtatgaatgatatcctgattggcatcttacccatgagggtaaccttggtacaggaagcataaaattcgaaaattgtatggatggtaccctcatgggtatcttgccaatgagggtattattggtacaggaagcctatcaattctttgtccatgtacagctcatgtgatgaacggttgcgctgatctgagcccggattcgtgatcagcgacctcgagaaccccttaacacttattttcattaatttctgacacatttataggcattaaaaatgtatgtgaaaagtaccctgtaaactgtataagtaccaaaacgggtaggtcatctcgatgaaacacggaattaaactatacaatttatgcccaaccgatatgccattttattaatatatcaaatgtgcatataaatacaatgacgatgaatatgaatgagatttcacaaatatcgaacaagcgaagcacaatatattaatgggtatacaatatatacatattcaggccacataaggaaggatcactgttcacaaggggaacatttaagaagcattggaacagacaaaacacagcaatcggatgggaagggaatggtcgaaagcaagggacgggtgtgttggtgtcgcgagacgtcgtcgtcgaacactgtcatttgcacgcagcagggcctggctattcctctgcttggctcgtctccgctgtgctctgttctcccagcgcttcgtccacggtggatgcatcggcggtgtccttcttcttgcccttcttgtccttcttcccgtgcttgtccttcttgcccgctttgctgtcgtcgctcttccccgcctccttcgatcggtgtttgtctttgcgcttctcctcctttttgtccgccgctggtgctgctgctgctgcgccttcgcccttcttgtccttcttcttgtgcttgtcgcccttgctgccagccttcttctcctccttgtcgccggcggtcgtcgcttcttcgcctccttccggcttgggcttctcctcgtcgtcgctcttcggttggtcgagcatcgggccgaggtacgccttccaacagtactgaaaaggacaaaaatgttatgaaatgcaaattgaaaaaatgaagaaagcgcagcattacaattcctgctccgaaggcagcagcagcgatgaataggtaagtggccattgcgttgcgttgcgcactgaagcggttcgttggttggagtgtggtgaagaagaagaagaagaaatgtgaagcggagggaaagacgaccccttttatacggatccaattctgctggaaggaattggaaaaaaattgatataa

SEQ ID NO: 14943 - DNA, 3549 bp, Heterodera glycines
tttaagaatgcctgctgaaacagccaattctaattcgaacgttaattcttctgaaacagcaaataataacgcaatttcaactcatatgcttcgcgagaaaaacagcgacgaggcaatggtaagggaaattgtctaattggacaaatgctattctcccacccctcttctgatttaaaggaagttgaccagcaaatcgtgactgatactgccgacattttgcagtctgtgctcgaattcgcttttggcgtttcaatcgacgacaacaatggcattgcacaggaattctcctcatctcccgaattgcttttacaactgcaggattctgtgcgcacaattcttccgtctttaaattccgacgactctttggctttgtaatgaatgatccattcgtttatctgctttcatttggtgttttgtttcagtggtcaaaatgaattccaaccggactttgaccgcttcttcgccttccctgaggcttatttggaagttgccgtcgagtttctcactttgctcgtcaggtatttgcttggattttattttcgactttttactttttccatttagcaagtccaaaatgagtcggattttcctaaagaacttgtccgactttccgaagcaagttcttcatttgcttctcaacttggagagcataaagaaccctttcattggttcaaaggtaaaacccccgcttcccttttctgaacattttgctctgttcctctgattttttcaggtcgtcgatttgcttttcatgctgtgccctttggttaaccatgatgcatccgtcttttaccgtcaaattgtcagtgattctcttgctgttgaaggactgttcccatccctcgtcaaattttattcggccgttgaaacaactggtccgattttcttttttcttctcctttatgctcccaaaaccttaggttcacacactgaatttttcgacaagtttaacatcagaaggaacattcaagtcattttcaaatgcatgtggagtgatttgtcgcatcgcgacagaatggtccaatacgccgggtgttttttctgttttgtttatttttttaaatttcccattcagtgaattttctccgaattttgttcgtttcatcaacatggtgctcaacgacacaacttttctcctcgacgaatcgcttgacaaattgaaaatgatccaagacattgaatccgttatgagcaatgagaccgaatgggacaaactcagtcaggaggagcagcagctgaagacggaccaactcagagactcgaagggacaagtcaaaatgtggatccaactcggcactgacaccatggaactattcgttacgctgaccagcgacgcgccgcaaatatttcgcaacgaagcgcttggggaaagagttgcggcgatgctcaaccacaacctcgtccaggtgggcttgagggggagggaagggaaaagccaaaaaaaaagaaagaaagcccaaacaatgcacggcttttatagttgtgtggaccgaaatgtgcgcaactgaaagtgcacgacgcaataaatcgcttcgaatgggacccgcgcacattgacacagcaaattgtgaaggtctacatcaatttgggctcggaaatgttcgccaagcaaattgcgcaggatgaggtgacctatttcagacttatttatttgccgggacgcaatcccccaaaaaaggaaaagatgaatttttaaattgcaattagacattctctgatctccccaatttagcgttcgtacaccccggaagcattcagcacgataattgaaagattcaaaatgaggaacattcttacgatcaaccacttggaattgtttgcaaatttggcggaacaggcagaagcagcgtacaaagagaaaatgatgttcgaggaggaattcgaagacgaagtgcccgaagagttcaaaggtgtggcgcgagtgatattccccggaataattcgcctttttgagatgcgcttgtctacacgatgatgagcgacccggtcgaactgccctcgggacagatttgcgatcgcaaaaacattctgcgccatttgctcagcgacccgacaaatccattcacccgacaaccactcaccaccgacgaactgagaccgggtgggatttgtggggaatgttaagccaagatttatgcattggcaatgtttagaaaaagaactcaaagcgcgtattttgaaatgggtgcaggaaaaaagggacagtcgcaactgaaagcggacgaataattgacttcaacaaatgcctttaccgtggtcagtcaatcgacgagtgagtaaatggtttgactgtcaattccattgccatttataaccagtcaattattcgtccgccccttttatccacccacagcgtatagttgaaccatccgtcgaacagaattttcgtacgcgacttggttgtggtgatatgcaaactgaaaataggaaaaaaaattgacagactaaacagcagaagtacttaccgctgcctcagtgttgtatggactttcataatttggctcaagaagaacatgtgagattgcttggagcacatctgtcatattgttgctagcattccaaagtgtcagcagattaacacagaaatcaccattcttaactgaaaagcaaacaggattgatcgttaacgaaaggtccaacttactgttggggtggagtattcttgtttcgaattgtacttttggagcctgattgggatagacacacggaatttcaatattgaccgtatagactccgggaaaactgaaacattttttcagaacaaaagaaaatgcatcctcactaaagcgatgttggcggtcccggtattttcaccttccaacgatagatctgaaaaatgcaatttaaataagaggaaaaggtgaagaacgtacattttcatcaacaacttgaatttggtgtccaaggtcgatcaatcgcaacaattcgtttcgcaaactcggccttcttcttgaaatcacacaggcacaaacaacaacaaaaacgctgaaagaaaaaaaaataaaaaagcaaaaaacaaaggaatcttcctaccaaataacgacagggacaagcgcccaaagtacgatttcgagaacagagaaacgagaaagccacaaaagtagaatttctagaattgagagaccagcagaaccgtgctccgttttctttgcttcaatttcaatttggtttgtagaatgagaagatacattctgagaatcgtttgagcagaagcagtgttggaaaaaaacaatagcaccacaattacaccggcaatattgaacagcggcgaaaaggtttggcgattcggtgacccacgaggaaaatctgaattttggattgaagtaaaaagcgcatctcaaaaaggcgggttctagtcggttttacgcgtcccatgacactttacgcgtcccatgacattttacgcgtcccatcacattttacgcgtcccaacaacactttacgcgtcccatcacactttacgcgtcccaacaacactttatgcgtcccatcatattttacgcgtcaaaaaatgtttttcgaacagtcaatcggaaactataccttccg

SEQ ID NO: 14944 - DNA, 2927 bp, Heterodera glycines
  unsure (1)..(2927): unsure at all n locations
aaaacagaatttaantcgctgggaaaaattcctaaaagaactaagtttacgattttgagcaaattttttgatgaaaattagagctttttgtagaaatctccaaggaaaaattttattttttaactaagtttattaagaaaatttttcaaatttttcttatttaaccaaaaatctatttatatagagaaaaaaatcagaaaaatttcctctaatttgtaagctaacttttgatgctgaacaaaaaaatcttttggaccaacatgatcagattactccttcatggcgatctgaacaccccaaaagatacagaaagtggggaaaattttagaaaaattcatagggtgtttggaaaatttttctggaaattttgattaagcctttcattataatttaagcgaaggagagaaaaaatagagatttttagccgtttttgcgacaaaaatgggttattttttgctattttggggtcaaaatttcaaaaataccggtaaaatgggggtccatccgccggtggtgccgacaggcgccgccgggaaaaatttttgcaattttgagtgaatttgttaacagattttgtccaaaatatgtcaaatcattggttaatttattggtctatggacgttttaaaaataaagaaaaataattttcaatgttaggaaattcttattaattaaatttcaattaaaattatcaaaacaaaatataaaaattctcctatcccagtggtgaattgaacttatgcaaaacaaaatgtatatgtattgtacaaaataataaaattatcataaataaatatttttttaatttaattatatataaacgacagacgaaaattgcgttgacttacaacaataacaacaaaaaatcgaaaacagtataaatttctcgaatagaaagcatttttcaaaatccatgcaaatttcgagaaaatatttatatttcaaatatttttcttcaaaagtatttttcttagaaatgttttaaaattctgttttttaaataatttacatcatgaaaaatcgacagaactgctggccaaaaaaggaaagtgaggctcaacaatttaaaaaaaaatacagtacaaaaaaacaaaacttcgttttcgttgtcgttggttgcactgctcccgcaaaatccgatgtaaatgcacatggactgatcatcacatcccttctgctccgatcagttcaccattgaactctcttcattttcattgtcgttgcactgctgttgttgttgttcttgtgctcttttccccattcatttttctgtccaatttccttggaatttcttttcgatcaaaattgcctgaattttcattgatttatgccattttcgtgcttttatgagcaaatggataaaacgatgtaaatttaatgaattcgactcacgcccattggcaagtccgtctccgtcagggctggagcgcgaccgcgatccgcgattcgcgggatttttttttgcgcgatccgcaggcgcggccgcggcaatttgaatacgcggtgcgcggccgcgggattttttttgcgcggcgtgccgcgcattttttggttgtaaaatttttataaagaaaatggtaaaaaattgaaaacagacaaaaaaatttgcacaaatttatgcttcttatttattcgttcatttttaaactgatattacaaaagacaggtaattattaattaatagggctcgaaattatatggactcaaaaacgtcaaatatggacaaaaagctcaaaaatggactaaaaactgctaaaatatatgctttaaacagtcaaaaattctaaaaatatgtgtttattcaatatttgcttaaaaataaacttaaaaagtacaataaacaaccaaaaaatggatttaaaacacaaaaatggtgaaacggatttattcccaaaaacccccaaaaatggatttttatggactaaaaaccttcacgaaatcaaaaaattttaacgcagaaatgccatttttgagcccctttcttcatagcatatgcgcaaaaaattatgttaatcatacaatttcgagccctagtaattaattgttaattgattattttaaacccagaatgataatccaatttacagtatgatgaaaagccatacagtacactcagtaaatggataagattaaaaagtcatacaaaaattgtaaacccaatttggtccgatcactccttcattgtgaccctgaaaacccgaaaattgcaagaattctgtaaaattgcgaatgtaggagtctatctttttttctgaaagttttaggttcgtggaattttgtctgaattttcccattttttgggtaaatttcgggttttcaggatgtccataagactggggtttttctgtatactgaatatggaagatagacaaaggatgggtaatgtaaaaatgactgctcaggtccattgggaaagttcgtccgataggaaagtaaaaggagcccataattgatttggcagacaagaactgaaattttaaaattttaaagaaaatatttttagagagaaggagagagggaagagagataaagtcagacagagaagagagaaagagagagagataaaggaagagagaaatggagagaccagagaaaaagagacataggaaagagaggagagagtgagccgagagagagagacccagacagagagataggaaagagacgagcgagagaaccggagcccgagagataaaggaagagtaaacgaagcgcgaaatccagcgaagagagaaagagagagacataaaggaagagcgccatggagagaacagacaaaaagagagataggaaagagaggagagagtgagagagagagacagaagagagacagagataggaaagagaggagagagcgaaacggagaaagagagataaaggaagagtaaaggaagagagaaatggagagaagagagaaagacagagaga

SEQ ID NO: 14945 - DNA, 2933 bp, Heterodera glycines
atcaaaaaaaaattcattttaaaaatttagtccatcagtatcctaaaataatttaattggcatcaaattttttagccttttgcgacaagtggccgatcaagcagctgagtcattatcacaaagcaaaagcaatgggaaggagcagcgaaatgcaaaaagagcataaaatgcaatttaaaaaatgttttgaaaaatttaattttattatttatgttgaaatttataaataaaaattgtgctaaattatttgtaaaaaatgtttaattttaaaaatagaaaattaaattaaattcagtagagcgttggaacacctacttacaggatagcttttattctttgacgtggaatttccaaatcaatttttgtgcggttctgatcattattgaaaaaaagagtatcaagttttgtaaaaatatgtaactaattgaaaatcgcaattaaaaaaaaattcaagtttttcaaagaaaaataaaaaagaatttatcggattaaaaaatttttttaaataaaaaacatttgtcttatcttttacataaagacatgaatgcatctgcttaatgcagggctcgcaagtttttttttcttcaaaataaggacaaacgaggttaaaactatgattttgaccccaaaataagatttttttaaaaacggctttttacattgtagatacaattaaaaacatggctaccaactgaaatttttcaaaagcggcatttggccaattaaaaaaaaatcattatttggtgtcaaaaattagcatttaggaaaattattccaaataaaaattcaataaaagtgtttttttttgcggcgcgattttttgttaggggaagcctgaaaataagaaaatagaaaaaggccaagatccggcccctccaaaaaggacaaatcttagaaaaaggacatttgcgagccctggcttaatgtcataggaacatgaattcgagccatccatcatacaagtaaacattcagtccctgtcatgataatagaccaacgttgtaagacctggtcaaaaaattgaaaattaaaaaaaaaaacttgagaataatagtggtgacttacaatgcagtaagctattcaaatccgcatcatcctcatccgcgaaaccacaatcagagtaacgactgacgagtgcttggcactcaaaaagcacagtctcgacctcaaataataataaattaaaataatgataatttaaaaaaatgttaaaaatttcatccaattttttaatgccaaaaattccaattactgtataacattaaattagccgcccgatagattgttgttttcaaaaatttgcagaagttatctttaggtccccttataagtcaataatttttcaatttttatttgtcaaaaaaaaattgctttaaaatcaatggaattcctttaagattttactctcaatgattattaaagcattcattgcccctccctgacgacaaatttgaaaaatggctcgctcaaagaacataaaattaattgattaatccaattaattttttaaatactttttattatttttgaaaatgatctgatattattcaagcattcttctttcaacttacaaaattttcgtcctcaatattggcattgagctcttcaaattgacgggcccctggtggcacggatgacaaatgttcgccataatttacaataactgaaaataattttttttttttgtgaggtttttaagtcctggatatgggctcagaaaaacccaaaaaaaaaatgaattttttgttttttttttaccagtgtaaatgcgacggacggcatccttttttttctcatcgtttttatatgctttaacaatagttttgagttctagcattttgtcggtgcattttttcgcctaaaaattttctgcattaattattaattaattatttaaattttttatacaattttttgcatgtgaattaaccaatggccaattttttcaatcagaaatttgtcaaatagaaatgacactcgacagtttgcccattttcggctaaatttgacaaagccagtcatttctaagagcagctctgctggaagaagttttggcattttctttttttttgacgggtgagtgagtaatttttagttttttggtggcacatttttcgttttattggaggataaatatgatggcatcattttccttatctgattagtctttaaaaaaaaggcaaattatgtgataaagaaaagacattgcggtaaaatcaaaagaaagcgaccccaaaatggaacagttcgtacccctctcccaccacgaaaatttttttacaagaaaatttaatttaaaaataaattaaaattttctagcgattttttcaatcaagaatgttcatgaattattatgcaaaaattttctaaaaaaaatcattaatttttttttcaaaagtttatttaaaaaaaaaccccgagggccgggggagaaacgatacggggcggcgaactgacccgatgctaacgcaaattaaaaaaaaccaaatcgaaaacttcgaattttgagtcttgttcgagttcgggattaggaattggttttccactgacacgaaattatttgtttagcccaaatgtaatctggctggcccgtcacaaaaagaatatttgcatatagtccattaaatttttcttttgattttaccgcaatgccttttttctttatcacacaatttgccccttttcatagacagaatagataaggaagatgatggcatcataattatcatcaaaaagtgccatccaaaaactaaaatttacttaccccgtcaaaaaaaaaagagaaatgccaacacttctttcagcggagatgctccgacggggaggaggaaatgttgtgcctaacccccccccccccccccccccctcgggggaactgggaccgccgaccccgacttttataactcaacccgagggtcgggattcttccctaa

SEQ ID NO: 14946 - DNA, 1412 bp, Heterodera glycines
aaattgaaactagaaaatttgaattttcggtattgttcgagttcgagttccggatttggaattggctcaaataaatgtcagattcttgaccagcaacccgccggaaaactcccagaaaataagttttcacgattgaaaccaatagtgttctttctcctctttgtttttaagaaaatctaaaatccattgattttaaacaaccgtcaaataattgttataaattatacataattagttatgtatgaataaaattgtaaaacggagcatttaaaatgaatacattggcagttgaaaaatgaaatgactaaatgatttttcccaaataaaagatcaaaaaagcaaaaaaaaaaaaaatcagtcagtcatcgacaaatttgtgcctaaatctttgaggggtacaaatgatttgtgatgaaaatccgtttactggcattttgccggttcggcaaaatgagtgtctcttaattataattttgctttttataaaaaacatggaccagagataattgtaaaaaagtttttaccttttcattctaattattatgtatttcattcactaaaactgtaattatgtagcttgaccgtaaaatgagggctcccggacttttcgacagaaaacaaaaaaatattggacttttcgacagtaaacataaaaacaaataatttttattaaaataaattatattgtttgtcagttttactaaatttcttataaattaacatactataatatgtattgctaaatcattatcactagagctaatatttttaggtttttacctaattttttttcctgagctctcagtgaccttaaacgcacgaaaaaatgtttttttgtagttgttaagcaatttttcgatttcttagcacctattttctagatttttattttttagcactttaaattaataaattttttccaaaaatctatgaataaaatggtaataaaaacgaaaaacgcacccccctaaaagtctatcaaaaatttcaaaaaatacatcttaagaaaagaaaattaaaaaaaaatcatctccatttatttgtttacattcttgaaaagaatttttgaatttaaaaattaagtatctcaataattatttgaattaatttgttgcttttggataaaattttaaaattttacacccctaaatttgaaacttaattacattttactgtcgaaaagtcccctccttaattttataatatttctgtcgaaaagtccggcgcccacaagcagcaggaggaggagaagcattcatccagctattttgcatcaccacatctgaagaagagaagaggaagaaactacagacaaaagtggtaatgaacatctttaccagggatgttgcgaatcgaaaaataaaatgcgaaatacgaataatacgaaactaaaataaaatacgaaatgcgaa

SEQ ID NO: 14947 - DNA, 3658 bp, Heterodera glycines
ataaaaaccccaaataaaacccataaaattctcctgatttttctccatttttaatgctttatttaatcaaaattggtcaaaccttaggccagatatgaattttcaaaatttaccccaaaatcccgagggtcaaaaaattgccaaaaaataaagaatttttaaaaaattccaaaaattctgaaacgtaaaacaaacatcatattcgtgatcagcacctcaaaataccccagaaaaaaatttttcaccctctttttcaacccaaaaaaaatttccgaaaatttctagggggcctagctcgaaaatttttgaaaatttccggccatataatacactattcgatagcattttaaaagctctacaattttgctctaaggcaatttttcgctaaaaccaaccctcaacgagttataggccagggactcaaatgtcccgctcaggccaaaaattttttctatttccgggaaaaaatcgaaatttttccgaaaaaaataccagtcgatagagctcgaaaaactatgttttggaagtggtctccgtttctctgggaaaaatcgttaaaaaatcctaaaattcaaaaacccgaaaaccgttttttaggcctagctcgaaaaattttcaaaattttcgaaattttaaaacttggttagatagcctttcaaatactacacatttttgctcagaaacaatttttcggtcaaagcaacccctggcgagttattcgcccggtactgaagtgtacattttgagcacacttcaattagccaagcgtgcaggccagggggtggctctaataaaaaaataaaaaataccagcatgtagaggacagttgtggggagtgccctctcagcgggcactttttgattcgggttttagaaaaaaagttaggggccctaaactgcaagaaaaagtgagaaatcggtccccgggactcagtcgtccgcgctgaatttttctctatagttttcccggatgctcctcaaaaagttgtaagacccttccactactttcagggcgctcccggccttcggccgggagaaaatggttttagcaacgaaactccttgtcaatataacgtatatattaactagcgggtgcgtgaaccgtcggatctggtacagggataaagcgcttcgcgctttgggagcttcgctacctagattagctctggttgtggagatttggaatttttaaaaaattatctgggacttttaggccgcttcgcggcctagaacgggcgctttgcgcccgttttttaaattttgttgggcttatacgggcgcttcgcgcccgtttctaaatttgttgggctattaaggccgcttcgcggcttcagacgggcgcttcgcgcccgtttctaaatttgttgggctattaagggcgcttcgcggcctaagatgggcgcttcgcgcccgtttctaaatttgttgggctattaaggccgcttcgcggcctcatacgggcgcttcgcgcccttttttagcctgttaggccgcttcgcggccttggacgggcgcttagcgcccgttatttaaattttgaggtacaaaagtgattagaagaggtgcaacagtgattaaagagtgattagaagaggtacaacagtgattaaaagaggtacaacagtaaattgaagaggtacaacagagattaagaaaggtaaaacagtgattagaagaggtacaaaagtgattaaagaggtacaaaagtgattataagatgtacaaacaatgatagaagaggtacaaacaatgattataagaggtacaacagtgattagaagaggtacaatcatggtttaaaatgaaataaataagaaaattgtattattggatgtattataaatgaatcaaattaaaaaaatcagaatccccaatcacacagggattctgaggtcttaagatgagtccaacagtgatcagaagaggtacaaaagtgattagaagaggtacaacatggtttaaaattaaataaataatgaaaagtttttataaaaatttaattcaaataaaaaaatgtaatttattattaataaaataaaaaatattttaaatgaataaaacaatgaaaatacgaaaaaaatggtagttattaattaaaaacaacgttggaaattattaattgaataattatttaatttgaaattaaattattttttttacaaattcaaaaaaaaataatgaaattctttaatttaaaaaaaaataaatttaaataatttaaaagaaatcttcaaattaattaaaaacagtcaaaataacccaaaaatgcacagaaaaatattgttacaccgtccggattcgaactttgccccccccccccaaaaatgatgcctcagaatccccaatcacacagggattctgaggtcttaacgatgtcaaaagtaaaatctgatcacgtattcgtgatcagcagcccaaataacccctaaagacatatttttggaagatttttgtgaaaaaaaaatttccgctcaaaaatcctatgcttcacccctttggtcccgaatctcaaaatcacttttatttttataaaaattcttaaaaaagtgataaaaatgccaaataaaatttatataatagagcaaaaaactgcggatttttgtagtattttatttttccagaatatcttttcagaaccgagttatgaatttttttctgaaaattcgaatttttccagaaattctggaataacttttttccttttttagatagaaaatccaaataaagtccataaaattctcctgatttttctctatttttaaggctttattcctgtaaaatttatcaacccttcgatttgttatgaattttcaaatattaggccaaaatcccgagggccaaaaaattgccaaatattttcgaatttttaaaaaattccaaaaattctgaaacttaaaatagacatcatattcgtactcagcaccttaaaaatacccagaaaaaaatttttcaccctctttttcaacccaaaaaaaatttccgaaaatttctagggggcctagcacgaaaatttttgaaaatttccggccatataatacactattcgatagcattttaaaagctctacaaaaatgttctaagacaatttttcgctaaaatcaacccctgacgagttatgggcccaggactcaaatgtcccgctcaggccaaaatttttttctatttccgggaaaaaaccgaaatttttccaaaaaaattaccagtcgatagaactcgaaaaatgatgttttggaagtggtctccgtttttcccagaaaaatcgttaaaaaatcataaaattcaaaaaccaaaaaaacgttttttaggcctaactcgaaaatttttgaaaattttcgaaattttaaaatttggaaaaatcgagctttcaaagctctacaataagtccgctggagccccctcgctcagatcaaaccctgacgcggtattcacctgggactgaagtggacaaagttggtactgaatttctcctattttctgcagcccttcctactataggtagaggcctggaattttttttgacttttagacaacacttcaacttaggttcctaccagcggaaagtttttgaatcgggatttagaaaaaaagttatgggccgtcaaacgcacgaaaaaatgagaaatcagtccctggtactcagttggcccttggaccggaaa

SEQ ID NO: 14948 - DNA, 2331 bp, Heterodera glycines
tggaagaaacattttgaatgggggaaagaataaaagagaaagaaaaaatggaaatagtgaaaatttattggcaaatgaaaggacaaaacccaaaataaggaagagaaaaattcaaaaatattgaaattaatcgactgaacattttcaaatggaagaaacaatttggagatgaattaaatgaggattaaaagattaaggagataaaatttccttccgttgttcgattttattctttacgaaaataaatggttttcttttttatacattttggtcatattttattactttatattagggttgctccccgacccatccggttgcaaaatgtcggaggccgggtaccccgatcgggtaagattaaaattttattttaacgaaaagaatctcaaggcatcccagccagggctgcacgcaattggatttgcagttacggaaatccgtaagtacggcgattttctcagttactgaaattcgtaatccgtaattacgggggtccaaaaaccccgtaatttcccgtaatccgtaatccgtaattttcaaaagtcaatttttgtcagaattttagaaaattttttcaaagtaaattaataaaaatccaaaacaaattttcgggatgcattttctttattttatatttcaattttacaaagaaattataattttatgtctgaaaaaattcattctttttgaatttttagggttcattttggaaaagtttttgaaagtctgataatataattgtatttatgtataaagttatttcaacattgataagaaccactagccagaaaaaatttcaggggggagagaacccaaagaatttttttggcctaaatttttttgtgttatttaaaaaatttcagagccggagagcaaaaacaggaattgtagccgtttttagccaaaaaggctaattaattttttcaaaagtgacaatttttcctggtaaaatttataatttttgatttccccgttcggcttctcactgcgctattttttatataaggtagcaattatgttaaaatttcaactcgatcgtttcacggtaaagaaaaagttacgaaaaaggagcaaaaaaagaagtaaatcaaaagaaaatatttttccttttttaaattttcctggtttatctcttgatgttttagatttttttaagttatttttttgttatttttattaattaatttatacactagcctagatagtgaaggtgctgctgtccaacccaaactaatggtcgagagaacgaggaaaagagggaaatagaattggggaaaggatgaaagagccaaagacccgggcccagggtggttggcctccccaaaatcagtcccaggaatgcgcattcgattggtgactcaatgagtggaggaaaagacaagagggagcagtactttattggccatgaaataaatacatctttaaaagataaaacgccaaaaggaaaaggcttaatctctctctatcattcgacggatcatcccaactgccggctcgccgaacagactctccgatcaactgccgctctcggggaaaagggataaaacagcaaggggaaaagggggcggaacataacatcataataggggaatgatcaaagatcaatgtcttctgcgcctcacataatttaaattaataccaaatggtcaaagtcaaaactgatcactacaagcacccaattatggcactaattatggacccttaggccctcctggtactttttatcattgttctttgtgactgaaaatatccaaattgcaagcacacattttgctgcacatccgctgacttccgtcgcttctgttccggcacaatctttggcacctaattatgccactaattatgggcaacaccacttatgccatcttcctggtacttttatcactttcttatatgtgataaacctaaatcaaattttaggcactcattttgtcgggaatcctccgatttccgcagcttcggctttgacaccaatttacggcatcagaaccaattatggccaacggcaaatggggcaattattttcctgaccgtcctccttaccatccgccgcagtgatcactggtgttgtcgtcgtcggatgattttggcaaaaggtaactgcagggaaatttgtgtgtgtttaatgaggcattaattagtgtctttatttatgcgttaattgactgacgaattcattaatttgttgtgacttcaactgtctgttgcttattctttacaaatttttgtgctttaacagaaaatattcatttccaattttggcattttctcatcacttttttgtttgatcatctgtggttttctttttgatcaaatcattttgtctcattt

SEQ ID NO: 14949 - DNA, 1498 bp, Heterodera glycines
  unsure (1)..(1498): unsure at all n locations
ccccccccccccctcgccgggcgtactttgcccccggcgatctgcgcacatcccaccaccaataccaaaaaaatgcatagaggagaactgccacncaatttttggtggtaagacttggccataaaatgtgtgttgaaaatttggcccgttcgatggcgcaaaatggcaaacacagcaaatttttttaatgatacccctaatgatgtcattagcgattggtctttgggaccatttttttttgatggattgtcttttttttctcgccaaattttctttcataaatttccaccttaaaaattgcatccaatttcaacgacgaactctaataacacccaaaaattctttgtgtcgtccgtccctttttgagaccggttttcgccatgtaccaccaacctttatcatcatccacccgttccaaaggcaatttttttttttgattaaaaaatgaggactttttggagactctccaacattgactaaagaaacttaatttagtcaaattaaaacgggtgcacttcatttcttgaaattttcaatcaaaaaaaatcttagcgttttttcaaaattttatatgaatattactaaattttcaaaaagtcgctacaaaatttttcaaaaattatttcttaaattttcatataaaaaacttcctattgttttgaaactaagtctttttaaatttcgggcagggaaaagacctgctccgaattaaaacagcctcaaatatgttcatggaaattttctttaaaaatgcataatttagcaaattaattttttttcaattgtttggcgcttcgctttaataaattttcaaattttcccacccatggagcctccgcctcctccctcaacaacaaatggtccatactgctccaactcgtcggtgccaatccgtcgtgcggacagtgccaaatcgtccgcctgtgttttgccaatttgtgcctcttcgtccggctgttactgctcgcccttcccctcctcatgctgtggcgacagaattgtcaaagtcaactcccgtcagccgctcaccaaactgcttgacgaggaggaggacaacgacagcacgacggaaaactccacaaccgtgttgtcatcgggccaacagtcaccgcctaccgtagctgcggtgccctgctgcccaagcagtggacggtcagagacggcaccggcacaacgttggtggcccccgctgtggcagcttgggcctctgctggtagccctgtggcggcatcgacgaatcgcgctcatttggctggcaccggtgctgctcgcaccgttgctgcacagtggtgagctggtgagtgctgtgtgtactgcttgatcttcacggaatttgggttgagctgctggtgcccaaaaaagcgccatttaccatactctgctgtattctttttccactgcagcttttttcaggacttgtccttggtcaaatccatatatctgaggtttaccggtgcgggggcttcagggcagaatgttgtgtaatatcactcgtcag

SEQ ID NO: 14950 - DNA, 863 bp, Heterodera glycines
acaaaagataagcaaaattgccaaaatatttaaaccaaaatcccagcccaagtcagcaaagacaaaattcaaagaccaaccacaatgttcaagtggtcccagaacaaatcgaccggaaaagatatttaaaacattttttatatgtaaatgaacaaaaatatcgaaattgtggccaataataaaatggcataaatggcgaacaatggcaaaatcatttatcctcgaaaaatcgtgtaaaagcgctcaaagttagcccgcattgatttgctttttcattgctttccgcctaacattcaaggatttagctttagcttcattcaaataggacaaaatgaattaattgacaaaaatttgcaaatttatttatgaaattgcaatttaattaaaataaatcaattaagttatatatttatatatttttattaatcgataatctttgttctgattgagtaccgtatatgctctaattatagcccatgggggattatttttcaaccttctcagaatacaggggataattagagactggggcataaattgagactgggggattataaattttcttggaaaaaaataaaaattctatttaccccccatgggggataaatgatattttggccacttttcgtacatattttttgcatccctgattatatgaaactatatttataacatttctaatttatgaattgttatttaaaattattattaagcaaataactgcttcattttaaagatataccaaaatcaattttatgcctctcaaaaactattaaaatatataattcatatcaaattattattttttatgctaatatccctaataaatccaaaattttaaaaacgagttaataataattttt

SEQ ID NO: 14951 - DNA, 2608 bp, Heterodera glycines
tgaattgggcaggagatgaagaaacattggcaaatgccttttacataaagggattatatgagcaacttaaacaatttgggcttggttagcaacagggacacgttttattaaaccgtaattaaaaatgacgcaattaaaatggtgctcaggaagagctccaaaatgctaggcttgtttgaccaggaaaacgaggggggggggcatttagcgggtcgggagcagggatggacgaaatttcgtttcgttttcgttttgtcctacattttcggcactttttgagtttcgttttcgtgtttcgttttcgtctaccaaagttttttcgtttcgttttcggtttcgtcagagcaaaattggatgaaaaaagtacgaaaaagcactggtaagaataggccccagtagtataaggccccgggggcgggggtccagacccctgcccctgcttaaaaaaacacccatttttgttcttcaggattttgtcccaggtgccggggtccaaatccatgagaggattaattaaattaattcatccagaggcagagggactcgaacccaagaggtctaatccaaagcactaccactgggtcagcgatacaactatccgaaaaaggataattagcaattatatatatataatttaaaatcgattaaataattcaccaacgggagggggattcgaacccaaaaggccaaatccaacgcacaaccaattgaccgaggaacatagtcatccgaaaaaggatatttgtcagttatgtagtaaaaaaaaagtgccgcaagagtcaaaaatggacgggagaggggatgcaggcgacattctcccttttgcctatataaagggatatttgtaagcaaaaaaagcacaaataaaaaaattttttaaatgttcaacgcaccgtttacattaattttatctggcgctacgggaagtggaaaaactcaatggctattgaaacttttaaaacattacagtatgctaatcgcaccgcctcctgtaaaaatactctattgttattccgagatgaacgattctgtgatcgggttaatgaaacaaggaattgagacacataatggggtaccgacccaaacgttggttcaaagtatgcccaaacccttacttttaatcctggacgacctgatgttgagtgtaaataacgattttttggatttattgttcacccgaggcttccataactgggatgtaagtgtgatttttgtaaaacaaagtctctacggacgcaatattcgtaccgcaagagccaacagccattatttggttttaacccggaatccttctggtcaacttcaggtcagaacggtgggttctcaattgtttccgaagaggctaaactattttatggaggcatacaacgatgcaaccagcgaaccattcagctatttggttatatatgcatcctaatgcgcccgagtctgaacgtttaacaactaaaatcttcccggatgaacagcgtgaggtgtaactaccaattgaataaagaaagggtataaaaggttgagaaaatctgtaattttcactacaaatgtatgaattcagtccatatataagtgaaaacgcagaattttaaaaaaaaatcgcctccacgaaatcggaaaaaaagaaaaacatccttctgcgagacacaacagccgaacaaatattaggacttgttgaaatttgtgcaaacatattaaaattcaatttcagcctaagcagaagccaaaggaaacgcttggccgaatacgcggactattatcgtgcaattgcacgctcgcgtagcgaaaagactgcgagaaaaatgctacaacagggaagtggtatagcattaggggcaatattagtgcctattcttggcgcactagctcaacacctggtcgaaaaaattacagcctaaaaggcgggagctaccaatgaaatatacaaaaaagatggtaccagagagcgagtatttggccctcattaatctacttaaagggagcagcggcgtatttcctcctctaaccgacgcgttacagggcgagaaaacgttgcttgatgtacagattcaaaagaatttggctgatccaaaaaataacgctgaaataaaatgaagcgtcactcatggttatataaacgtagacaccaactaaaagatattattgagaacaaacctcaaaaagtaattgttgagagtggctcagttacagcaccaaacgttgcgccgtatatgggcattcaaaaacaaatacaatcgaatacgaacacactacaccgcaattcgacttcaatccaatcaattggtgccgtaagtaagagcaataccgatgtagaagaggacacggacttttcaactgcttctgatcagtttgagcctgctgctgatgctactacttcgtcaaggaaaacgccgcaccaaaagacgccaaccatttcattaaggaccagcccgaagatttcccaaaaatgatggaaattatcgggaaggatcacaaaaaatcggtgtcaatgcaagcagcggagaaattttgactaatttcaataaacccgtttcaggctctcatttcaccgaattgttaaagcatttgacaggtaagcgcgaagatgtgcccagaggccatcgcttcttcattcagc

SEQ ID NO: 14952 - DNA, 2717 bp, Heterodera glycines
  unsure (1)..(2717): unsure at all n locations
agcagaaatttgaatgccaagtaacggaaaatgccntgggatgaccactccggtggactccacgttcagcttggcgtattttatggcactttcggtgatgtacacacattttgatgcncaaatgcaacttgcagccattccagcgatgatggaagtggggatcaacgagtaataactgaaaggggaagggaggacattttgaccaaatggaagataaatgggaaggcgaagaccgggggatgaaattggcagcgaagtaaagcacgtgaatgccaatgctcagcaccaaagtacgcttgcagccgagccgattgagcacaaacggcggcacaaatagagaggaaacggccaaagagaggtaaagcacactgaaagcggaacagaaagtgccgccgaggcacggcggactgaccaaagtgagtcggcacccatgtcgccgttgacggccgtctgaagagtttgcaggccgttgaagccggtgaaaaggaagagaaatgccaaagagaggacataaaatgagcgattaaaggcgcataagaaggtgtgctatttcagaccaacagatcagtgcggatcctccacttcatcgccttcagtttgggcccctccgtctcgcggaggatggccctgcgctctttccgaaattgtttcgccaaaattgcttgactgaaattgtgaaatcagccagaatgagtttggcaaaaagcacctgcccaggtacgggttcaacttttcgtccacgtcttcatccgtcgtgtccactgaggccaaaaatgagtgcatgtccaccaatcgcttcggcacgcgttcgccatgtcgcggcattcgcctccgcgagccgtgcaccggacagtacgggtcgtagacgtggacgcggaggggcgtctcggagccgcacagagcatcagccaaatgcgattcatccgtttgacgaaagagatgcgcactgcaaaagccgaacagaaaacgctgacagacgccggcggggaaaagtgccgtcgcaacggaaacgaacgcaaatgaccgaccgaccctttgtccttcgtccgcgcccgcctttccgctgctccgttaagcaattgtccgctcataattttccgcccgagcattggtgtctttgaattcgcctttttccgttcgaattcgcgcggacgtcgacaaaattcgtccaacggaagtggcgacaattccctcgtccggccaagcgaatgcaacggatcactgcgacgacgtttcattttgtccaagaaatatttaccgaattggcgcaaagagtcaatggctggtgacctgaagcggaagatgaacacagacaaatgctcaacgaatggtcggcttttctcttccctctctttctttcgtttttccttcccttcccttttccatttcttccctttcgcttttcgtttcctcttccttttccaactttcccttctcttctgtatttacttgcttcgactcttccgttttttcatcgcatttatcatttcgtgttcactctccgatcgctgcgtttcgtccaactcttcgagcagtatctgaacacgctgcaactgaccaccccacctccttctccgctcccctttcttcctccgcactcacatccgacccgcgtcctctcgctgatgaccccgaatgacttgtcccgccaaatgcggtgctactcattcgcttcccataaccttcaacgacaccgaccagtgcgttgccaatgtgtggactttcctcatcggagaccccttcattttcagccacggcattttcaccttcgactaatgaccaagcatttgcgtccattgatcaaaaattttattctttgaatataaaacatttaaacaaatgtgtagaatgattaatggaaaatgtaaaaatggaaataatggaaaatgaaaataagaatgccgtacaaaattgaaaaatacaattatgtatagcaagtcaagaaaacccaaattgcattcgattgcggaattgggattcattttttgtaccttactgctgaaccagacagtttaaatttgtaggaggattaagattccacagaatcaggcgggggttcgaccccaaatttggcctaagaaaaaccaaagaatgggaatttgtcagttcggagaacaaccaaactgctggtgagtgtccggcctttttccagccacaaaatatttctacgagggcatttgagcctttgaccaattgctaagattaaaccaaatgctcttcaaaatgtccaacggagaaggaaatcgatcagaggaataaatggcggggagagcttaagaaagcaaattgagagggcaataataaatttagtggggctaaatacataaaggggccaataaacaaatgggcagaggttataaaggaaaaaaggaggtaagaaacaatggctaacaaagagtaggaaaatgatgagatagatggttgtgaatccaatgtgggagtgatcagtgatcaccacattcaagcaagcattgtgctgcctttgttcgttctgtgcccaccgccgccggcgagtgttccccgtcgaccccacagttttcgtcccccttttcgggtttcttccgttctcttctcccatcctccatttctcttctttcgtcgacttccgtccgtccgatggtcccaattcatccgccgtcgattaccccccctccgtcgtccctttcttccgtttcgtctgtccctcctccggcgtcagtgcccaacgcacaaaactt

SEQ ID NO: 14953 - DNA, 1251 bp, Heterodera glycines
caaaggcagtaattaccccgtaccgtcgtttcccctcggattttttttttaaatttcggggggggggggggggggaaacgattcctctccggtttttcagtgattggttacacaaaagcaatttggaaaaataacatttaatttattttcgctcgtacctcataaaatgcgatgaccgcaagttggttgaacggatggccatttaacagttccaaactgctcgcgcgtaaataaaatcttaatcgaaatccaatggttgtcaaaatccatttgaaagtgttttcaaaacctccgtgcctccgaaaagtccttggccattgtctcctgctgattttgcactttgtaacgatgcaaatctcccaaataaattaagtgccgttgggccgagcgcaaaacgttcgtatcgtggataggtggatcggagttcgaaatggaacagtcagccaaatcttcagatggaaacccattttcgttggaaggccatcgcgaatacgatgagaaattcactccaaattttcgctcgtatttgtccagcaattcttcataaaagtcaatagcctacaaaaacaattaaaaataatatttatgttttgaacaaaataaaataatgtgaagtaattatgcgtaaaaattactttctcgctaaaactcgacctgttggaccaaactgagaaggtactgacggaacaccgacgaatgggggccggcacttccgctttgtttgcgcagagcttcgaccgctgaataaaagcaaactttccacagttcctgttcggcattcgttctgtgtttctgttccaaattgttgagaaggccatcggcataaagttgggccagggaaacgctgaaaacattcggaaaggcatttaattgcgattagttggaacagaatctgtagcagttagcatgaccataaataaacccgggtaatattagaaaacaagttttgaagttttctggctataacttttttgcaataaaccaattttttttttgaaattttattattcggcaatggcgcagttttgtggtttctgtgaaaaataaatttacaaatttaagcacatttctagggtagaaaaaagagatgaacacgaatctgaactcaattttgcaaaaacatcgatttatttttgacatcatacatgattattgcataaattattaataatgctaaaaatttgtttgtgggccttgaatggtaagcacaggagaatagccttaaaaaggagtaattaaatgtatgagaaa

SEQ ID NO: 14954 - DNA, 3130 bp, Heterodera glycines
tttagcggtggtcagcgtgtgccgttggacaagcaaacgccaaaactcactgaacagatgatcgagaagtggcaagttctgcccatcgacgtgccgcgtggcattgacacacagcgcgacaaagcaatgatacagaacgccaacccattttttcatgcgcactcagtgcgtgtcgaaacaaaaatgatgcaagccgaggcgcagcagctgttcccgccggcactcgccttcaccgcatccaatgagcaaattgagaaaattgagccgactaaccgtggcggtcagcataattataattaattaatgcacaattagcttttttgcgaatctcttgtttcttcttatcctagaatttttctgagaatttcataaaaaaatatctgaaaaagaaattttccagaaaaaaccgaaaatttcattttttttatagtttgaatgtgaaaatcttagctttaagtaaatttgtttgatagttatatatttgtaaaattaatttagaaaatttgaatatattttttttgccaattgtcatttaagaatgctttgtgtctatgtaatttggcaaccaaattataattattttaattaattctatatttatgaacccctaaatctccttcagttttggacttttcgttggctgcccgtggccaaccgttgccccgccgttacaccgtcccatgccaatttccaaaattctgggctgtcgtcatcgtccaatgcgctgtttccaaggaccaatgcaggtgagaaaacgattagtttgaatatacgtcgatgatttactgtatttggtcagatgtaagagatactgtaactttttttgagcggattaaacaaagcgatcaatcatcaactgtattctcgagtgcataacttttcttaaaagaaaaacttaagtgttcttggtatcattcggtagtttatagttagttctctaactgggtgtgcagttttgaaaaaattaagccttaaaaacatgatgaccaaaaaatttcataaaccagttttacatttctttataatatttttaaaaacatttttaaaaaagattaagttttaaatattgttaagtcttttcgaaaataagttttaaaatattaaatagtttttaaaaaattgtatatgtattctattatgttaaaaacatttacataagctatctaattgtgccaaaatataaaattttagcgtacttttaagtaaaattttgaatttatttttcccattttctgaccactttcgaaattattgaaaagataaatcacttaagaatgttctgcgaaagtttggtccggtgtgccaggtcgcgcggtgttcaaatggaattgccacagcggggcattgaccattttgatgacacgtcactgtgagttaagggtcaattcacggtcacagtttagggggcaaattccgttaatgattcacgcggaaattcaagtttcacgggctcaattccggtcgattcacatggcatttcacggtcactattcattgggaaaattcacgtcatatttcacgggatcatttcacggtcattattcatgggggcaattcacgtcacatttcacggtcactattcatgggggcaattcacgtcacatttcacggtcactattcatggggaaaattcacgtcatatttcacgggattatttcacgtcacatttcacggtcactattcatgggggcaattcacgtcacatttcacggtcactattcatgggggcaattcacgtcacatttcacggtcactattcatggggaaaattcacgtcatatttcacgggattatttcacgtcacatttcacggtcactattcatgggggcaattcacgtcacatttcacggtcactattcatggggaaaattcacgtcatatttcacgggatcatttcacggtcattattcatgggggcaattcacgtcacatttcacggtcactattcatgggggcaattcacgtcacatttcacggtcactattcatggggaaaattcacgtcatatttcacgggattatttcacgtcacattttatggggtcatttcacggtcacttttctcgggatcaattacggtcacgattcacggatttgctcagtcactgacaagactaaatttcttgtcgcctttatttaaaaaatgggcttttctaattgaatatgtgtttaataattttttaaacgcaaattaatagcatctttttccagtgagttcgtccgtgagcaattcggattttactcgaagcatcgtgtccgttttgttcttttcgttgcgcccggaaaggatgcgtcccatgccggtgatgtccaccatacgttcaaattgcaagaaattgaacatggtaagtgtttttctcttccttcttgtagtgatatgttcaagactcaaattcccgaaaatttaactcaaacaatagaggaagaaaatttcaattttgcgcgatgaaatttgaaattctttgcgggacggggatcccatggtcctcacaatttccattgaatgcgggattgcggactgggactccgtcccgcgccgggctcagaatgagtctataaaaacatgagactattctcgactcaatagaccgagagtcgtgaacattaccaccttcctacttcagttttctctctccctgctatctttttcactcttattcccctccattctctctctttttctctgccgtaattcatgtatcttcttttcctctctctcactctctctctctctttctctctctctctctttctctctatctctctctctctcacactctctcctactccattctttgactccccccattttcttctaaggaattgtgacccagcatgtttccccaaaaatcgtggacaaggccactggcccccggggtgccattatggttctggacaacatcatgctgaaaatgaatctgaaactgggcggcgctaattacgacatttgcacggcgcaggcattcaaacaggctaacggaatacgacacgacattgtgtaagtagtcattgatcagtcaggtgctaaacgattgcgttcctacaataaataaggcaataaataaccggtggtagttgagtgaaaaataattaccctaatgtatgaaatataaatatcattttgctttaa

SEQ ID NO: 14955 - DNA, 1705 bp, Heterodera glycines
caatttggaggtgtaaattaaaattattatattcctctcagaagaaaaccaatgaaaatagaagaaaggaacaatattaactaaaaaatattatttaggaaaatatttcaatacattagcataaatattaattttgaaaccttattttatcaaatgttctaaaaattgtaataaaagcatcatacttttcgaatcttcggaataattacctggtttggcgcgaataaaaaaagctaaaataatttaaggttcatccattcaatgcataaaacagaaaaatgagattttcgaaaaaaatttattcacaaatttcattgaaaattaattaccaactttgaggtgagcacgaaaaatcttaggatatagagaaagaaagaataaacaaacataaatataaaatgaaacccaattttgggtcaaatttttcaaaataaattttgagattggtggtccggcaatattactcagcgattaaataattcttgtaaatttattagtaatactcacttttgctcaattatgaactttgtacttgagtaaaaagagcataataaataaatataaatattaaaaattttaaaatcttgaagaataattttttaagaatagaaacataaactgaataatttaatattatgcttcaataataaatgcacaaataatctcaattctattacgccgtaatgtcgtcaaggaagaaaaactacccctaaataagcaggatgatcaattcaaattgaaacaaacaaaatgttttaaacaaattacataattatgccgaaatcattagcaataattaacaaaggataacataattatcatatttttcccatattataatttccactcaataaaattcatatttcctaataaataatttgtttttaaaaaaaaataaaattaaaggggtacttacttcatttttcatttaatttaagtagaaatttaaatataagaaaatttatagcctgtctaactgcctaaatttcaataaatttgttacaaaataaagaaattataaaagttgagtttttaaattcaaaggaaaaaagaaaggatgagataatgaaataagaaaattgagtttgaaataatgttcaattttatttccgcttttagtccttcagtttttattaaattttagaatgtttcttttctaaaatcaaacgaattttaattaaacaccgttttgcttaattatgtttttttgagttttttatatttaaaaaattaacagtttttaatttaaggtatttaatgtataacggaggatcttaataaaaatgcttttaaaaaatcaaaatcttaaaacaggacgggatcgggctcccgtgggattaaaattgattgaaaaagttgcctctgacaaaaaagaaaaatcagagaagaaattcatttttatcaaaaagaaaaataataattttgttaatcttttaaatcaatatcaactattttggataaatttaatatataaaattaaaaatttcagaaatatatgtaaataaaatttgaatatttgaacattcaagttaaaaaaataatatttaaacaaatcatgcatttgatttaaaagcgcgtaccgtgaccggaacgccgacatttgcgccgcggacatttgcgccacagacacttgcgccgcccagccaaatcgacatttgcgccgcagacacttgcgccgcccagccaaatcgacatttgcgccgca

SEQ ID NO: 14956 - DNA, 1488 bp, Heterodera glycines
gtttttaaattcaaaggaaaaaagaaagggatgagataatgaaattaggaaaattgagtttgaaattatgttcaattttatttcccgcttttagtccttcagtttttataaattttagaatgtttcttttctaaaatcaaacgaattttaattaaacaccgttttgcttaattatgtttttttgagttttttatatttaaaaaattaacagaattcattctccaaataattcattctccaaataattcaatccccaatgggtttcagatttaaacgtcggcaaaattccccaaatttgagtgagggagaggacattctcgcccgtattgaccggcttgaaaagttgttagaaggttcagggaatcccacactgaacccaatcatcgaacggctcgaaaagttggaaaggttggtggagcggctcgtggagggcgagaatcgatatggacatcgatttggtgacccccagcacacctcccccacttcggctcccacccccacaaacggcaattttcaatggggtcaaccgccgccttttgctggcaccggcgccgtgtcgcggatgataaccgacgccatcatcaactcagagcagctgaaggagaaggcaaatcgtgcggtcattgagaaattgccggaggcaatcgatgaacgggcactggtggatcaaattgccgaagaatgcggtgtcaaggacaaactttcgccagacattcatcgccacccaagaacgcggcctgatggaggggtaaaaaaggaccgaattctgaaagttccatttttggacaaattttcgcgagacaaatttatctataatttccgcaatgctctgaaaaaattgactaatttgccccaacatatcaaagtccgcagggacatgacccaaaacgaactcaaaattttatattcccttcggcaacaagcctatcaggccaatattgctgctggtgaatataaatattttgtggttgatttggaaatcaggtccctgaaaaacccccacccgctcagaactcgttagggacacgcgagcaaaccaaccgaaaaaaatagaaaaacggtaaaaaacaatccctggatttcttgccttttaataaatgcccgatcaatagcaaataaaatagctgatttagaacatttagctaaaaaatacaatccgtctataatcctaatcaatgagacctggttaaactccagaaatacggtagaagcggaacttacaataaattgtcaataccaaattgtttatgcaaaccgaacagaaaaaaagggcggaggatcggcaattctattaaaaacattgatcccttatcagacacttgggacaaaattccaatgcgaaattatacacattaattacttttgaaaaaaccaattcaaattataaatatatatcgtccacctgaattgtaccgttcagaatactaaaaagctattcaaatttattaaggatcaaagcgattccgaaaatatcatatactgtgggga

SEQ ID NO: 14957 - DNA, 3515 bp, Heterodera glycines
tggaagtgcatgtggcttttttcagcttcgacaaactcgtccccatcaatccggcaaatgatccattcgccaaaagagcgcattttgcgctcactttgcaagaaaattaaattggaagatggactaagcatcacagaaattgtaaaataaactaaaaagaccccatttcacaaaacgattatttgttaaggcgaagaaatgccccgaagcgatgtccggggctgaattggccggtttggtcaccgtaaattgatcattttatgaattgctttgaaaaaaactcaaaattgcagacagcatcaatgaatcgactgcgagagttaattgaaaaagcggaattggagggaataagcgatgcggaaatggcagcaaaagcgaactttgccctttccaaaaggcattttgacgacgcaattttggaaatgataaaaaactgatcaaaatttacaagttatttcattttatttatcgtttacttacaaaatggcagcataggaaataaatgagcactgatcaaaaataaaaatgcttttaaaatgttttgatcgcccccccccccctcccattgaattgttcctctgctgctgctgctcatttctcttctttaagcagttttgcgggttggggacatttggccattcgcagtgattttcaaatgctcttttttggcgcctttttcgtcgtttattttggcgtttagttccatattaagtgttggccaaaagccaaggcgttttatcaatttgctaacaaaaataacaaccaaaaatgcatttgtttgccttctctctcccttttacctgcacatttcgcgttgatttagcgtaaaaatgtgaattcccattgtgtgccctgccctgaaaatatcccggcacatatcgtaggccaattgtacggcataattctgaaccgctacagtgtcggtgccgattcggtcgagtgtctgctcaatttgtgcggggattggcacattggacaaatcggcaatttttttcaagctcgccgtactctttaagatggaatagacagaaaaaattattaaattaataattggatgaaaataccttaaacaacaaaatgccaggcaaaattgggacggaaattcccatgtttcgacaatcgacgcaaaactgttcaaacaaattggcatccaaaaagaattgagtgacgacgaagtcggcgccggcattgactttggccctgtcaaaagcgaaatttgaaatgcatttgacaaagttaaattgattatgctgcctcattaaactccattttaattgagttcgaccacctcaaatgttccatgcattgtctgtaagaaatatttttcatcggcggataaatgtgtcccgcaacggccaccgttagccgatcattgccaaaatatccgccggtctcttccaattctcgagtccatttgaccaaatcgatggcgaagtgttttgtgtttttggtgagaagctgctaatctcatagtatcgagattgttttcttttttgcccccccaccgtttgctccgttggcatgtcgtcccccctcagtgccataatattcgcaatgccatggctcaatgtttgcttcacatgactaatcgactcagtcctcgtgtgatcattgcagcagatatgcagcattgtgcgttctttgccgaaaatggccgcggtggcaatggcaatggccgacgaagaattcaatttggccaaatttcctgtgaagaataaatcagactaattgtaagcgtttgtagcttttttgaccatactaattgatcaatccttgtaattaccctcctctcacccgggtcatttcgtcttgaccaagtgatgtccacaaacagaggctgcgcctgcttcagatgatccaacatttcgaagaagtccgccaaatttttggggtgttctttcagcggagggtaaaattccaaagaaaagaaaggagcgcattggctgtgccggttgaagcggtcgttgatcacagaggctaacattgaactgatcggaaaagggggacaaagtccgatcggacggagagacggaccttagggagaggagaagaagcaaactgatcaattaatgataaaaaccaacaagcaaagatatttaggaaaatttgccttaaattgagttttggtaatttttatctttttccgtgggatacaaacggaattttcccactttaaaaattcatttaggagaatgaaagcacaaaaatatgttttacgacaaattaaattgagttaaaacaaaaataaacaaagaaaaaacagtgagggaaagtgtaaaatgaaaataaaataaggctgatgtaaaagtgtgatttgtttaaacggaagggaaaaaatgaacgaatttggaaaagaaattttaaaataattaaattctctcaaaaaattttggatgcttttaaattaataatagtgcataagaatgattcgaagcattcaattaataatctttatttgtttgagtattttcgacgcttttgggcggtgataggggggaagggggggggtatttaacgatggatgcgttgggttggttaatgtccgggtgggaaaacccccgtagataatttcccacccaaaattaatttggaggacggcaaaaagctctcacacactcagttcatgtgaaagtgaccggttttcatgaacattgagggaaatttgcaaattcgtttaaaaaaagccaccgaaaagttaaaattaatttcgaaaagcaaaaaaaaaagatttgtattaaataattattaataattgttagagaaagacatgaaaagtgacccaaagtaagtcaaaagtgccaaacctggcaataattgaagatttggttggagaaggcccaaaataagaaaaatggaaagttttaatgaaatcccaaaaataaattggatttaaaaaagtccataaaattctgatcacttccgatcaccctgctgatagactgatcttctgatcaccgtggggtaagtgattttttctgatctgaaaatataccatcatgtcaaatgcagaagtctaaggtttttaatgttttgtacttataatttaacagcaaatttgagacaaattttggcgaaaaaattcataaaaaaattcttctactctttttcaattttttttgtttgcttcttaatatttatggggcagattgagtcgattggaacggggctagtcgttatttaaaaaaaccatcattatgaaaatttttgtcgaaaaatatttataattttgctccaaatcaatcatatttttaattcttaatatcatttgatagccctaagtcttctgtatcagtctgcaaaattcaaaaaatttcgttaagtttcaaaaaagttatagctcgaggaactcaaaaacctgtgttttcgaacctttttggccatatctttttttaaagttaataaatttttttgaaatttacaggctcataaagaacgcttagttttatcgaatgatattaaggattaaaaatttaaaggttttagagcaaagttataagcacaaattttttattttg

SEQ ID NO: 14958 - DNA, 1646 bp, Heterodera glycines
  unsure (1)..(1646): unsure at all n locations
attttaatatttaaaatgaacaaaaattaaagcataattcatgacgccatttgcacttctctatgaaacagcaacaaataaataaattaatccatgcaaatactgaacgatttcttgtcctcccaactttgattccccgtaaaaacggtcgacaaattcaattggcacctcaccgatagaaaagccgcccttttttgcccgaaacatcatttccatctgaacgaaatgtgaaacaattaagaactaattaagggagggattaattgtaagacctgaaaaacgtatccctttgacactgattcgacgacgagttttgacaaaacggactttcgatagagacggaacgaaccagtcaagtcggagacgcccggctgaagaaggaactgaaaaacaaattataaaacgaattccattctcaaagtttccagggaatttacttgtgccaaaaagttggctcctcggctgatcattttccgtctaaagtcccacccggacactccgccgcccatcgcataacgcgttcccgtgacaatgtcatagccatgcttctcctgaagagtgaccatctccggaatatgcctcggatggtgggacaaatcggcgtccatcaaaatgacaaattcgccctgtgcttgtttaagcctcaaatcggaggagtctttcgggcacataaaaagctagtcaaaacaaacccaaaaacataggcacttcccaatccgagtttgccttccctcgtcaacaatttaattcttcccgctccaaattctttctgcaaactttttgcgacttcctatcaataaaaacggattacacaataaaatttggttttaccacctgtgttccgtctggactgttgtcatcgatgataatcacttcataactcagcccctttaaatatctaaaaatttataaaatgtttaaatggggatcattattagaaatttattgttttttctacttgattatcagccagagacaaatgggaaggttttcagcttcgttgtacctgaaaatacggaaaaatcatgaaaaatgacagaaaataagcaacaaacgtcggcagcaaaatggagaattttggagtcaaaaaagtgttttgctgctttcgtccattatcctgatgagaatcatccataatctgttgaaatacaagagtttaacaagaaaaaaagcacttttacctaattgaaattttaattacctaatttttttttaaattggcattttatccaatttcactaatctgaattactcttgcactcgctcttaatttgactttgcttttgcttgctttgcacttagaaacgtggaaaagaattttaatatgcttttgacattattgtttcttcgttgttcatttttgtcttaaaattgccttttagtcgtctttttcaaatgcctgattatgatgaaaccactgatcttcaactttgcttcaataaaactcattttcaacgttcggattttaacgtcgaacgatttgtgaatttggcaaggaaacgcgtgactttggatcagctgcaaaatgacctgcgaatttacttgcggcatctccaaaatttcatggttgaactgatcaatgatgattatgccgactttgntaacctttcttctggtttggctgctttgcgtgattcagtggaaaa

SEQ ID NO: 14959 - DNA, 2115 bp, Heterodera glycines
tgattcagtgggaaaaagtttcttcggatgttcgggtatcttcgcttaaaattggacttggcttccaaattataagacaaatgaaagaataaattcacatttagaccaattaaattttattgtaccaaatgaaattaaaattttattttttttaaagattaaaaaacattttcaaggcaaattggacttcgttcaccacttcgattgccgaaattgaaaaatgttcagatgcaattgagcaaaatttgtccactttggtccgctgccaaaaattgcaaatttgccaaggagacaaactcgcgctgcttcaatccattcagaatttatgtgcatttgtggagggaagggctgctgacgacgaaccaacacggaaagactgtgccaactcattatggtcggccggcacctctgttttatttttaaaaaataacaaaacaacccctaaaggtattcaaaattggccctgctcatttccgcagtcgaactttggtcatcacgagtcaaaagcgagcacattcagccgatatttcatgtaataattcagcaaaatattaacaaaacttacactatttacttttatagcaaatgaaaatcgattgttacagaaaaatcagcgaatttttgttggattcattggaaagggaagttttcggacattcaaaagaggtccaattgcaaaatattgtactcaaattgagtgcatttaattaatttagtgcgataatttgtccgttttggtcgcattaattaaaacgattaacgcaaatgaattggctatttgtcgtattgtcaacggtttggtggagaagaaaattgtgctgatcggcgaggtgaaaggacaaaaattagacaatttgttggaaaacgcattgaggcaaatcattgaggtgaatttttaaaaaaataacacggaatatttgtgaaaacaaaatttgatgaacaataacaaaaaatccaaaggcatttaattcatttttgaatttaaggtcaggaaaagctgtgccgaacgtgcaaaaaggaatgctcaatttactcgcgaagtggtcactttcatcgacacgtgtcttctcaatttcgtcagctctttccttgaagaggtaaagtccaaaatcccggattttagttaaaatctttgggctgttacccctgtttataacgcatcactcataaaatatacaaataattatagtacaaatattgtaaatctaatttaatctgtttaaacaaaataatatctgtgtttatggtataacatagaaatggtcagtaaagaccgtacacatgcagaattttctgtatcagcaagtcgataacattttccaggattaattgaatctgaaaactgaattgagattctcttaagaatacacttaattaatctattacattttattctctctccctctttctctctctcctctcactgtctctcccctttctctctctctctaatccccccccccccctttttccattattttcttcctttgtttgatgtttttgctgttgattttgacctgatttgtgtctgttgcgcatgtttcgtgtatgtaaatcactttgtttggatttgtgttcagcgatttgaacttttcttcgatgtattggatttggtcatcgtaagagtccgatcctttagggttttttttataattgccatttcaatttggctttgatttaccgcaataacttttgaacagacaaccgatggatgttttttttattttctccatgaacagatcagttttgttcagaaaaaggatgatggccgtttcatagaaccaccgcgaattgcacaccgatcggaacagtcgcatactttcgatcatccgattctgaaatgtggcagaatcgttttgcaattttattgtaataattgacaatgaatggtttcttttctaccgttctgtcgtcttcgtataatttctgatcgaattcgctgatggcaacaacaaataaaattgcatggacattctgttcgttaaacaattattacttccttttttctcttttccccgtctcttacgtcaaaacaatggatccatttcttccgttcgcttctttgtccgccgagaaggaacactcggaaattgactttctttatttcgaatttca

SEQ ID NO: 14960 - DNA, 1272 bp, Heterodera glycines
tttgtataattccaaggggaatttcagtaattacaattagtttgaacccatcctcccccccccccccactccttatttttgtttcgtttaccatgattatccaaaatatttcttcagcgtttttaatgggtcatttttcttatgttatcaatgaaaacggacttttcccggcataccattggacatgtttttcaactttcccatttctcaggcgaaaatgctccacgcgtacacccaacggaaggaggacctgaagtacttcaaggagaacgacgtcatggccaaactgcgcccgaaaaactttgccagggatttgtcaatgggcgacttcaattacttcccctgggggtattccttcggagcgcactgatttctgcggagtacagaaaacgaaggtggacaacgcatttgcgatgccaagcacagattaggacaatgtttgttgaaatgtaccattgctattatattttgtgggaagtaagagaaataaaaggctagccttaaattacgaattgcacaaagttcttttgggcaatagataaaaactttggctgagaaagcaaaaattcgtccggcgaagtttcgactgtcgtctttttgtactgttccgacccataaacgtcgtattgcaaaatttactttgagtgacttggtttttaaatttgtaaatttttaatattcctgtggtaccggcaggtgccaccgcagaattttgagaaatttgttacgaaagttactaattaaaaaattatcatttagtgggcaattgtcttgtcttccttctttttcccccttgtctctcttctaactcttttttctcatgtttgcttcttttctccagttgtctttctttcctcctcctctctctttctgcctttctctctcctcccctctctcctctctctctctctcctcactcactcgctctcccctctctctctctcgctctctcagtctctctctcgctctcttcgctctctctctctctctctcccctctctctctcttttcttacctccctctttctctctctctctctctcgctctctcagtctctctctcgctctcttcgctctctctctctctctcccctctctctctcttttcttacctccctctttctctctctctcactctctctgtctctctctctctctttctgcctttctctctcctcccatctctcctctttctctctcctcactctctcccccccccctctctctctctctctctctctttctctctcttctctctccctccccctctctc

SEQ ID NO: 14961 - DNA, 1342 bp, Heterodera glycines
ctctctccccctctctctctctcctcactcactcgctctcccctctctctctctcgctctctcagtctctctctcgctctcttcgctctctctctctctctctcccctctctctctcttttcttacctccctctttctctctctctctctctcgctctctcagtctctctctcgctctcttcgctctctctctctctctcccctctctctctcttttcttgcctccctctttctctctctctcgctctctcagtctctctctcactctctctgtctctctctctctttctgcctttctctctcctcccatctctcctctttctctctcctcactctctcccccccccctctctctctctctctctctctctctttctctctcttctctctctctccccctctctctctcccctctctctctctctctctctctctctcactctctctctctcgctttctctctctctctctctctctctctctctctctctctttctctctcttctctctctctccccctctctctctccccctctctctctctcctcactcactctctcactctctctctctcgctttctctctctctctttctgcctttctctctcccccctctctctctctcttttcttacctccctctttctctctctgtctgtttgtgtttttccttttctacctccccttgtttctttgccttcgtcttttccattatttttctttatttgttttttcgtaccattcggcgccattccctcccccatttttttgctccttcttttgcccacacaacacacacttctgttctgctgtcgttgtctgttgtctcttcgtttgccttttccttttgtttctctctctcttcccattttttctctctgtttttttttttggctttttccgttcgcttttaattttctttttgcgaatgcgttgagtgatttctgtgtgtattatagtatttcttctcatccaatgaatttcttattagtgtatttttttgtgtctgcggtggaattggcgccccggggaaattttgaaaaaatgtcgcaatccgcgggccctccccagcagctgaccacagctcataaccagggctcccagatcaaaattttcaaaagccttatttgcaaacaaaaaagttacaaaatttattcaaaacacgtttaaaatgttcaaatgttatatttttgattttccatgatcaatttgagcaattttttattagaaataagcattttgtgaaattctgagctctttaaagggaatgattttttgcggcacttttttcaaaaactctttaaagtaatgggccggcggtgccgataggcgccgccgggaaa

SEQ ID NO: 14962 - DNA, 313 bp, Heterodera glycines
  unsure (1)..(313): unsure at all n locations
cttaaaattcagcgtccgaattncaattttgcacaacaacactgttcgacagcgaccattttgtgaatggcgaataaaattggcgaacttttgagaaaaccatttggaaaattgtaatccccgctggccaaatgtccattttcggggtgacctgacattagaagaaattacttattattagggatataaattatatgggtcggggtcgttttcgtacaggccgttttcgtacgagcacaagtttttggctataacttttttctttgccaaccaaatccaacattgttggtgtcattcgatagccctatgtatc

SEQ ID NO: 14963 - DNA, 2563 bp, Heterodera glycines
  unsure (1)..(2563): unsure at all n locations
atggaaagaatttagagcaaacattaatcaataagttgggtgtgagtttcggtggcgcaaggagtaggaagcagaattgtcaaccgacaataagtaagtgagtagtataagtccgcaaatgtggtggtaagattttacccgcactattgtgcccttcgcagcgcgcgccggcgttcgccccctgacgtgcccattgtgggagagtgttgtgaccttcgcggcgcgcgtagccccatttttttgcgcgagttgcgcgctgatatttcacaaaaccatgcgagttataatatgattagtcgcgattatttgatttagtaaggttgcttttgtattcaatttacttagatatataataacatatttctgtagttatttatcttatagaaggggtaataaatagttcttgtactggttttttcaagtgctatcttgctgttcagctaattttatgtcatatccttcgtcggggtgttcggagtgtgtaatgctttttttttgtgaaatcattgatctgaagatgacagaggtcagaggacccccccccccctgttccacaaaatttttggaaaaagcgcgccgcaaaaaaagcgtttttaaagcagaaaaaaaggagtcgcaaattaggaaaatgatcagtgaaaactagagtggtacgggaccgggaattttgggaaaaaccgtgaccggtaattctcgcccagacccggtcccgacccaccgtagtgaaaacaaaaaaattggaaaaaattcattccggtgaaaaatacaaccatttttcattgcataaaataaaaattttaaatgtccttggatttcatgaattttccccactatgtccttgcaaatcggcatacccgtccttggaaaccgacattgggcgatcccatccctgactaagaagtattttattatattttatttattttgaagagttataaaaataaaactccttttgggattcgggaacaaagggatgtcacatatttcgagtggaaaatttattttcactaaaaacttgaattgaaacatcattctgaggaggttgaaaaataatcccccatgggggataaaaaaagcatatacggtacatatgtattttcaatttattgttataaataagcataaaaattgtgaattttcggaaaaaattggtttttttctggtttttatgaaaatttaacaaattttttggaaaattttggtgagattttcgttttgacactcttttaaaaacccaaattattaaatgattgtcaaacattatgccatttatcaaaatcacaaaatttaacagattctgctgacggtttcccacaaaagcctcaaagcctcattttgaaaatttagcctcattgacctatcaaaaaaccacaaaatgaggctaaagcctcatacctggagccctgattttttataaaaatagaaagaatattttttcgaaaaaataaaaattctatttatccccccgggcagataaatagagacggggagattatttttcaacctacttcgaaaggggtagatatttggagacgggcagattaattaagacggacatataattagagaaaatacggtatttgtcaatttttatgttacggatgatatcctcattggcatcttacccattattttgtttattttgtttattcataaaaaataaaaaagtcaacagaagggcgaaaaccacttactctgacgactattccggtaaatgtgtcgtagagtaagtgacaaaatatatggatgatcacaggaattaaaaaaagtacaaaaatatgtgaaaataaataataaataaattgagttcaaagtcaaatgaggtcaaaacataaaattaccaaatcacttagaaatttgttacattctagctttcccggtcttacatattaccctagtgaactttaagttttattttaaattgatttaaagaatttgtttttattagttctttatctagttgattccacaattttgttaccctcccagcaaagggaatgaattttttgcccagtttgtattttgtgttaaatctataaaaggggatgttaaagcgtgctgatggattaaaaattgaaaatagtttcagatctgttcggccataaacaattttatgcgccatgaacagatcaaacagttttcgcctattctcaagtgttggcagttgcaggtattctaatcgattttggtatggaattggcggaaggctgcatttaaaaaatacccttttggtgaaatatttttgacacttcgatttttttaatatttttttgaagagacggattccaaacctccggagcgtattccaataaaggcctaatataagttttgtataacgtaatccaaatcttagacgatttggatttaattattcgaaacaaggaacgcatacgtaaatacgcattccttgttatttggttaatatgatcggaaaattgtaatttgttatcaatgtttactcctaaatccctaattgtatccacagcatttattgtatttccatcaaatttatatgttttcttttgngttttttgaacccaatataatacaannagtttttgaa

SEQ ID NO: 14964 - DNA, 1109 bp, Heterodera glycines
  unsure (1)..(1109): unsure at all n locations
tattcattatttatttaatagtaagattttatttgtaattattttgctagtgaaactttaattttttaagcaaaggaaatccggtcattgtcataattagttttgggatttttagagattaatttttattagatttgtaaataatattttcaaatacagtcatggtcattatgtttagcatcaatggtattttatgggtcagtttataaaatttagtattagcactgatgctaaacatatgacaatgactgtatgactttttttcattaaaaatctatatgcctttaatatgttatttattatctgtcaatattcatgacttccgaaaaaataaattttcatggattttcagagaacaaagaattaaatgataggaattttaataataaaattatgaaagtacataattacatactaattcaaaaaccaaataacaaaaaagcaagggcaattaaacatgattactgattattaatattaaattaaaacaattttaattgccaaatttataacaagtttaaaaaataagtaaaatatattagaattttactttaatatttagacctataaaaattttattttaaatcataaattaagaatttgtaattatatttaaataaattgttatgaaattgctatataatcatattataaataatttccctatgttggagaagagcaaagtacattttctcatggtcacttatcgattgacatttgtccattccctcctccgttcctcccacatcacatttgttatttaaaggcgtggactcttcccccctcgttcacttcttctcctgtcttcacttttattattttattcattctccatccatccattcgccattttattgttatttgactcttcgtaaataaatcattttatttgttggtctttctcactcggacaaaagacacaacaaatttggcgcagtcagcagtcgtcttcaaccaacaagaagacacccggactgcacaccaacaaaaccaatagtccctagacgggtgaggtctgcaaatactgcagtttttcgccatcaacaaaaccaatagtccctagggaggtgaggtctgcatatattgcagntaatttgccgaaaaaccac

SEQ ID NO: 14965 - DNA, 1819 bp, Heterodera glycines
tggccattacgattttgaaatacggtacatcaacaccgcatcatttggccaggctgacgttctctcgcgcctcatcgccaattatccccgaccagaggaggatattttgatcgccaacatctgcaccgaaaccgagtgctacatcagcaccatgctgcaaaccaaaaccgaacaacttcccgtcactgcagacgagatcgcagaggcgacaccgaaagatgagattttaaagaaaattttggcattcacccaatcgaattggccaaagaaaagcagcgacccggacatcgcaccgtattttccgaaaagggaaaacattttggaaattgagggctgtttgctcttccaaaatcgcgttgtcatcccccaatcgcttcgcaaccgaatgctgaagtccctgcacatggcacatcccggaattgtgcgcatgaaagcactcgcccgccaacacgtctattggccgggcatggactcggaaattgaacggattgtccgtcagtgtgaagaatgccaaaaggcgcaaaaagcaccgatcaaggcaccgctcgccccttggactccaaccgacaaggtgttccaacgggtacacatcgattttgcgggaccatgccaagacggacatgtctacttcattttggtggactcattctccaaatggcctgaggtttaccaaatgaactcaatgacggccgcggcaaccgttttcacaatccgatcaatcatccaccgactcggcattccagacgaaatagtttcggataacggaactcaatttcgttcttccgaatttgcgtcactctgtaaggagttcggaattaagcacacttttacgccgccattccatccccaatgcaacggacaagtcgaacgtttcgtcgacactttcaaaagggcgatgatgaagtgcaaaggcgacaagaacagcctcgaaaaagtgctgctctcctacagatcaacgccaaattctgccatcgacggatattcgcctgatcagttgttccttggacggaaactccgcaccaaattggcacttgtccacccaaaaggacaaattgatcagtcggaaaaatttgaaaaaggtaagttcaaacagcatcaaaaggactactctgccaaaatggcacagcaattcgatcggaatcatggcacaaaagctattgagttcctcccaacggatcccgtcctgctcttgaattatcgtcttggaaaaagccattggcttccgggcacgattgtggaaaggctcaacaattcgcctacataccgtgtctacgttccaacactcggctgaattgtccatcggcatgccaaccagcttcagcgccgattggattttgaggacaattcaaattgggaaccccccattcaggaacaaatggtcaatgagccaaatcaaaggacaccgccacgccaaaacgcagcagccaatcaacggaccacacctgttgatgatcaggctcagcaaaaggctaaaagcccaatcggcgtccgacgttcacaacgcgtgccgaagccgatcaagcgattctcgccaggttgaaactgaggatgtttcaatctcgagaagggaggtgttggagaagagcaaagtacattttctcatggtcacttatcgattgacatttgtccattccctcctccgttcctcccacatcacatttgttatttaaaggcgtggactcttcccccctcgttcacttcttctcctgtcttcacttttattattttattcattctccatccatccattcgccattttattattttattgttatttgactcttcgtaaataaattattttatttgttggtctttctca

SEQ ID NO: 14966 - DNA, 3864 bp, Heterodera glycines
  unsure (1)..(3864): unsure at all n locations
tttttgatcaagcgcttccaattcctcagctgtttttttaagttcctcgaattttttgagtttctcttcgtaagcgttgcgactgcgcaggaattccacctaaaaacatcaagaaaataaggtgcattatttgctttatcctttcaattttggccatcaggatttagaaagctatggctcagtggtttttgtaagaaagtgcgaagaggggtggtggaggttcgagtcggcttcacgacattaatattttaattctttttttttcattttgatgtagtcccttgactacaagaaaaccctgtaatactgtcnggtggtaacccccccccccctccccttttaattaaaaaaaaaaattcgagattgtttttgtggttcggtttttaaggccggagaacctgattctaacatttcggcccattacgaacccctcatctacagtaagtattacgaaaacccctcctcatgtcaggaacaccttttccttcttgaaattatctataatttttgtacaaaccaaaagaattccccatttgggtcataataaatttcaaaaagttgaattgtttgttgttgtacctctgcacaaatttcgtcaaatgatttcaaatttgatgcctctcgtgaaatggaattgctttggactgacagctgacgacgtccaatggcacttttaaattcggatggcattttcatctgattgaactaaaaattggcattttcagaacagtgccaacacattttctcctcattgtaataaaaccttttgcttttgcaagtcttttcccgtcgccaaaaagtgaaccgaacgagaaaaggacgacaacaatttagaaaaagagcagcgattagcaagcgtattcatattgcgtaaaaaactgcagaacaacggatggattaatttcgaaaattaaatttaaaataatgtaaaagtcgtaatttgggtttggcatcaggccgagataagaacgcagggattgaaactcgttttgccgggaattgagtctcaaccctgggtcaaatcctgatattgccggggttccgatcctggcccttttttttaaaaacctagaccgggacccagaaaatcctgcaggatccatccagatctaatccgggctctaattagcaactcattgaaaagaaaagcaacgaaaaaaagttgaaatttttaaataagtttaattaaaattaaaacgccataaatttgatttctcaagcgcaattttcaaattataaagaaaagtaacaaccccaaatctggccattattttgtctaataaaaattaaaaaacaacaatcaaatacgcccgcttttgactttcattgcataagcaaatctgtgccccgtattgagtttctcacaggccactgagacacatgcaataaaccagggcttcgatcttaaaatttttaaaatcctcatttcagccataaaaaatcctcatttgccactaaaatacctcaaaaaatcctcatttggcatgaaaattcctcatttttttaaacatcataaattgcgaacaaaattagttaactgtcatacttttcgtttgaaacaatcaaattcatcaatttcttgctttcatggacggtaaaaaaggaaaaaaagcgccaataaatatttttatggataattattggcgttctgttacatttactttttatctttgtttctctcaattttatgtactatcttgccttattttcgttttttagtttgatcacatttgatcagccataacttgcttcattcccaactaaactgaacaaatttgatatctaaaaaaagtttatgaaaagaagaatcttttgttaagcgaatgctaagcaatttgacatatcagaaaaaagttgtaagaatttcaaatttttatcaggttataactcaagtcctaaactgtggatttcaaccaaaatgcggaaaataatcatttctatattgattctaaatgtctaaagtgtttttgtacctttacaaccaaaagtattagaattttcgaatttggtgtttttcgtgtgttagagatgtgaaaatagtacgccaaaaggagagaaaaagaaagacttttttatgttttatgttgtaacttttgagtttaactatagaaagaattaaattcactatagaaagatgcagaattcttttctctatcgatttgctaaatttggtgaggatttaacatcaggaaaaaaaagttaattattaagaatgaagagatagtacataaaattgagaaataaagataaaaaagaaaaatgacagaacgccagtaatcaccaataaaaatatttattgccgcttttttttcttttttaccgtccatgatttataagcattttatggagtctgagcacggaaaatcgaagttgcaatacagtataaataataggcaataatggaccaaacgataatgaaacagcaacacacataaataaaaaagattcgatcgcgccttttcattttttgttcctgctcgtcagctttgcgactgcgctgcaaatccgcctaaaaaataaagaaaaaaatgcatattatctcttatacatcctttcaatttggcctccaaattttcaaggtcggagaatccgattttaacacacatatttcagcctattacgaacccatgaccagggattctagcaaaaatttgaaatttaatttttcgtcaaaaattcaaaatacgcaacaaaaccgtgaagcctaagcttgggcctaagcgtaagcctaggctaaagtccttgaatttttagtttcgaattttgttcaagttcggatcaggggttcggtattctgaaaaattaaggtcatactcgttaatcagcgccacaaattaccatagaaaagagaattttatttaaaaatttgaataccaaggaaccactggcatatttccaaagaacaagtttttggtcgagcgcttccaaatccgcagcgatttttttgagttcctcgaatcttttgatttccgcttcgccaaatttgcgattgcgttgcaattccaactaaaaaattgaaaaaataaggtacacgaatttatttttactagaaaacccggtgatattgtcgatggtagccccattttcgtaaaaaagaaaaatttaaaaaaaaatttcgagacttgttttttgggttttgaatttttgttcgatttcaggattcgaaatggattgtcagccatgggttctgcgaccctgaaaaccacaaatttttttcttttttagacaaacaaatttttgatcgagcgcttccaaatccgcagcggtttttttgagttcctcgaattttttgagtttctcttcgtaagctttgcgtacgcgctgcaaatccgcctaaaaattaagaaaataaggtgacttttactttacttaaacatagagttgagcgggaccgggaattttgggcaaacccggaaccggggacctattcgggttgaaaacccgggaaaacaccgggactagtcccggtcaaaatcgggacttcggtactcagttgtccgtgttcaggtcccggtcccgctcaattctacttaaacatttaattttggccacaaaattcagaaagctgtagctcatttgtcagtgggttttgcaagaaagtgggaagagggggtggcggaggttcgagcccgcctcaccacaacatcaatattttttatgccctggggcataataattcaaaaaagttgaattgtgtatgtacctcagtacaaagttcgtcaaatgatttcaaatttgatgcctctcgtgaaatggaattgctttggactgacagctgacgacgtacaacggcacttttaaaatcggatggcattttcttcggattgaactaaaaattggcattttcagaaccagtgccaacac

SEQ ID NO: 14967 - DNA, 3743 bp, Heterodera glycines
ctgatctccagcttaggccttccatggttggcttagtcattggctctttgctcgtcggcgccgcttttggtgcttttttcggtggacacttttcggacaaatttgggcggtataaagtgacctttgtcaacgcatttatgttcattttcggcacccttttgtccgctttggctccgagttttgaggttgttgttccctctgctgttttgggcttcacccccttcgtcaggtgatgctcttctcccgggtactgctcggcctcgctgttggctgtgcttctgccacagtgcctgtgttcctagccgagctggcgccatctgagaagcgtggccagatggtaactcggaatgagctgatgtgtgtgacgggacagcttatcgcctttctcagcaacgcaattcttggcaatgtttgggctgacaatttgcacatttggcgctggatgctcgttttggcaattgttccagcatttgtgcttcttttcggcacttgggcctttgttccggaaagcccacgatggcttatggcttcgaacctgcataatgaagcatttgaagtgctgaaaagcatcagaaccaacgaagaacaggcgaaagcagagcttgaagaggtgcagcaacttatagacgaggaccgcaaactgcaccaaaacgagacaattagtcaaataatttcagagaggtgcctcctctaattgccatctgagattccttttaaccctcgaagatgggcccgccaatgcctttttattggccttggcaccgcactgtgccaacaagtcactggggtcaatgcaattatgttctacgggacggaaattctgcagaagagtggcatgtccaacaaagctgcgctgatcgccaacatcagcaacggagtggtctctctgctggcgactttcgttggcatttggctgctcagtcgcagctgccgacggcctatgctaatgtgggctcagttcggcacagtcattgtccatctgatcatcggattttgcaaccttttcatgcatgaaggttttctcaagggcaccgtgattctgactttgtgtgtcgtatttcttgcctttcaacaggtctttcccccccccccccgacccttttaaaattgcatttccgtccttagggctctatttcgccggttacttggctaattttggccgaaattttccccttgcgcattcgcggcatcggcatcagtctgactacattcgtcctttggctgatgatgtccttcattggcattctgttccccattttggctgagtccgtcggcgtttccgccactttcttcgctttttccgctttcaacgtttttgctttacttttctccattttttggctacccgaaacacgcggaaagtcgctggaagagctcgagaaggaatttaaaagtgaagattgggaaaagttaaaacgagcgggcgacttcaacttcgatgagaacggttctgaccaatcggacggaccaaaggacgcgccgttgcggtacgggtcggacagagagaggacggagttggggagaaatgccgaaaacggaagagccaatgggaggagaagcgacgaatagcagcgaatgccatgccgatgacaaaagttgatttctattctctatgttgtacatacggaacaaagaaaatttttagctattaaaatagtgaaagctcaatggcaaagggacaaagggagggaaaagggagtgactaatgggggaggggaggcaatggcaaaggggggagagggcactgacggcggagaagggattgtcctccgctgattgagtctcgggatttccaattggccttctctcctcgtctgcagttccttttccctttttttgccatttatccatcgattgggtcaatgcttttcctcggctgctccgccctttgcccactctttcgttttgcttttccaatctgtccgctaatgtccctcgccttggttaatttattccttctcacttcccttttccaaaatgggtttgtttctttgacataaattttaatgtttttacttatcataattgcatcattttatacaaatgatccgacccaacattgttcttctgatcactgacgatcaggacattgaattgggttccatggcatttatgccgaagacattacgcctcctccagcaacgcgggacggagtttcggaacgcttttgtgtcgacgccaatttgttgtccaagcagaagcaccattctcaccggtctctacgcgcacaatcataaagtgatgaccaacaacggaaattgtgcaggcgaagaatggaggcaattagggggggggggggagagaatgacattggcaataaaattgagcagtccaatgctaaggtctgacttcgaaaaggacactttcgcggtgtacttggaaagaaccggcttcttgacgggctttttcggcaagtatttgaacaattacgacggaagttgggtgcctcccgggtggacgaaatgggccgcgttggtgcgcaacagtcgatattacaattactcgcttaacaaaaacggacacaatgaatggcacggaaatcgttacgaaaatgtcggtccggcgattctgcggaatgaaagagacgtttaggactacttgaccaacttggtggccaacctttcgctgcaattcatcgacgagtctgttttgctgaacccccacgggcagccattcctcgtcgtcctcagtttccccgctccccatgggccagaagacccagcaccgcaatttgccgaccttttcgaaggggtggaaacgcatcggtagggacgaaaagaaaccacagctaattgagcacaaaggactgattcgtggaactacgcgcccaacccggacaaacaatggctgctgaaaaggacggggaaaatggagccgattcacgtggcattcaccgaccaaaagcaccggcgaaggctgcaaacgctgcaaagtgttgacgatgccgtgaacagagtgccgctgggcattacaaggtcagggctaatgaccttcatttagctcgtccaacaccttcgcttccttaaccgactccacaacacttttattttgtacaccagcgaccatggctatcatttaggccaatttggacttgtcaagggcaaatccatgccgtacgaatttgacattcgcgtgccattacttatgcggggaccaggaataccacgcgggaaaatgtgtaaaatttgacgggaatttactgtaacacattttaatgttttgtagaattcgatccgttgtatccaacattgacattgctcccacaattttggacattgcggggctaaataatgccaaattggatggacgatcaatgctggaattagacgaaatcaatggcataaataggagaaaaaaaatggcatggcgtgaaacggtgcttattgaaagagggtaaaccaaaaaggagggggggggtaattggaaattttggaatttgcatttagtaaaatgccaaagttaaaacgaatcggagagagactgaagcaacagaaagaagggttgagcagaaagaagctgattcagagggaatgcgacaagtcaaagaggggcagcagcagaagcagcggaaagagttgtggcaaaagcaaaagggtcagaaaaaggagtcgctggcaatgtgccaaagacgcacacggaaaatggcacattattcgctgtcctctctcagaagaagaagacaaattatgtgaatgtgaagaggagagaaagagaggaaagagagagaaggacgcaagggatga

SEQ ID NO: 14968 - DNA, 2825 bp, Heterodera glycines
cagaccaagtagttgaagaacaattttttgccatacagtatcacaagctcttatcaaaagaggtttctgaaattctgattgagatccgtaccaatagcggcatcttgatgccattccaatacggaacatgtacattaacattacactttagaaaaatgtcctatttttaaatgatgaacacgttggaaattaacaaaacattgacaagaaacaacgtgactcgccactactatcttggttgttttgcagcagatcaaatacccgccggtgcaattgtcaaatttccccactgtatggtggttaatcttgaccccagcacatcacatggttctcattgggtgggcatatattgcgcttctcctttgcatttggagtattatgactcattggggttgtggccaccgcccagttttcacattgttgaccatttgtcacgctacaaacaaattgaatatagctctcttccccttcagtctgccaactcaagtgcgtgtggtcgacatgtcattttctttttgtttgtcgatgtgttggaatgacctttgaaaaaattgtcagctttttgcactttggaaagatgcaaccggataagctcgtaaacaattttataaaaagcataattttcaaagaatataaataataacaaacagcgaaagtatcaattaaagatgcatgttgattttgatcctctacaagtggattggtccacattctcgtccgagtatgtgcaatttggtggatacaacatttatcgggggttgccctatcagcgtggagcgggagttggcgcagtgttcagaagtcttatgagatacttgctgccgattggaaagcaaattggctacgcaattggatgtcagggaatggaaagcggaaatcgagtattcaccaacgtgctagagggaaaagacctcaaagagtctctcgtaagtgagagtaaggcaggactaaagaatcttctcgaaaaagcagccaacaacataaacatcagaagggtcaaggttttgattttaagcgatacaaaaaagactcggctcccaaaattggaaaaataaaacgaaaaaatataataaacttcaatcgttaatcgggccaccaatggttgatgagaccaaaaataaacgtctgcgtgttgactcattaggatcctattaaaaaatgacttgcccacaaaaaatcagcatcagcagtcccctagcaattaacagtggtctgaacattttctcagttcccccgaccaaagtgtctgttgtacgttctttctttcgttaggtgcttccgctagcaacaatcacgcaagaatcgccttacctatttcggctttacagtgacaatttgtggaccgatttatcgcgggtctatctttatctcgaactgtccattgaaaaaccgggagcaaacgataaatggattgctatagaggacgcggatactagtgtctctgccattcaagggattggtcaaacatttgtccagcaactaaaagttacggttggcaatacggaagtatacgatagcggaaacctatacccattcaaggcctatatcaccaatgagttaagctttccaataaatgccaagaaaaattttcttggttcaacagggtattattacaccgtaaaccaagatgactcaacagacgaggggttcaaagaacgttgtaagatctttaagggtggaaaaaatgcgcaattcctctcccgtctcgactttgatttgggaaaccaggagctttatctcttaaacaatttggacttgctgttcacaatttacaaagccaaagatgtctttctcttgcaaactttaaaagccaacgattcaaccaaatatcgtttgacagttcacgatgtcaagatttatgccaaaatggttgaggtacaaccttcactaaacatgagcctttacaaaacacttgagaaacaacccgccacgtacgcagtacgcaagaccgaaatcaaatcgtcattcatcagcgtcggtcgatacgaatttgagtataatgtcttcagcgcgaccattcctcggcgcgtgacaatcgcgttagttggaaattcagcatttcacggcgactacaaactgagtccattcatgtttgagccgtttgatttgcgtgaaatttcggtacatgccggtggggtggtctacccagctgttccttataaactaaatttttcaaaggatcactttgtcagtgcctttgttgacatgtatgaggcactcggaatggccaattcagaacgttcatttgacatttcaatgacccagttcaagaaaggatggaccttttttctgatcccattgacatccacgcttgacgacagctgtggatttgagctgttgagaagcggtacgacaaacgtacgagcaacattcaattcaccaattccacttggtggcgtggagatgattgtcttgggtgaattcgaccaaatgattatggttgattataatcggcacattgtgaccgactcaaagcttggataaaatataaataaaataaaaaaaaaaaagattattatgtaattttaaaaaatgaataacacaaatacaacgaaacccgccatccaaattttgaattctccgggtgaccaaaatgaaaccctttttcatgtactacttttttcttattatcttcttgcatttcctgtgtttttgcttttttggttcattttaattaggtggcttaaaagtcacggtcacttaacgccaagcgaggccgagacagtaatggaagagatgaaaaataacccccgacaaccaccaatattttttgcggcaaaatgacgcagaggttagagaaaacagacactgaactattctcttca

SEQ ID NO: 14969 - DNA, 2065 bp, Heterodera glycines
ggtcttgaatgatataatttttttattgaatctttattttgccataatgaagtttgccccgcccctttttttgaaaaaatttccatatgaaacaagttccctgagggtttttcaggtccctgatcacgaatccagaatcaatttcgaccaattcctaatcccggacccaaattcgaacagaaatatctaatttcgcttctttggtctaaaaaggctaataatatttatttcaaaataagtattaccatcgtttatgttatttggcgcacttttgaatctgacattccaaaacaatgcacaggtgggacacgacgaagaaagagccgaaatccatcttcaaaactgacgagacgttgggcctgcgacaattgccgacgctgctcgaatattcactgacccaaggacgccatgtggaggggcgaagagtggacttggacgaacaattcttgagcgtggagtacgtcattaatttctttctgaagcgccagttaaatctgttctgatgcggtgctatgcccaattaactgtgatagttctgtgatatgaacatgtgttgtatatatgtaatatatattatgtatttaatttcgattgtatatgtatattgtaattaaccgtattgtacataatttgctaattcacttgcattgtcgagatttatacagaatgaactaataattcgactatgtgattaaaaactaccaaaaatctttaaacgattattaaataatatttttcgttgcatttaacttatccattttccctgttacttgcgtttcttaattcttctaattagtgcgtaattgcacttacatacatatttgttagatcgtctaggtgcacactagagaccggacaggatcgggatcccgacctcgggatccgtcccgagcgattttccaaaatgttcgggattgatcgggttcgggatttcatcgggatccctcccgaccatttaccaatcccgcgggattgaactcacgataatttttcgaaaagtctccattttataattaagatcttgaatttttaattaaaaaatattgtaatttgctaatttttcttaaaaaatcccttaaaaatgccaaaaaaatttacgggtctccaaaatttcactaaaattctcaaaatttgacgcaaaatttggccattttgtgactttttccaaaaaagaattatcaaaaattattttttttaattcttaaaacattattctaaatcttattagcaggactgcaaaaaatatgaacgaagtgttgccaaaatatctcctgaaaatgcaccaaatatgaacaaaaaaaaacttgaaaattaggctcccggacaatccgtcagtaactaatctataagcaaatttattttaaaacacccagctttgtttgtaatcatgtgaaaattaatttaagtcgctaaaatcctgaattaataatttgtgttattttaaaaaaattatgaatttaaaaagaattaattgattattctcgatatggcaattaattgaagcatgaagtaactagaaatgttaagaagctataaaaaatttacatttattatatttaacaattattttcgcaaggtttttgatcattgctcaaaaaaaatttgctgacggattgtccattactgacgaattgtccttcactgacggattgaccactgacggattgtccggaccccgaaaattaggggtgcaaattaatttaaaaattttattcctcataattttatcggtttttttgcaattgcaaatcaaaaatttcacaaggttttcgacagtgaagctcactgttgatccactcgcgcatccattcaaatttggatttaattttaggcaatcaaaaattttttcctaagagtgcgcaaacacaaaaaagaaagtgtttttcctactattcagagcatggagaagccaggaaaaaatatgcatttgcatattttttgcagccctgcttattaggtagttttatggcacaacgatttctaagaattttgtccaaaaatcagaataaaaattgttgtctaggtatttttccttcggtgcctatcggcatcaccagacccaaga

SEQ ID NO: 14970 - DNA, 1469 bp, Heterodera glycines
  unsure (1)..(1469): unsure at all n locations
agacgtttgaagcgaaaaaaacgggcaaaaaaggacccaaatgcgcccaaaagagcgctgtgagtttatttcgaggaaaacagttttatttaaaaaattttttataacccccaaaaatttttaaataatttttctaattgtaagggtattttggatgaaaagtcctaccacaattttttatgcattttcctccttttctgctttaggtcggccttcttctttttctcgaatgagaagcgtcaggaagtgtccggagagcatcccgaatggaaagtcgggcaaattgcgcaggaactcggcgttcgttggaaggcactttcggacgaagagcgcgcgatttacgaaaagaaagcccaggaggacaaagagcgatacgctgaggtgagagagaaaggagaacacaacggacgcaccccaaattaaaggacaaatttcaaatatttttttagtctttgacagattttggctaaaaaaccattcagattttttggcatattttggaaaattataaggccattggtggtccagaggctattcttattattagccatttaagaaaaaacaagtgatcagaaaaattaaatttaaatgcgcacggaaatgttgcacttaaattcttctttcaaattttgtcacttatttctctctaaaatggttaattttaacaaaaagtaaaatgttttcagtcggatggatttgaaattgacttttcctagggaaatggggaacgattgtcaactgttccgggttttcacgactttttaatcgctaaagcatcttttccattactttttgctgcaggaaatgcgtgcctatcgcaacgattctgctctgtcgtccggcacttgtcagaagccctcttacctggagggagggccgtccatggtcaaaacacccaatccgagaggattaaacaaaacaaaatgtccagttgattcagaccactgctgagcatgtgctgcagtcgcagggcggtgctcacgtggtgagcacatcggcgggcggacagccgcaaatggtcattctgcaacagcaaccgcagcagggacagccagggacgcagttgccaatgcaaatcttggtaatacaatccaatctagtgcattcattggccattttcagcattacaataagcagagtaaacgggagggattccccctccccccttggagtcagttcccccgcttggttaaaaaacatgtcttgggattggtccgtttattcgtcgttgttaaggaagagcacgtcagctcggcgtcagcggcacagcaatgcgcgacacagcagcacgcgtgaaagggtggaagaacaaaaagaaagaagaaaaataaatcctcatactctcccaccccaaaataatcaaaggccgtgctcttcccctccctcctccttttgtcgcattctcttttaccatattattattataacacatccattcgctcgcgttttattatattccctnattttat

SEQ ID NO: 14971 - DNA, 2151 bp, Heterodera glycines
atcagggctggccgtgattgaatttccaatcacggaaatccgtgagccgtgatcacggggctttaaaaaaaatccgtgacccttgaaccgtgatcacggcaccccaaaatccccgtgatttccgtgatccgtgagccgtgattataaaaaaaaattttctaatgattttttatttaaatttatttaaaaaacggaatttaatcgcgggaaaaattcccaaaaaatgttttaaagaaaccaaaacatataaaccgctttttttgcggcgaccttttccaaaaaatgactaagtttacgatttttggcaattttttgaggaaaattagagctttttgtagaaatctccaaggaaaattttttatttttaactaatttattaagaaaatttttcaaatttttcttaaatttaaccaaaaatctatttatgtagagaaaaaaaatttcctctaatttgtaagctaacttttgatgctgaaaaaatcttttggaccaacatgctcagtccttcatgacgatctgaacaccccaaaagatactgaaagtcgggaaaattttagaaaaaattcttagagggttgggaaaattttctgaaaattttgattaggcctgtcgttttaaatttaagcgacggagagaaaaaatagggtttttagcagtttatatgccaaaaatggtaatttttctgccattttggggtcaaaatttcaaaaatatggtaaaatgggggtccgtctgccggtggtgccgacaggcgccgccgggaaaaatttttgaaattttgagtgaatttgaacagattttgtccaaaatatgtccaatcattggttaatttattggtctatggacgttttaaaaaataaagaaaaataattttcaatgttatgaaatttcttgttaattaaatttcaattaaaattatcaaaacaaaatatataaattatcctatcccaatggggaattgaacccaagggacagacaacgaaagacagaaggattaaccaccagactacatatatatgtttactttctaatttgtaagcagggaagaatttatttatttttctcaaaaatttcttcacaccactttcctattttcgtctcaataaaattccctatataaaatgccaatcacggatcaaaatcacggaaaatttgaaaaaatccgtgacccgtgatccgagatcacggcaccccaaaaaccccgtgatttccgtgatcacggccagccctggtttcaatacaattttcatagggttaaaagtggaatatgatcactgataaaaagattaaatgaaatgacatcattcgagtctgaatgaatatgcaaaatatgaaaacaaagttcaagcatgaatctgagaagaacggatattatgcaatggcacaacaacatttgatccatgttctgttctgcaaacatatttgcaaaatgcttttcgatattctttgctaaaataagaaaagttattaatttttcttttcattaattaatgaattagaaaccacctgcacagaaaaagcacgggagtactgctggaaaatgccatcaaaccgagaccattactaatgggccaaacaaagtgttcaattgttaaaaagttgaagctgagcaatggcattatgccataaaagaatacagtattcttaaatgggaactgtaatagacagtaacagcgaatgaattagtgaccaaagtaaccccttaatttctgctcgaaaagataattgagtaccaaaattggtcttcgacaaaaattctgattattaaattagggtttttcattagcaaacataatcataattaaaataataatattattactccaatgaagcagatgagaccgattgacataataacactcagtgaaatcaataaacgtttgtttttttccaattctaaattaatcaattaagaaaggaattaaaaattgattaattaattttctcaaccagcaaatgattgtccgtggtgtccattacggaaatgattgaccagccaaatcaatgcataacatgtgaattcagcacaatatgttagtaaagctaatatattcgacattgaattagtctctggcagatgtgccggatcaccaattgtgcacatcactggtcttaattaggggcataaaaatttacatttaaattataatg

SEQ ID NO: 14972 - DNA, 1737 bp, Heterodera glycines
gatgggtcggcaattgctgtcctccgttcccccgaccgctttttgggtggcgacgctctttgggaattgcgcgacggtgtgccgcccacgccgttcgcttcccccattgaactcggcttcaccgttttcaagcagctgtgtctgtcgcctgatcagagggcgctttactgtctggccagtggtccccggagggcttcttctctgatcagattggacctgtccactgattgtcccacagtctgtgaccaccaaacgattaatcggcgcaacaaattgactgatcattttctttttctgtgctcaggtcgccgtcatccgtgaagcgcgtgcgcactccgaactctctcagctgcccctctccgtcccaacactgatcactttcaccgccgatggccattccctggaggggtatttctacgctcctcacagtcacacgcattgtgcgcccgagggcaaactcccgccggtggttcttttcgtccacggcggaccgaccgcatgcacaaaaaacgacttgaacatgaaaatgtgggtgattgcaatatttgggacttttggcaatccatcggaaggaattcgactcatttagacaatacttcacttcacgaggcttcgcagcatttgacattaactacagaggtgatcagaagaagaagaaaaataaaataaattgatgaaccaattttgggtgcctgagggcatgcaaaatccattagcattgttttggcaaattaattaatcacgctttcccaggctctgccggttttggccgtgagtttcgcgattctctgctcggccaatggggcgtcgccgaccgcgacgatttgatcggcggggcaaagtgcgtgtgcttcgtgccttgcttttcacatcctttgctttggttcatagatttctcatctcctccggcctggtcgacccgtcccgtgtgtttatcatgggcagttccgccggtggcttcaccgtgctcagtgttttggcccactcggatgttttcgccgccggcgtttccctttacggagtgtccgacttgggacagcttgccatggtgccagcaatccaaacaaaatgtcatgaaagtgtttcattttccccattaaggcgtcgcacaaatttgaacgagacaacacaatgcgactgatcgcccaactgcccgacggcatccaaacgtaccgcgaccgttcgcccattcacaactgcaatcgcatcaacaaacccgtcgcctttttgcacggcaccgaggacaaagtggtgccgaaggagcagagcgaagtgatgcacgaaatgctgagagccaaagggacgccgacgctgctcaaattgttcccgggggaggggcacggattcaaaaaggcggacacaattgcgcaatcattgcaaatcgctcactctttcttctgccagacaatggtctcttgagcacttagcaattcgtttttttcgtttttctaatttccatttctgattcttcaaagttagcagttgtttttgttaattttattataaataaacaaggaaaatattgtgggaagcatcaaaatgaactgaatgttcgtgacggcgaacagcgatctcgagaagtgcgttgtcgttcttcttgtcgctccgtccgtcttttcgttgctcttcctcctcctccccttttttcgttgcttcttcctcctcctcccctttttggcgccgcctaggaaaaattaagggattttcaatgaattttattaaaatttgttcaattta

SEQ ID NO: 14973 - DNA, 863 bp, Heterodera glycines
cccagagttaaaaatattggtgtgaacaaaaaaagtagcatatttccattttaatacatgtgaatcattcaccaccagcctcaagtcgttgcgcagggcatctgaactctttaattttacttgtgcaatggttccaatttacttacacagcacacctgcagcagccgccgccacaatagcgggggcaagccccttcacagcggacaccgtttccgggctccatggtgccgccgtcgttgttgttgatggtatcgtcgggcacggcgtccagaaggttggcgccgtcttagagttaaaaaaattagtttgggcagaaaaagaaaataacagatttgaaaattgtaggcaaagtgacccgaattccttttcgcccactggcttttgatttgaactagagtagagcgggaccgggaattttgggcaaaaccgggaccgggacttgccgggacctgagaagccgggaccgggacctcgatttttcttcgggaccgggaccgggaccaaccgggaaattaaaaattcaaaaaaatttaaaaaatttaactttaatttatttcaattgaaaataataaaagttaaattgttttttttatttaataaaatccgaaagcgataggcgccgccggggaaaattttgaaaatttgagtgagatttgttaacagattttcaacaaaaaatggcttaaatgaaatgaatgttcgtgacggtgatcagcgatctcgaaaaacgaaatagaattttgtaaattcagggttgggaaagtttttgactttttccattgtatcagaaaatttttaatgatcaaatgatcggatacaatcactttcaatcgcttatttaaagctttttatgcgatcaggga

SEQ ID NO: 14974 - DNA, 3775 bp, Heterodera glycines
  unsure (1)..(3775): unsure at all n locations
aggaaagaggggcgtggaaaagctgaaagaccaaatggtactacaacgcattggacggcacgtgcaatcgcttccattacggaggtgcggggaaatatcaatgaaaaaaatttgataaatttaaaataatacccatttttgccaggtgcaaatttaagtcccaagagaaaacttttgaaaattgaaaaaatatttaaagaaatctacaaggggtacggtaacttgatcggatcaagttttgctgttttttgcttgtatccaaatccccaatcccaaagaatttgtctatctgtgatcagcccaagacaacaattctgatcacattcggtggatcaaacaatggcttaattctttcattgtttaggctgtgatggcaatgcgaatcgctttgacaccgaaaaacagtgcaagaacatatgttggaactacaaaggtgagtgagcatttcgtgctaatcattatttcaaattttaaaattaaataaaacgtttcttaaatccgtattgtggatcacataggattggtctaagtgatcgaaagctttgatcagaaaattttgttacaaattcctgcatttaatctgagtgaaatgtctgttccaaagaatagtgaaatcaactcagtaatgggctgataaatgcatgatggagaccaatgctttctgatcagcagattttagcatggacagtgaaagcaaattcgctgtcaatgctctgatcagataaatgggtgatcaatgcttcctgatctgattttaacatagaaacatgaaaccaaaactgatgaacgctgtcaattctgtgacccgatcaaaattcacacaaaacgtgtggcttaaactgatcagcctgatcattccggcactgcgattgactgatcaaaaaaatgataaaatttgttatcgttagacccgtgcgttctgcccaaagtcagcggtccatgtgagggccattcgcgtcgctttttcttcgacctgcacaccaaccaatgcctgctgtttgagtacggcggttgtctcgggtgagcattgtgcaaataattgccagattttcacaaaatatttttttcaaattattaaataaatccatttaaagatcattaataactactgttatgaaaaatttttgggtccgatacggcggcgccgaaatgtccctaagttgtaccaaaaaaaaaatatgacccattttttcagcaacagcaacaatttccacacgatggaggactgccaggcgcggtgccgtccgaccaggcccatgccaattggtgcgtgatgcgatacgccaaaaaaaacacagatattttgaatgacggacgacacactttgcctcaaaaaatttttgggcatttttaattttaaaatttccttttttttttaatttttgccatttttttttgctaccattatatggaaaaaaaacattcgcaaaaacattctgccatattgttattcccatctattttttttctctattcatgttgcgcctttccaattaaaaattatttttttcgtttcgaaataaaatttttcaaaatttatttgccaatttttggatttgccgttttttgctgtctaaaaatttttccaaaaaaagtactaaaaataactaaccctttggcctttgttttaattttttggtgtgtttttaacaaaaaccttnaactgcaactgatcaaatgcgataagctaacttcaagaaattaaccgattaaaaaagcgctaattcttattgattgatcaaaatatgctaacttagccagataaaaaaactgatctgaccagatcgcgcagagaaaattttgtgtgtgccgttccgcgctaatgcattcccctccggcacttttgtagttgccactaccactaacccatggcctatccgcttgactcgcgctaacccgtcaacaccaacaccagcagcagcagcagctgttgaactgcttgatcaccgtgatgggattttggccattgacaacaacaacgaccggctgatcagcagcaacagtgaccaacagacgccgcatcaacttgatgctgctgatcaacaaagtgatcagcagcaaaccgctgatattgttggtgataaccggagtgatcagcaaagtgaatggaaccaaaacggtgatcaaaagccgagtgatcagagtgaggctaatgatgaccagcaggaagaggtggagattgaagagggggaagaagaagaagaactgattgttgtgcctcgggaacaccttctttacggccaactgccaggtaaattgagtaatgatttactgtattaccgtaatcagtcagtcaactgcgagaaatgggcaacccaaaaacatgtccaaaattttttaaaaatctaccgcctaggtcttagcctgaagtcattccaaaaaacttggtcacatctaaatttttctaaaaatcctaccgcctaagtcatagttctgctgaattcaatcaaaaaaaaacaaccttataacctacaaattttcaaaaattttgccacctcccaaattccagaaaattccatctgtctgggccctagtctgcctctcaatttcaattttccaaaaattttacaaaattccccctcccccctgtgttgaagagttgtgcctgttgccggagcagcgtggcacctgttttggtgagcagttgcgctaccgctacgacgcgtcagtgggcgactgtgtgggctttttcttcactggttgtgacgcaaatgtgaacaactttgactcgtacgaggcgtgcgcacgcgcgtgcggtgcatggaaagcggacgcggtgtgcgagcggtcgccggacgcggggcgcgaccgctgcgacaccggcggcggcgaccatggtcagcgagttgagtggcgacagcgcgacaacagtaacatggcaggcggtatactgtatccataactcagctcataaatgatcagaaacgaattaaaaatttaaaaaggatattagagggaggaggattagcttatctcgaaatttgacatccataagattaagcataaaatttttgatttttcgaattttttgcgcctattttaattgtttatcaaatttaagctctcatagtcatctaatcataaaaaatgcaccaaatgttacatggttagtggagagattagtagtactaactactaagacagtattagcttaaactgacaaatttcggctgtgtaactttgcttaaaatattttaaatttttcttttaattttttcaatatttctaaaaattaatcgttcttctgaaaatgttcagaactgcactaaacattacatgaaaatgataattttaaaagattttgattataaatgttaaaaaatttttggcattttgttgccaatgtgttcgaaccgaaaacttcagccaacgtgccaaaatggtattacgatgcagcgctcggcaaatgtggcctgtttttctggtccggatgtggtggaaatgggaatcgattccaaaggtttctcggggaaaatttaaaaaattcaaaaatttccaccccctcccattttaaagtaaatcggagtgcgaaaacttgtgccgtcgcgaaatgttggcaaaaacacaccaaaaaagtgacatgtgcatgttgccaatggacgcaggaccatgtgccgacctagtgacaatgtggtattttgatgccgtacaacagcagtgccggaggcaagtacagtaccaatcaaaggatgggctgttacggcattctgttcaatctggccaaaaacctgatcagcatatcattccaaacagctgataacacctaattcttggt

SEQ ID NO: 14975 - DNA, 3532 bp, Heterodera glycines
taaggcaatgggggatggatggatgggatattcgttgcttcttttgcatgtgtgtagttcagcagcagaaatcctccaacagaggcgagtgggtccaaaatgcgccaatcgtttagccatttaggcaaaaaagccctaaattcaaattggatggacggatttgtgttcactcaagtcaacagaaaagcaagtgtgggaaaatgtatttgtaaatgtcaacattactgatcaaaagtaagcattgcacttaatactgagaaaattagatcacctggatcagccccgttattaggaggcgaggaattaattacctactactaaaatgaaaaatcaaattttcatatataaaaaatgcttaaattttttttttatccgaatagtctacccgaaaattgtaatactaaaaaaattgtagaacaaaaatgaagtctttgggttccctcatttgaattttttctgtttatgagcctgggacggatttgctgaatcaaacgcgtaattgataatcacagattaaatatgatttcaaatgctatgagagtcaatgcaatacaaaactgtccgtatatttaactacccaaaacaaaacaaaacatttgatcactgttagctgattaaattgctctttgatgagctttcaaaaatttgctgatcacacaaaaagttggctctgatcgatcagagaaagttgctgcatcgaacgagttttctcttcaccgatgaacattgtccccacactctcccccccccccaccctcacccacagcggggggatttacccatgcaaaattattgcgcagcactttctccgcatggctaatgatcactaatgatgatgatgatgatggtggtggtggtggtggtggtggactccgttctctccattcttttagtgtttttaagagaattaatgtattttttgataagcaaaaaaaaaacaggtgaaaaaaccaataaacaataaattttaaacatatgaataagataagagttttcggattttagagttggcaaccctgataataagggaccaaaaaacaaggtaatattttagtaatttatgattttgtccattttttgaatttttttttactggaaaagccgaaaaaatttctatgtaaatgtgtttttttaaatttaaaaacaatattgaaaaaatccaaaattcccactttcttctaatttcaaaaatcggatgcccaaaaattttttggcaaatttcaacgatgtcgataccggaatatagaaaaaaaattttccttaaacaatcttaaaaccgaacagctttcagaaatttattaacacaaataagtgacatacatataccaaaataatatacagtatacttatgaaaaaactataatacagtatgctttaactaaagtgcacagaaatctaggcggacagagattttttaggctaaaaaaaaatatttaaattttaaatattcgatgaataaaatagatgatggatattgcactaattttttgaaaatttttaaggaaataaatgaaagagttgaaaattttttatttttgcgactcttacccctcatagaaagtgtgaaaacctaaaaaatttcatggaaaattcgagttttcggaatcagaatttgtttcctgtttcatctgtcctcagagaatgaattatcactgtgataatctgctataataatcacattggttccagaaatggagcagccatgggatgatttcaaagtttttgaggcctccgaaaatgcaaatttaaaatttttttgtggacccagaaatttcaaaaaatttattcgattgaataacctcccctggcatacatttacaaaaaatttaatgggtcgaaatagaggtcatgtaattacgaccttaaattcccgtcatcggtggcaccttacagcacacaaaaatgccggatacggtagacggctggcaggtgtacggtggggtacagttaccataatcattgtaactatcgccatagtaatggtgatgccttttcactgcaccagcagttggcgatgctttgacgtcagcagacaaacagctagacataacgaaaatttgggatattgttacagtataattgagccgtacccacagtaattcgcctctcaattaaatggattacggtagttaaagtagtcttaccgttttgcatgccgagtgcgggggtcgacctgcggcagtcgcgcatcagggcaaaatgcgattggcgaacagcatacgcgcggcgcttcctccccttttgttgcaggctttcgtcgctgcacgtcacgcttgcaaacgaacgaggacgggcatatgccatgctgcacgctgtcaaggtcgccatgcagcgctgcagcagtgccacagctgcgcagttcgccagtttccggattcctgaaaattttgcaaatttcagaattttcaaaaaaaaatttctgttaatacctatatggttcacgattgtcagggcaatgccgcgcagtggtagcagaaataagtccgtaatttgttgtatttgttttggaatagtcacgcatttgctgtgccttggatgctcgccttaaatacagtaacaaaatttttaccgtacccaataatcgtgtttaatattttaattattcgggagataataaaattttctgtttttctctcattatttttcatttagcacgaaaattcttacaaattaattttcatgaattttcggaaaaatttcgtgtttttatttattttttgaaatgagtgtattaagtgcaacagatttacgagattaagcatgtgcttctctacctgttcattgggaacgggtgacagcacacgtacaagccgggccgattggacatggcacacgtgtaagagggagggcattccgctaaattggagagcaaatcgatgaaaatttttttgaaaaaaaaacaaaaactcacaggcttgcccaagcataacacaataccgtaccagttggcctaaataggctgcaaaaaagcgaatttaaattttaatccagattatggttagttggggcggggcataaggatatgtatataaattgcaatttaatcgctctccaattttagcttccgacatttactttaagattttactctttcatttttttgtggcaaagtaacacaaaaacttaaaaaatatttttcttttgtataagaattggattaagtcagttttcttaaataaataaaatgaatttttgtttaattcacgaaataaaaaaccaaaaaaatgaaaaaaatttttaatttatttctttttaaaatttcaatttttttatttttcgatttagggatggggggctctttcgaacatcctccaccattggcatttgtactgttctggccctggcactacaacccaaaaaaggccattgattaattgtgtgacccggcatttggccgtccatgcaataaggttggcccatctggttggtggtgatcagtccgctggtgccgggggggagcgcaggcaccagcgggcggcgctggagggaaaacgcgccaccggtgccgctaccgtaaccggcattactgcta

SEQ ID NO: 14976 - DNA, 1602 bp, Heterodera glycines
acaaattaaatttatttaaagtttcttatgtcctcccttttcttcttggattcatacgacatatttatatgtttgatcctatgaggtaaaaaaatgggaaactatccaaatgatcaagaaaaaaagaaacaattcataaatttgatcaaatttaagaaaagttgaagcaaaaaaagaaaataccaaaacaaaaaagagcccaaatcgaaggtaaaattggaaaattattaggagcaaatcgtgacaaaataaacaaatggatatttttagtgtaaaagataaaatttgaaattgggaatttgatttgggaattccaagtcaaactcttagaaggtggaagaagaaatttactataatttatcaattgatttttgatgataattaaattaaaattgataagataagcaagaaaaaataaataaatcaaagcctttaaaatcgtaaatgatgttgatttctgtccttagattaaaaacatatatatgacatttaaattcgattcaatccattaagtacaaatcttacgcctaagcacaataaaattgggtatccgtgccggggcacccggaaaaacgaatggatttgaatgtgtgaaattcggttccatccattaagcacaaatcttgcaccgaaacgcaagaacattgggtctccgtgccgcggcactcggattaattaaccctttcaccaagcttaacattataaaacaactatcgcggactaaagtaaaagagtccaattttcagataattaaggcaatttttacgaaaaatattcattggtcaacaatcattatttaaatgctttatgaattccgaatcgatcattctaatcatatcactttatctgctttctttctctgtgttttttctgtcttaatttccgcatggggcaaagcacagactgacgctgaccaggttgaggatgggcacacaaatctaaattaggcaaaatatgagcgaacaatttaaaaatttacattaaaagcgtggaaaataattgaaaaatcaaagacaaaaatagtttatctaatttggcaaattttaaattcgattggacatcattaatgatttaataaactttctttcactcaattaattgcatttatcaatagattatttttgagtaatcccactcaaagaaatgcaaattatactcaaatttggctaattaatcccattcaaaaaattgcaaattatactcaaatttggctaactcactttccctcccgtacaatctgcatcggtttgacatgttgtacaacagccgccacggtaatcgacctgtccctaaaatggtgcccaataaaggaaataggacaaaaaatggctaattaaaaataagcaactacttttagtggctcaaaaaaatttcaattaaattacgaatttcgaagattttgtaaaatttttattattttatatgtatcttcttacaggtggacagctgatgattgccacttctcttttgaatttctgaaaaaatcatattttaatatgaaaaaagtggagacggaaggattttgctggattcattggccccacatcctccatagtttttttggcattttatttacagcacatcagcagccttatgcgagca

SEQ ID NO: 14977 - DNA, 1312 bp, Heterodera glycines
ctggattcattggccccacaatcctccatagtttttttggcattttatttaccagcacatcagcagccttatgcgagcagggacgaaagaagcctaaattggaaagttaagcatttttttgctttatttaaaaaataaactggatttcttaaattgcactgattattcatccgtcccctcgggctgagaaatgggaagagaaattgtcgacattaaattaaagaaataaatttgaaatgccgatgtgcggacaatacaaacagaacaaacgtggcaaattcagagtatttgtaaattcccatttcatctgagtgaatgtttggcatttatttaatgccattttgaataatacaaaatatttttcatcgcccccccccttccccgccgaaaaaccgtcagcaatgtttcgctcggatgacaaaatatgttttggcgcaaataggagaaactttttccaaaccgagtctcatttcggagcgcaaaattcgtgaaaaaaaagttacgggtttataaaattattagaacaatttattgtatttgtttggtcttaaattgtgagaaacaacaattttccatattttacaattttattcattcgtttctttgctgttttccatcacttttaaaaaagtaaactcaataatttacttctaaatcattttcgattatttttattataaaataattaattggaaatggaaatggtccaaatgatcaaatattaaatatcagtgttataaaaagtgatcaaaacaagaaagaaggcgtcaggaaaaaataggaaattttttccagtttatcaacaatttttgtccaataaatgccgacggatgagaaaaatgaaagagaagaaaaagttaaaaaatggaacaaaaaaaaggaccaaaaggggaaaaatgaaaatttggcaattgatcaaatgggtgaagaaatggaaatacacccaaatgatcaacaaaaaaatgaagtttgatcagaaattataataagtttttacttatatcctgtgaaaatattgaaaatataagtgaacatttgtgaaaagattttttactaaaaatggaatcaaaatcattcattgaaaaaatttaaataactttaaaaatattactagagattaagccaaatcttctcttccattcataaattgtattatacgcaacgacaattttttccgctatttttaattcaattttccaattcgttgccaaattgaattttttggaaaatgcttctttcactttttcaaattgcttaattttttcaagcttttgctggtttgttgataatttcttggttaacccttaaaggg

SEQ ID NO: 14978 - DNA, 1252 bp, Heterodera glycines
caagggccgactcagtccacaaggatagaaaaaagaaatagggattttggaaatatttttcaaattttcacggacaaacccgttctggaaaattccaagaaagtattgggttccctgatatataatttcaagggccgactcagtccacaaggatagaaaaaagaaatagggattttggaaatatttttcaaattttcacggacaaacccgtactggaaaattccaaggaagtgttgggttccctgatatataatttcaagggccgactcagtccacaaggatagaaaaaagaaatagggattttggaaatatttttcaaattttcacggacaaacccgtactggaaaattccaaggaagtattgggttccctgatatataatttcaagggccgactcagtccacaaggatagaaaaaagaaatagggatttttggaaatatttttcaaattttcacggacaaacccgtactggaaaattccaaggaagtattgggttcactgctatataatttcaagggccgactcagtccacaaggatagaaaaaagaaatagggatttttggaaatatttttcaaattttcacggacaaacccgtactggaaaattccaaggaagtattgggttcactgctatataatttcaagggccgactcagtccacaaggatagaaaaaagaaatagggatttttggaaatatttttcaaattttcacggacaaacccgtactggaaaattccaagaaagtattgggttcactgctatataatttcaagggccgactcagtccacaaggatagaaaaaagaaatagggatttttggaaatatttttcaaattttcacggacaaacccgtactggaaaattccaagaaagtattgggttccctgatatataatttcaagggccgactcagtccacaaggatagaaaaaagaaatagggatttttggaaatatttttcaaattttcacggacaaacccgtactggaaaattccaaggaagtattgggttccctgctatataatttcaagggccgactcagtccacaaggatagaaaaaagaaatagggaattttggaattttttcaaattttcacggacaaacccgtactggaaaatccaaggaaattttgggttccctgatatatattttaagggcccaactccgtccccaaggataaaaaaaaaaaaaggggatttgggaaaaattttttcaattttcccggacaacccccgactggaaaattcca

SEQ ID NO: 14979 - DNA, 1269 bp, Heterodera glycines
ccccgtgcccccgcgggggcgaaggtcgcgggggcggggattgcgggggtcagagtcgctgggacggggacgggggtgaggccaaaaaacctgtcccgcccccagcgggggcggggtccgaaccctactcgggacatttatattttatgttcattttttaaaattctccgctgcttctcttcatttggtccttcccttttccatctgttgttgattaagctgtgattcgattcattttgatcgtttattatccctttttgtctttatccttttttctcccagtgcaaatgccaacagaatgtttgttttggctcacaaaatttgggttttctttttccataataaataaattaattgtttctctttgatttcctttatatttcgcctgcgtttcgttcattccattgttacttttgttttgttcaaataacatatgatttttgctcaatttaaaacgatttactcgggaccgagtcgggagggaattctttgttctcccagggtcccggttttcgaaaagttcatttgccggaccaaccgggaaaataagcactataatttatcttattgttgttagtggttaagtcttttgtgcttcttcttcttttttgcttgtattctatcccctaatagaataggaaatttattaaacaatttaaataataataaatttcttcttttttatttaaacaaccgaaaccattgaaaaaatgaattatttgaaaataatttaaatttaaatttgatactaaatttaaaaattgttttaacttttggctttatgaattaaaaacaaaagaaattggttttcataaaaaaataattaataaaaatcttttttccttgaaaattcccgattgatcccggttgaaaatccagcaggtcccagtcccggcttttctattccaagaagcattgtaaatatcagaaaaatttgtcaattatttatgagttttaaaatgctatattaagaattaatgtaaaagattattaagtattgtggattgattatttctgaatttataaaaggaggaatgggagatgataaacaatgggctgggaaatttcccaaaaattaattccaattttggcggggggaattaattacaaaatatgacaacgttcagattgattttccattagattcttgctgatcagttacccccccccccattcaaagcattgtttgtcccaaaagccacgtctttgatagtttaacacagaaatatatttggattttaccccacttttattgaatatttatttttt

SEQ ID NO: 14980 - DNA, 2387 bp, Heterodera glycines
ccctttctctcactttttcaggtgctttttcactttgactctcgaccaagtgccaatttggggccttttcatcaattccgttctgctcgggtctctctccccactttccttcgttcgttcacttctctccctttctcagtttctttatgaccggctatttgccgttgggctttgaatttgccgccgaattgacctttccaattgccgaaggcaccacttcgggactgttaaacggatctgctcaggcatttggcatcggaatgacttttggcatgggcttggtaagtgttggcatcggttttcttcccattggcactttcgctggctggcctttcaaggtgatgcattccctgtcgatcctttggtgcaatttgatcatgtccgcattccttctgatcggcttctttctcaccggttttgccctcacatccttccatttaatcttacccaataaatccctctcaatagcaattatcaaatcggatttgagaaggcaaagggcacacaaccaacagcaggcatttttattggggggggggggcaaagaattcttttgtttattttagcgaacggaaactcaagacacaacgcaacctgatcagtgatcagaccgagggccgataaaattctctctaagtcaaattctccaaaggaaatgatctcccacaaacccaatgaattaataacgacagagataccaattaactctcattcgaccataataattagagctcggcgcgggatgggacccgcgcgggattttgtgggatcacagtccgcaattccgcatttttaagaattgcgggattaatccctaggataacttcactcaaaactttttcgggctcaatctcgcaacggaacccgcaacttttgtttttgtgcgggatcccacgggatccgcaatgtatttttttgaaggatttcaaagataaaaatctggcttctattcttagatttatccatttagtaaataagcttgaacaatttgttaatttatctttttgaatatttcaatttaattttttgcaattccttgcgggacccgcaaatttgaaatgcgggattaatcccgcgggatcctttcccgcaaaatttaattcaaaattcgcattggaatctgcaaatttgaaattgctgagctctattaacatactatgtttcctgtaatagtatgaaacgggtttatcattccccttgaaaatgtcttttaatgaggggggggggggggttctattagggaaaatggcaaaaaacacttattttttttctcactttgtcaacgcttttacaaaatgtttctttcccaacctttccctcattcatttattgtttttattttgacaaaattggctccaacagtgacgacccctaactttttcaattcgggtaattgtaattttgaaaagtgcaattagaaataaactccaattgttttttatttgttaattgattattgctaattgactatcacattttaatttgtttgattgccttttttcctttttcctccaattgttgtttcacacaccgtccgaaaaaacgagatgtgtaccaataaatagagcggtaggggtcaactccgtcttgccaactccgtctcgccaactccgtctgggccaactacgtctaggggccaactccgtctcagccaactccgtctcgccaactccgtcttagtgtataaggggccaactccgtctcagacaaaaaaaaaatatttaaaaatttttttcgacgaatttttcaaaaaatatacccctaagaaattaaaaattttctcaaaaattcatctgcaaatctatttatttattttcatgttctgatttttaaaattattcatcaaaatatcgctttggcttaattttgttacttttaaaaataaatttaccgttatcatttattagtatatacttacctaacagtttaaagtaccattaattttttagccttgcgaaaatggaaaatgctgaaattaaatctcaacgaaaaaataaaaaactcgaacatgaaggctgcctgtatgtcttccatttgttgaacgccgatggtgacgtaaaattttggcgctgtgaacatcagcacggcgaattcaaatgtcgagggcgcattcacacaacgctcaatgacgtcgttctgaagacaattggtatacacacgtgcaaccacagcgcggcaaatgtcgtcgcacaaaaaatcaccaccggcattaaactcacgtgagaattttttaaaattaatttttaaattctcaaatttagcgtttcaaaacagacgcagcctttgcacgagcagccaaaatggtcacttcgctggcgttcgtgccgctggcggaccttacacccgcgttggcagcactagaagactatctaccaaatgagcttgag

SEQ ID NO: 14981 - DNA, 2783 bp, Heterodera glycines
atcatcggataaccaatagaaaaatgatcaaaactatacaatgatcggttatgctttgaagatgattaattcgcttattaattggattaattaaactgccaaaattgcctcaaaattatttccgtgtcttagcgaagccctcaaacaacttttggtctccgggtaaatgatggcattaagcatggcgtgctttcttcgccttctcagaaaaaagacttcgttgatgttttcttccgggctttctgaaaaaaaacgaaaaataaacatatgcccattctctcatttcttatacaccttttcacagcttcttaaaacaaaaaactttcaaccaaaaagatatgtcaaaacattttgaaaattttgagcaaaaatataaattttctgtcaaaaattttccatttttgagttttttatataacaccctttttgttgtactgctgcagccccctccgtctttcatttttatttccaaattccccccccccccttccccctcccctcgccttcttcgtccgtcagaattgccgtttcgcgtgttggctctgagcagattgacaattttttgcggaaaaagatcggcacattcagcgaagagctgtccaatgcgctggcactgctcgccgtcatttcgtcctcttcttcctcctcgtcttgggaactgctgaacatttttaaacaattaaatttaattaattaagcctaattaatttaaaagggaaaaatatgggcgaaacgcaccgacaaataatggcatcggaacaaaggagggaatggtgccgggggcatttgtttttgccgaagagcaatttattaaggaaattcattttcatttctaatgattaagcttttgaagaggagcaaaaaataattcccaaaaatattattaaatatttgctaaaaaaaagtctaaaaacccttctttagcgtccgtctgctttttccgaccactaatttttccacaattttttatttttttgtcaaatgttcctacttttttatggcttttgccctttgcttcgcaattcctttaacttttgccatttgcctttcctaccaataaatatggccaattttcggcttggccaactttttcaattcacatgaccccccccccccttccccattaaaattgttggcttttgctttttctgttcgttcagtgggtggcagcagcagctgtctttccaagaggaacaaattaattttaatgagttgcttaaatgatgacgtattccaaagaatgttaatgataatgagaggaaatgattaagaaaaaaaagatgaagactgatcatattagcaaagaaaagtgaataaatccaaaggttagagcaatttacagccctttatttggtcatcaaaactggtttaaaattaattgacaatttaatattttgattaaatttaatattaactacaaaataaaagttgtaacggtaaagctaaaaaactataattttagaaaactatcaaaattcaaaccaaaacatacatactgtaatcaaattctgtaggtttctcgccatataaatccacgtataaaatttcagatagtcatacgaccgtatgaaaaaaaatctgtattaatgatgcattttgttaccataaataataatgttgctgatggagttgcaaaaacttcggctgatggactctgctaaaattttaaagttataaaattaataaattttaattggacctcgggacttccaattggtactgaaacggatgttgggtgtgtgtctttggcatttcgtctctcggcaaatacgacgggggacaagcgccaagtttaaatgccgaaatgtgttcatccttataattaattagtgaaaaggggcatttaacacaaaatgagcataaattagataaccaaaaaacacctcatcatactgcaaaatgttcggcatattcggctgtcgcacaatgcgcggagtctgctgatcaaagcggcgctttttcatgcgatcataggcacggtctttgccacctgtgcccttttcggcactcaaaaaactgcctttgaatttacaaaataattattataaaattaaatattccataaatattattttatttgtctaaaatcgatagcttaattagcgcaccgttttattttaaagtacttatgatccaagtaattaattaatgaccaactaattacttattgactcatctcctccattttccattggatgcattgcgtgcaaatccatggcacactgttggaagtgtgccgggtgtgcagttccggcataatgtggctcatctcccgcaataaaaacaatggcgttcacacgctgagcaacggcactcggatggcgtacaaaattggcactcaattcaacggcatgcacccattgctgattggttgacaaaagcattcgctgatgatgaccatgctaaaacgccctaattaacataattaaataaatatatctggaaatgcctcatcaaatgagttgtcgtccgttgtcattgtgccaatgtttgtgtccatttgccattgccatcgcttttccctttgtctgaacgtgtccaccatttccctcatcagctgttccgtcctccttttgtgttctttccgtgccaatgcttctcctcctccccctgcttcttgccggtgtttaatcgcttgctccagttgcttggactgaaccttttttggcctaaaattttctgataattaagcaatttgcattttaatgctcaattatatattttatttaatttattgctaaataaaattcctaatttccatatactttcactatctgtcgctg

SEQ ID NO: 14982 - DNA, 1108 bp, Heterodera glycines
atcaacggatgcggccactcgcttcagcacggccaacaccgcgtccaaccgatcgcgcacttcgtcccgacggcacagctcgtggatggtttcgatctcgccgctgatccgcttcagcagctcgtgcaccgttttacgttcggcgtacggcgttaatcgactttctaaacagggaaaagaaagactaattagcaaagagttaaaattggcgtaacgggagggatcagctcattttgcgccactgtcccgcgaaaaaataaaataaaattttgtcttcataaatttttacaaaaccgattttttataatttttttattttctaagtttgttttagggaaagaataaaaatattttcaataggtttctttgaaaaaagtttttcttattttttaaaaaaccaaaacacaaattaaagagcaatgtttttatgttatccaaaaaaaagagaaatttaatttgataattcaacggcaaaaactttattcgaaggctcagcgtaatatttttttgtcatttattagcttatatgaataaaagttctttgcccatcatcattgccttcgctaatgttaatactcaaaatgaaacgcgttacaactgagcaccaaaaggcacaaagaacaaaaataaaaataaatatttattgtttattaagaagtccctggaattcgtgcgtctattcgaacggggacggttccgtgccgtattaaacattttaacagaaaaaagtcaaaaatacgcaaatttagaaaataaaaagttgataaaagaaaagaaaaaattttaacaaaaaaataacaaaaattgaaacagacaatacttaattttaaatccacgcataaaattgttaaattctcagaaatcagtgaaagcatttttccgttgttttcgagatcgtacgctctaatctggccccatcacattcattccataaaaggcagagttcccaagtgtgcttatttctagagaccggacgggcccgggggctcggcgggcttttaccgggcggcccgggacgcccggtaaaacgggttttttttgaccgggcgggccgtcccggtcaaatggctaagcccggtcccggtactttcaaaattccggtctctac

SEQ ID NO: 14983 - DNA, 1888 bp, Heterodera glycines
  unsure (1)..(1888): unsure at all n locations
ttcatcgaaatattttgaggtgctcgtggtcacttccgttgcggaagagggtaattaggaataanttaggaaaacaatagcaattagcgatctttgagcgatttcattttaaataatatttgttgccttttttcggtgtcaacatcgccgcttgtaatctgatcatcaagtgcgtttctataatgatttgtcgatttggttgatcacttcttcacttttttcatttaaggtacaacaacgtcggcagcgaacggcaaatgatccaacgaagaggtaaaagggggcgagggagtgatcagaggagggcatgggatgatccgatttggggcacttaaacgaagggcgagcattgccatgccattttgccaatcactttttccctaggccgtgcccggcagaagcacagcctgtccattctgttggcgctggacaccggcattgagcagcaggagttcagcaacatgcgcaaggaggccatggcaagtgaaagagcgggattatcagcaaggatggctgggaccaaaagcctcaaaatttaacgaaactccagtccaaaaaaacatgaatacggccccacatctgacttggatgttgattttaaaaaatttattttatccaacagatgatgcgctgcattgaggacatgcaggagcaagatgagcagacactgcgcaaatcggtgggcattttggcaatttgtccacgcccctttttattaatccatttatatatatttagtctgtgtattttagaatttttaattggactatttatttataattaattaattgccaatgtaaatgttcaattatttttaagattgaggaaaaggccttcgaattggccgaacttcgcaacgacgagaaaatgaaggtggagagcaaacgggcccagctgatgggcaaacggtgtgtttatttggtgtgttcatcgtggcatttctaattttactttttccccgttagtttcgatttgaaatgcgcctgcggcactgtgatttgctgcagtgaccgcgtccgatcggtgatgggcactctgtttgtgtgctgtgaccccaaagtgtggaggcgatcgaagcacacgctgacacgcgccccaacggtggggcggggatttagaaaaacattatttattggagcaaattgtcgattgtgatgtcttcgaatgctttaaataatcatctccgtgtttcggcatttgcttcgctgtccaaaaattgtgccaacttaagctcgtttcaatcacagattgatagagccattaatatagcattggttaatagctctgatcggaagtgattttctcacccgtctttcatagattttctttggcagaattatattattattattattttatttataattttccacgctttaagaaagagaaattctacacaaactgtgcccgttgggagtgcgcaaattgtggcgaacattggggccaaattgtcaaattttccaacgtgtttttgcccgaaattcgcgtccgcgcattcatattggagcgagtggatgaacaatggtcagcacagcaaaacaacagatggaaatttgcacaacaataaatatttaattgtttatttttaatagtaacgaaaataaattttattatttttatttaaattttattatttacaattagccaaaaaaaaaaacacttttcagcagtcaattcgaccgaaacgaagtcgtgtgcaaaaagtggaaggacattgagcagaacaatttcaacgtggacgccattagcatggcggacatcgtaaattgaacccatccattttcatttaaatcaaaatttcacagcgttcgatgtacgaaagccttttggagacgaaccccgaggcgcacttggagtacgaaaagcagagcagacaggcggaccaaca

SEQ ID NO: 14984 - DNA, 1539 bp, Heterodera glycines
tctggttttaattttgggtcttttttttcttaattttcactttgtcgctcttcgttctccacatgaatatctccatcggataatcatagcctgtttttttgtcagttgttgacatttgttgaagcccttggcaaatttgtttttatatattgtcattccgttttatttaagataaagcttattcatcgtacatttaaagcccaaaactctcgagttcacctcgggaatttaattaagaaaggggcaccgatgtctcgaatgaataaatgggacttttctcgccctaaaaactccccaaattaatatacttttttaattgattgggggtataaatgtacccaagcttagccattttttacatcctctaatctgccaaaattttattggacattttgctgggacaacagaaaacagcctcccccctctccacccataattagctttttgtgccgtcttgtcctcccctcccgccacaaaacaatccgtcgtcgtctcgtcatccaattgtcggccggccccccccccccccgaaacaaccgcgatttaagcggcgagtaaaatggacgaaccctccctgccccccccccccgggggatggcacgcaattggccgtcgaaatggcaaacgttaaaagttttaaaatgacgatgctttttgtgctttttacccattttaaatgagcttatgttcttctcgtccatcgagataaaatgtttaatttgtcagattgtaagccaaatggtaattagaggtaattaagcgaactttaactaatcgccgccgcatttgagggaaaatttaactgaaaaaaggaattcgaaaatgtactcgaaattttctgctaaaaattgcctaatttcagcttcgcttctctttggcactgtctgtcttcccatgcattttttcattatttttctctttgccctggtcatttatttatgccgtggaattttccccgaatttccccggggagcgttccgtcaccggccaaaaaaaaaagtttttttggtgccgcttttgtttttccctttttggccatttcccatgggattttttggccctttttgccgtgccgtggcccattttttacaaatttgggcggcacaccatccttctggtgacctttttacattatacactttaattttaaaatttttaccacggcaattttgtaaaaataattttttcttttttcttaatttatttttttgccaatattgttttaaattaatttttatttatttcaaatgttttcttaacaattcgaataaagattgttttaattctcaattttttcgctcctttttcaattcgaattcgctgtttttacaaggcaaatttaatccaatttgaaaaattttcgatgaaagtttctgtaatttttaaatttatctctaaatgcacatttttattattttatttttttttatttaaaaattttttattatttttttgttgaagaattttaattaattatttaatttcattaaatcttattcagaaattttttcattttagaaaaatttaaaattcattact

SEQ ID NO: 14985 - DNA, 2638 bp, Heterodera glycines
atttggcacgtgatcagttggccgttgatggggagctttcgatttggaatgctgtaacattttttaaaatttattaaaatggaaatttgttttttcctatttttcccttaggcactccgttgggccgacgcgcaatgcctccaaaaaggcaaagaatgttcgggggaaagtcggcgtgatgtgcttggcccggcactgttcaaaattcgtcttacgcacatcactcgggaggatttctacaaatatatcggtgaaaaacttaaacctttcggtgaatttaaatagttggccttgtaatccttcaacataatggtcgaaaatccccgactaaatttatttgtggggtcggtataataataataattaatttgccagttccgaccggtgtgttgacagtttgcgaaatggttgcccttttgtaccatttccaccctgaccaacaaatgccgaggatgctttacgactcattgcaattcccaactcacagacgggcaacatatgacggtatgatttgattgggcaagatttttcatttatattattagtttctatctctgaatttttgatgaatttaaaatattttgttaaaactctattgatcaactgtattttcatcatctttttttttttcagtaatcgaattttgcttctcttgtaagaggtgacagcgaccaataaaacttcggggttttcgtttgtctcggaaattcggctttcaaacattctacaactttccctaataggatgaataaattaattatgcatttttcagaccccaacaaacctcagggaacgctcattatggaaatcaaaaaattctctgaatttttgaaagaaaatgacaacgttacacgtctaagcgatgccgtagtttatatcacggcacttccatggcgattaattgtatataaaaccaaacacagtttgatgtttgaagcgaaatacgacacggcacaaatgagtgggcaaattagccaaaggaaacaatattttaaataaattaagctttgaactacaaatgcccttattcgacaacgtttcgaattgcttcgcaaaaggagggaaaaacggattttgttaagaagaaaatgggcaaaattggctcggatgcatacaaccgatgtacatttagttatatttcattgtcggtatgtgtaagaaagcaaaaaaaaaaaagaaaaatttttgagaaatacgttttcaaataaaatttcgtgaatatttcgggtagcgcctatcggcagacagtaaaccatccgcggctttattttttgagttaaaatgctccaaaaaatgaatttttgctgtgaaatttttaaaaaatttaaattttcgctctgccgtaccctttgtataaaataaaataaataataatttatagaaactgatgtgcccggacaacggatggtacaataaggaggaggacacagtgaaagtgacggtggaagtgaccacaggcgaactttgcggggaggaaaaagcggcgaaatgaaaagaatgaattttattttatccatcccatacaattaattgttttgtgtcggattaaacgcttttcctatacaacatttaattacagtaacctgagtttttttttgccgaaaaaccgttatgaaaagaaaattacagtcaaagatggtaaaaagcaaaacaatttttggttacattgacgcaaatggaagaaataacagaaaataaaatcaaatttcaaatatgcaataaaaatttgagatttatgtaagaaaagtcacaaaatatctaataaaatattgaaataaatatttatacacgcaccaaatgtcctaaaattagttctcaaaaacctcaattttaacaaaaatgaaaatatgtaaaaagtgcgaaatattgacaactatgaacataataaatatgtacactgagccggaaaattggttatagaagaaaacttataatttttagcgaaaaaacgccgcaaaaattgaaaatttacatttttgatttatttttgacataaatttaccaattttcgagaaagtttaaaatttttacgagaaaattttttgaatgttttttaattttccgatcataaaggtcgaaaaggctaatttagcttatggggacagttcaaatagatgatattcgaaaaatgccaaatatggatataaataataaataacaaaatgtggaaacaagaattttcaataattagcattctaattatattcagaaaaagaatttattaattatatcaaaattaaccatcttccagaaacttatacatatttgcgaaaatgaagcttctcccaaaaaagcaaccaaattaaggaattgttggacccgagcaaaggattttacaacaaagatgaggacaaagtaaaattggccatttatttcattgtggacgagccaaaaacagagaaatttgtttccaatccgaacaaatccaacggcacactttcgatggaaattgaaaaattatcggaatttgcgcgagaaatcgaagaaagtgaacgtaaaagcgaagaaactgtgtatataaagggaatgccatggaaaatatgggcaaatattaaaacaaaaaatgaaagcactgagaaatggttgggctttttccttttgtgcgacgcttctgaaaaaggtgcttatcaaataatat

SEQ ID NO: 14986 - DNA, 3048 bp, Heterodera glycines
tctttcgtctatttctctgtctgctttgctctctttctttctctatttctttctctgaattctctgtctcttcttgtcaattctctatctgcattgctctctttttttctctgagtttctctgtcttatttccttaaaatttctttgtttcttttcttctgttctctctctttcttgtctatttctctgctttgtttctttttcttttccctcttctctttctcctacgccattttataaaatgtgctttggttggtgttttgttgtgaataaaacaaatatcaaactgaaaaagcagtagcagcagaagaactgacagacacatgcacaaaccctttcttttttgacaccgatttttattattttaaaaatatttatttatttttattattatccataaatacactaacccaaagaagtcttgcctcaaacatataaaattgttcaatgcttaatactagggctataattacatagaaatgctattttgagcccctttcttcatagcatatgcgcagaaaaatatgcaaaagcatagaatttatagtcctaattattacataataaaagtcagaattatcgttgtaaatattttagatgtctttttcaaatacccaaaagaagaattcccatattttttttaatgactgagttttggattccgaattgaatgatttgtcaaaagttacgcgcaaaaagtctttcgcaaaattaaaataattcatgcttactttctgtattatatgtatatatttttttgtcattttagcacaattttgtttaacaataaattttttgaaaaaatggacaaagacattgtgccaaaagaaggaaatcgctttaaaaagcacttcgacccattgactaccaaagaaggtgggctttgcataaaatgacatcattatttaattttatcctaatttgttaaaaatttaagcaaagtcttccgtcacttttcgatccaccgaaattactggtgattattttgttctaccataacgatcaaaatgggctttggataatttttgaaaattttttaccgaaaaaatttaattttctattttattttgctttaaaaatatatgtcataatgtgcgaccaaattttaacaatggatttcttacaaattatggtcctaaagttcagaattttataattttttcaaaattctcaaagaattcgctaatttttagcccatgaatatttggatttttcattgtttcgtttggtgccaccgcatttggtggaccctggcacaattgtggtgaaaactgtgcgacagccaaatgttcttgaagagcacaattatcacaagcggccaattatgtacattatcaatcaattaattataaaatcaatcaatcatctcacacaagggataaagccaaatgccttatttttgacataaaaattgaaatttgaatttcaaaataattaaatttgtgtagcgatcgttcgctgccatcggtgccaaatttgcctctctttcagcaaaaccctggtcagaaaacggttgtattggctgcgttctccctccccaacttttgctgattctgatcactcgcaaaacaatgaatcgtcgatagaatcagcggcgaatttgcatgagaatacggcgacggaggagagaccgcgcgcagaaagttaggcaaaattttcttttggaaattttcgtgttttcctttaaatttaaaaatttaggggaagaattgatgttttgtaatccattgataactttcaaaatttaaagatttaataattaatgggcggggaaaacattcaaaaagaagcgaataaaattttaataactcaatagtataatacagtaaatcatcagagttttacatatattaattattagagccctgacttttaggcacgaaaattttttaattaggcaagaaaaatgtgaaaaaaggcaccaaaaagttcaagatagaagcttcaaaccaagttaaaaactcgttttttgtgcgtattaggccatagcaagttaacaaaaaaaggcaatgcctcaaaatccgggctctattaattattgaataatattctcaatttaaattctactcatttttggcacatcacaaaatgttggcgccgatgccaccgcgtgtatgacgacgcgtccgtctgacgataacgagtcatatttggatgaacaggtggcccaataaagcaattacgggttcccatcgtcctaatggggcggggtcattcgccgtggccaactcacagcaccttattttaagagttaattgccaccacatttttgtcatacacacggagcgaatatttaatttgttttaatcccttcttagggcctccgttggcatcggcttttcgccgtgcccgacaatgatttgtcgacactcctgcgcatttgcattgaatttggcggtggcacggcacagaattggtcaaatggcaacaaatgcattgttttcggttgcgcatttgcacaacaaaaaaatgccgacgctttgtgcccttttcggctgatttatgtgccagaacgacgcaccatttatggtcaaattgagcacaaacacgcacatttattcgctgaagcgatcaataatactatgaatgacagtgacaaagaagagaaggaagagagagaggaggaacagcagagaaaaattagagaaaaaaagatcgaatatggaaaaaagcaaagtgagggggaaaaagaagcgaaagaagaagtgatcggagatgaaccgggagagataggagagcagcgagaggaaagcagagaaaaagcgattgggtatgatcaacaaaatggaggggagaaagaagaagtgatcggagatggacaacagcaaagagaagaggaggcagagaaggagagggaattgaggaagatagcagcagaaagagggacaattactgctgatgagcaacggaaattgacctcaaatcaaaatggtaaaaagagaaaatctaataaatactaaaaagggaaatttcgctttttaatttgatttttcctgtattattaaagttttttataaattagtcattgaaaatgccattgcttcctcc

SEQ ID NO: 14987 - DNA, 1556 bp, Heterodera glycines
agtgccagcagctgggcatggagcagctgaagtgccaccgacgggcgccggtaggcgctcgggagggggccagaattcccaaatttcggccatttccccccccccccccgtttttggcacggaattccgatgtcctccgctttttcaatcgaattcttccctttttttttgctggagtgccaacagctgggcatggagcggccgaagtgccagcagctgggcatggagcagctgaagtgccaccgacgggcgccggtaggcgctcgggagggggccagaattcccaaatttcgcccatttcccccccgtttttggcacggaattccgatttcctcagcttttcaatcgaatttttccccccttttttttttttgctgaagtgccagcagctgggcatggagcagctgaaatgccgccgacgggcgccggtaggcgttcgggaagggtacaaatcccccgatttaaagaattattgtgttttaatttaaaaggttgtcccgtgtgtggcagacattttgccagccgacacaacatgctcaagcaccaaattgtccacaccggtaaaaacaattgcataactttaatatgggtataatttacaggagttaaaaaatacgaaggtcgtttatgtaaaagacgttttggctgggccgggaaccttacagtaattttcaaaattttgggtccatgacaaaaagttttttcgcagaaacatttcaaaacgaaacatcgtgccaaagggttcacctttttctgtccacactgtcaccgtggatttgaccttattgtaatctctgcttattatttaattatttcctaactttgaatttgaatttagagtgaagtgcgcaaacacaattttgtcgtacaccaccaatgaataatgaccagcaactgggcacaatgaattttatttcctattttaatcaatcaatattcatattcatttaattcttcgaaatagctatttaaaaaaagtcttataaccaattgaacatctaaccgcgtaaaaaatctcaaatgtcattaaaatcctgctttttttttgtgcattaaaaaccacaagacgatctttaaattactttaaataattgattatttagcataatgcttttaattttctttaacaggattgatatgtgattaatttttcctttgtttatttaaagctaaatttattttaaacttttacaaatactccgcattttggttttagtctcggctgataggcaattcagttttcctttcgtctatttaggtataattttatgaaatttaaagttttaatttatcgaatttatgaatacgccatttttcggccgtcgttagtcattacaattaaaacattttcaagccttttccatcactcgtcttttatgaacaccactgatccaatattcgatgctgctgttcattcgctcttttttttgtttcagtagacagagagttgattctcggttttatccaatgctgttaacaaatgcattacaatttggctctagtgcactttatgagaccaatcgacttttatgagtccaaccaattgacaatacctg

SEQ ID NO: 14988 - DNA, 1716 bp, Heterodera glycines
caagaagctaaaaagtaaaatctcagcgtttaggcaattgccaagaaagatttcagtaattaaataatgattgattatttttgtttgtaacttccttaaatgtttagattttcttgttttctcgtattattacattattcagactatattcttttgaatgatgccaaaaagatacgatttgttcgaatatgaacaaagttattgtacagaaagcaggtattgtcaattggttggactcataaaagtcgattagactcataaagtgcactagagccccattcggctttatgggagaatgaaataattttaaattgactatatttcaaattgcaattcttggaaactgaattatttttagctcaaaattttgaatcgcatttgtaggcaccagcaccataaaatcatcaatttactcaatgaacgacttcccatttgttttcatatttctattttgttaaagctttttattttgcatatcattttattcgcaggtatcttggcctatagcagtgaaactgctccaaacttggagaatttaatagttttggcgaatgtctgtaattcaaactgccagcccctaaaaattgacacaaaatcgcaaaactttgtcatttttggcaaaatctgttaacaaatcacactcaatttgcaaattttccctggcgacgcctatcggatccgctgtgccctcggcgccgctataccgtccttttcccccaaaaattacgccgtaaaaaaaaaaagtgtcttgaaaagcaaaaaaaaaaaaaaggccgagttacatggccgccaagcaaaattttggatctgggcccaggccgacagataaataagctttttttttggtcgtgccgcccgtgcccatccattatcaaagccggactgcgggccggtgttttcaaaattccagtcccaagtggattatttaaatttggtaatatgtttatcaaaattacctaattttagatttcgccgtggccctctatatttaaatctgtttcatcaattattgtactgctctttaaacttttcagcgattattaattattttcttttaccattttatttaaatgcttaattttattcttaaaagataatttctacagttcatcaatattataactgatctttgaacttttcaatgattaattattttttaccattttatttaaatggctaatcttttttttaaaatttcgcctcgacacttgcgcctcccatttaaaattgacatttgcgccgtcctacaaaatgccccgttcaaaataatccaaaaaatttatttaaacaaaattcttcatatattaatgcggtttattattttgttttcattggcatcaaatttgtctttgctgctgagtaagacattgacaaaaaataggtgttcgttttgattatttttgcatttcttttaattgcttttttattgttacacagtattttgagtacaagagtctctcccttgaaatttgacatttataggttttaaaaaatctaattatgtaccacccaagtttagatataacttttattaaaattttttcatcgaaaatgagcggcctctcacgattccaactctccactgctactgctggccagtaaaagcgtaaaagcgatggcgccccagcaaaaacgaaaactctgaaggaagtgttggacttcaaaagcgccggagatttcacgtcacggcaaaagtcgtgaatttgcaatataaaa

SEQ ID NO: 14989 - DNA, 2488 bp, Heterodera glycines
gaaaataataaaagatgaattttcggtagccaatactcggctctccggtagtcagtacctaattaagctcggccctccggtcaccaatacctcacaaggctcggatctccggtagccaatacctaattaaacttggcccgccagtaaccaatacctcgtaaggttcggcactccggtagccaatacctaattaaacttggcccgccagtaaccaatacctcgtaaggttcggcactcctgtagccaatacctaattaagcttggccctccggtcaccaatacctcgcaaggctctgacaccgaacactgaaaacttcattcttttgactatgaatttttatttttatgcaaattgttatcctcgtggtctaaaatttatatgagaataaaatatacctttcctattgatttggcaaaacgcataggatggaaaagggagtgggtaaactgagtttgcaatggtaaggagcaataatgaccgaatatgtgttggagaggaagggcagagctgaggaaaccaaataagtgaaggagaggggggtgaggtcacggcgtcatcttatcctgtaaatcgattcctctaaaaggaacaaatggaacgaggctatcgccaactgcttgcttaacaaaatccaatatttaagatatttttggtattggggttaagtttatttgaattattttccttttctccgtaatgtattttctctactcttctatatctgcttactttcactgttatttcagacctacatattgtctaaataatcgtttccgttagctatttttcaatatcttttcttccaacactatgttttattctcgaaccgttatcttccaagtgttcgtattcttgttctttatcaaactattctcttccttatacattacctaatgtttgccttactaactcatattaaattctcactatttaatattgactctcttcaaccacatttctgagttctctatctctatctcttacacccattattaattgtccttgattctatggtgcagtacaatatcctcatatgatttcttcatttattcctattacaagacctgcttcacgcatacatttagcccttatctaccctttctcgtcacatacagtcagtcagtcagctgtttgtcaaacctactttctattctcggttcaatcttagattcaaaattgtctatttctcttgtttcctttgaatattacttattcaatggaattgtaaatgttccttattataattagaattattttacgttgaattaggcaaggagcattgtttgtgtttatgattaaaattaacaagttttatataagttaataaatattatgcagaactttcaaacacactttatcctcaccctcaaaaaaacatacaatacacacacatacgcacacgcatagacacgcacacacgcgcacatgcatacatacgcatacacacgcacatgcatacatacgcatacacacacaccccatgtgtgtaatttttacacatttttgagtaattccttcatttaatcattatttttcttaatttttgttaaattgtatcttctattccttaataatttacaattgtgttacaaaaccctgactatttttctcgttaaatacctttttaatttataccttttaatattagtaatgacacattttttcaattttatttctgaataaacattcaaatgaaaaatacaagtgtaaaatagagaataaaggaaattataaaaagaaagtatgcaactcttttgatagatttgaaggcatatcagaattcttagagttccctttgaaaaaagtgagcaaacacacccagggaacggcttcacccttcggtccccaatccaaacactcacgcaccaggctgcgcattacaataatgaacagctcgtccatcttcatctcagatggatggcctggagtgttggagaggatcaaccaggggtcattccgtcccacatgagtgatataaacagagagaaagaaaagaagggaacaataagaaaactaatatacagaaaatttaattgagaatgcatacttatcatttgcgataaccaaattcgaggacttggaatgaatcattaataataccttttgtgaatatgggttgataatgttttgtgagggaatgagtatacactttgccttggattagattagggcgaataaaatgggggtaagttataatgatagggtcaggggggtcttcggagccatagcgtaagatttggtccttaacagtatcgtaatgaattttttgaacagtttgtgcatcaagggtgaaccctcttattttcaaatcgtgttctatttcaccggtgtccttgcgttgcagcttcatcccataattcttgcagccagcactaatgaactccaagatattgtggtcggggttttcgacggttagttctccaaggtgtccctttcctgttggtagtgagtggttttcctcggggtgaacgtagatgacgctgtccg

SEQ ID NO: 14990 - DNA, 1039 bp, Heterodera glycines
  unsure (1)..(1039): unsure at all n locations
tatatttcgaattattttacgtgattaggncaaggagcatgtttgtgtttatgatanaaattaacaagttttatataaagttaataaatattatgcagaactttcaaacacacttatcctcaccctcgaaaaaacatacaatacacacacatacgcacacgcatagacacgcacacacgcgattatgcatacatacgcataaacacacgttcacaaatgcttaataatttacaaatgctatcacacattgcttaattctgcatgcatttttacacatttttgagtaattccttcatttaatcaacatttttcttaatttttgttaaattgtatcttctattccttaataatttacaaattgtgtcttcttgctcttaattctgcatatttctacctaaaaacgacgttcccaaatgcttaataatttacaaattgtatcttccattgcttaattctgcatgcatgttcactccttaattatgcacttttctacctaaaaacgacatgttcgtgcactttttaaaattgtatcttctattccttaataatttacaaattgtaacttctttctcttaattctgcacttttctacctaaaaatgacgttcccaaatgcttaataatttacaaattgtaacttccattgcttaattctgcatgtattttcactccttaattatgcacttttctatctaaaaacgacaagttcgtgcactttttaaaattgtatcttctattccttaataatttacaaattgtaacttctttctcttaattctgcacttttctacctaaaaatgacgttcccaaatgcttaataatttacaaattgtaacttccattgcttaattctgcatgcattttcactccttaattatgcatttttctacctaaaaacgacaagttcgtgcacataatcaaaatgtatcttcaactccttaataatttacaaattgtaacttctttcgcttaattatgcatttttctacctaaaaatgacgttcccaanatgcttaataatttacaaatntgtgtcttcc

SEQ ID NO: 14991 - DNA, 1161 bp, Heterodera glycines
ttatttcctcaattatttcttagttgattcttcattaaattatatttattaattttactaattctgcgaaacgctttacgcccatcatatcaccaaattttattttctcatagcccatcaaaatgctggtaaaattttcaatttcattctgtaaaatctgatgtgaagacggggcaatgtcaatggaagctggaaagaaaagaaatttataaaaaatcaatttaaattttatttagcagataaatgtttggctcttggctatactaacagtttacgcgtccaatcaatggccaccctcattttcctaggccataactttgtttttttacttacattcttggcatcaatcaaaaacttaaagtcttgggaatttgtaaaatgaaagaaagaaaaaaagcaaatactgacactgagaaaaaatttaaaacgagaaaatacgaaaatcagcttctttttttttgaatattcaagattttttttgtctattgtttttaccccagaattatttattaaaaaaaattctacaaattttaagctttcgattgatagccaaagatgtaagcattgaccaagtatgaaaaaaaaagttgtggcctatgaagacgagtatggttattgattgtacgcctatactggaatagagtctaaaagatgccgagcaatttttctaaaaattgccaacaattttattttataaatcagaattttagatggagggaacggctgcacgaaaaccaatgaacgaagtaaattaaaaaaacagcaaatattttatgaaattagcgaaagggaaaaataaattcactcataatcgaaaatggtggaaaaaattcttttagattttttggtcaaaattgggagacacaaaacgaatattaattttttttttaattagtaccatgttgaagcaaaacgattgcccttaggagaacaaattcttccacacacaaattaatgtctttgaaagatttaattgattcacaaaacacgcgaatcggcacatcaaaagtgccgaaaaaaattggagcgaatccgttgggaagggttaatgtttcggcatcgggacaattgacgcagctgtagaaagtcttgctgaacacagcggtcagaattatgttgttgagtagtaaggcagtctaaaatgaataatttattatttat

SEQ ID NO: 14992 - DNA, 1669 bp, Heterodera glycines
  unsure (1)..(1669): unsure at all n locations
tttgggttttagtccatatttggccattttntggaaatttcacaagaaaaatgaaaaaaaaacgaaaaaatacacccctaaagatcaactttttggaaatttttaaaaattacaccncacaaaacacgaaaaatttgagttttcgtcgtcattttggcattttcaataaatattttcgtcatttttttgcgaacatttctttttttttaatgagaattttttcgaaatttggcaaacttggaggtgtttttgatacaacgaacaacaataaaaaatatgcatttttaagttttaaaccccattttttggttgtttattgtactttttaggtttatttaagcaaatattaaatatgcacaccttttttgggatttttgggggtttacaacatatattttggcattttttatccatattttggtccatatttggccatttttggcctttttagtccatatttcgggcttttttagtccatatttaatgtccatatttcgcgttttttagtccatataatttacaacccataattaacagatttgcagaaaaaatggacaaaaatcatactttttgagtcatttaatcggatgaaaagttatttctaaaaatatttggcattctgtcttttgtaattgtcttaaattttttggattcgaatttcgaaaagcactaaatcaatttctcggttgttgtggtctcggcatatatcatcattttgacaaaaattgcctaaggacaaaacgccaaaaaaccccactaatttaaaaattttgccgagattttcccttgtaaaaatggaagagccgatctcgagttaaaaacacaacttccaaaaaataaacagggattcgatagagggggtcaaaatatgggcctatgcaaaatttcaagaaaatttcaactgcagaaaaattttttcaactgggtgaatatttcaataactttccgacacttttacagttaaaaatggtatccacacgcagtaaaactgataaattcaagaaaatgggaaattcaagtactgaagcaaagcgaaagcggaaggaatggcgccaggagcacgcaagaaaagctggatcaacaccaaaaagtgatgaaattttgataaaatttcatttcaattaaaaatcaaatttttacaggtccacgacaaaccacaaaagctccatcaacaaccggagagggaacatcgaccgagacaatgccatcgactttgaatgccgagccccgtaagtgcaaaaatcacaatttttgagataattttcatttaaggccaagtccacggccactttcaacaacgccgatcaggcgccatgtccgcacgcgaccaacaactaccgaccaaacaaccggcatatcaataatagtgaataattaaatttaattattgctttttctattacaaaaaaaaagcatattataataattaagcattaactcgattaaaatattccttataaattggtactttttttccgattcaacaaaagcacccaaaatttgttgggtgatttatgaaagatgccagcacggagcacccccataacggaaaaattgctaattagttagtcaagcagataagtgataaattaattgcctgatcaatcaatggaagttgccaaattgctggtatcgttttggccatttcaatgcacaaaaaacagtcaat

SEQ ID NO: 14993 - DNA, 1714 bp, Heterodera glycines
taataaatagccttaaaattttcaaaatttttctcgatggcgcctaacggcactgccggactcccattttaccatatttgttgaaaaatggtgaccaaaatggcaaaaatagtaatttttggtgaaaaacggctaaaaaattttagatttctcgattcccgaatcgagaaatttctcgggttttttggggtctcagttctcgtatcgtttcccggggtcatttcccggtctcggtctcggttctcggtaaaaatcatttctcgcacatcctaatacagagactctcgaacagcgctattaactactagacttattttatcaacttaccgtaaattggtcgcactacgtatatcaattgatgtatgaatttcatgttcaccgaagtgtctgtatttacaatttttttggcgatttcattcagttcaaccacaagcgatggaagcttttctgccattatcaattttgttcgtttgtcctttgcatttttcagatttttaatctacaaattaggaaaatgaaaaaaatagatgataaaaaaatatctcggctctgatttttttattttttacatatggatgtgaaataatcgttgtcagccgataattgaccttgaaaatctctgcttgtctacctttttcaaaatttacctccacccaactgtaaaaatgcaaacaatttaaactaaaagcaagggacattcaattgaaacgtgctggcgcgtttcttaaaactgccaatgggtttgaaaacaaaaaatgggtaaaataattaaattaatagtttggctcaaattcaaccaaattaatatttcgtggtatcattcaatagccttaattgtactctattagaatatgatttttcaaaaatttttacttaagtataaaaaaagttatggtcacaaaattgcaaaaaatcttaagtcagcattttttgttcagaacttttttgaaactcaatgaaattttctaaaattttaaatataaatagagaattcttagggctatcgaaatataaattaattttggttaaatttcattttaaagactttaaaattttaaatgtttattattatatatgcattaccattgcaaaaaacatagcctgttcaatgctttataacttcttttatacttaagttaaaaatttaagaaaattatattctgaaagagaacaattaaagctattgaatgataccacgaaatattaatttggttgaatttgagccaagctattaatttaattattttacccattttttgttttcaaacccattggcagttttaacaaacgcgcatgggtggcagtttttaacaaacgcgctagcaccatattttctttacattatttcaattgaaatttaattaattaaaaatattaaactttaaaattattatttttttcttttttaaacagccgaaaaacccacaaattaactaaatatttggtcctttttttgtaaattctgttaacaagtctcactcaaaatcaaaaaatttaagagattgttaatttatttaaaaaaaatccagaattttgggacgcagaaaatttcaaggccctcccccccccccccgatatgaaagtttttaaaaattttccaacgaataatggaaaaattcttcgaaatcatccacaaaacgaaaataaaaaaattttatgggtacatttttgaatataggcaattttcgtaacaaagtgcactcaaattttcaaa

SEQ ID NO: 14994 - DNA, 2175 bp, Heterodera glycines
tactccccgacgaggatggttcagtcatccccgacactttttcggggaatttactccccgttccccgacttttctctccccgagggtcaggaaggtggtatgggcgttgtctttagaggttttcccatttcttttatcccactttctcccacactccgcttccttttggcaccaaaaatattcaaaattaaattattattattattataataagttatttttatttaattaatttttttatttacctctttcttcagtaattctttcttctcatcaacatcaatttgttctgctgctgctgtggatggtgatgctagtgatgattttttgtcatcatttggggcaacattttcatctttttccacaggagaatcgcctcctttggcacagaaaattccgagaaatatttttgaaaaaaataaaaccaaaattaattggcaattattattcattgttcactatttttttaatttttaaattaataaaatgaatggaacgcaattacatttatatatttgcatttactaaattgaatgtaattgacaacattataatgcaaaggaagtggcgcaaaaaattggtaaaaatcgaataaataattattatcgaaaaacggaaattgttgtatttttgtgattttcatatgcattattctaaagggtcatgaattattattaaaaaacatttcaataaacaattattttggaaaactaataagaaaatgcaaaaaattttggcatttttaatggaaatcttaagaccataaattccagcccaaaattttaggtttaggatcccgattttcacaggcaggaattgttaatcaggctgggatgggaataccggactcaaattctagttcaatttgccggtatcctatcatgaaatccttcaaaaaattgggatatggagcaggatcccggataaatcccgacggtaccctgaaccgtcttggctctacagataatgagtattttcagggttcccattttacacctttttattggttgccttttttaataaatatattatactgtttttatacattgtgtaaggagtttgtgtttacgttttgcgtaaaacaccgattgttttgtgtagatatttactagcgctggtcgataccgaaaatttcctgaaactcaagactagaccgagattgaccgcgagaaccgagacctgattttgtatgttgaagagtttgacaatttttgataaacgaaattgaaaatgaaataaattttttattcattatatcaagtaaattatttgcattattaaaacaaaaaaaaaacataattagttattgcgtttaaagcttcacaaaatttaatgcttgtaataatattattaatgattaataaccgggtgtgacgccacccaagtagggatgcacgagagttccggttctcgcttctcgactcgagaaatttctcggggttttcgcttctcgttcacggtctcgggtttttagtgtcggaaaccgagaaatttttagactgttaaggttgactattgcgggcgggggggggggtcgccggcgaaggggaaaagagaaaaattattgtaactttgaataaatttcttaacaaaatttaataaaaataaaaaattttcccatcggcgctctgttggcggcgccggcccccaaaattttactaaaatttcaaaagttgacttaaaattgccatttttgatgaaattctgtttaaaaaagttaaaaatttccactcggtctcggggtcaagtctcggtctcgagtctcgggaaattttcggtctcgagcagcactagttttcatcaaacatcttttgaaaaagcacaccgcaaaaaaaatttctcgggttttcttcttgtttctcgttaaaaacaatttctcgcacatccctaagccaaaatgtattggcttcgtccctaacctattgtagaggtgcaatccagctgattgccatgcttgacggggcccagaacccaagaggctaatgtaaatttgttatttttttaaatttgatttattaagtttttaattggtcgttttttacttggtttctctaaaaataattgatgaaggaatggactgaaaaatcattagaaaaatgaccaatttttggtccaaatttaaatgtcgtatataccaaccaaaacagaaaatggcaaattggcaaaaagcaattc

SEQ ID NO: 14995 - DNA, 3785 bp, Heterodera glycines
  unsure (1)..(3785): unsure at all n locations
atcagtagggaatagaattacatggaaatccatattttttcctggactgtgggaggcctgaaacgcacgaaaaacatgtttttagcttggtttgaagcttctaggaaggatttctatatccatatttccatatttttccatattttggcattttggtccatattttatgtccatattttggcatttttcaaaaaaacctctattagaacggcccccagcagctaaattagcctttttgagcccaaaacccgaaaaatttttcaaaaaatcattttttcgccaaaatttctcgagaatattgaataaatttaaattttcttaaaaattaataaattatgtcaaaaataagcaaaaaagcgaaaatttcgcttttgttgttgattttgcgctaaaaaaattaataaattttagcttttatgttttttttcttttaaaatgattgcacgtaattgccgaaaaaattcgagaccaatttccgaatgttgaccgactaattgcaaaacgaaagccgtctttgtcaaagcgccttaccgagtcaaaaaatttggaaatgtatctcatatgcaatttcaaccaataaatttgaagaaattttgcactcaattttgaaaaatttatgtccatattttgacatttttgccatttatgtccatattttgcgatttttggtccatattttatggccatatttcgcgattttatatccatataattacactccctactcatcagacccccattcttaccagtgcttaatttagtcccgccgggaccgggacctgaaaaaccgggaattcccggctcggtcccggccccgaccagccctagttaaaatcgcatttttgaagctcaagtttaaaaacaacataaaaatcaataaattttaattaatttataatataactaaataatttaaaaaatctgttaatttttgttaaattggtccaaaattgccgcggagtcccaaattccgcgcatcgcgcaaaaaaaaaaccgcggccgcgcattcaaattgccgcggccgtgaccgcggatcgcgcaaaaaaaatgccgcgaattgcggatcgcggtcgcgctccacccctgctgcccatatgtgtcgtctcactcacactgtgtcgccgacaaaatggacttggactcggccgcccaactcgccgagtgccggcaatgtgtacacgccgaagaagacgagcccggttgcctgaaaatgtgatgaaaacattggcaaatgcctaaataattcttcactgatcagtgagtgagtgatcagcaggaacaggccaaggatattaattcaaaactataaaatttctttttttctgtaaccaatagaatttaatttgtttcaaaagctaaaattttaagacttaaaaaatagaaatttctgaatatttttagtaaaatttggaaacaagtattagcccttgagagcgaaaaacaaatcgaacccaaaattaatgggcttgtccttaaatagcacaagattgctgttgaaattgacatgaaatttgccattttgtcaacaatgtccttgggaatttgggaatttccctgatctgttcttgaatttgctttctgctctgatctcctcaactgttgctgaaacataccattctgtggcgagacggacagttcgcattcggccgttttttgacgtgcgccatgggacagtgccgagttgggacccaaaaacagcgatttgtaagtgatttgctcggcattttttgatcagaattaccacctatacaattgcaaaaattgtgctggacgctggcgcacactggtgatagcccgaaaatgggctgtcgttgctgatcagaagcagcagcggaggatgggagacgaatgtcgagaaactaaacattgagagagacaatcagtgacgactgattgttgcttaaactgtagaagtttggttaattattattagggcccggatgggggcagagaccccgcggggattttgcgacggttcccacactcgcccccggactttttggtaaaaataatggggacggagcctccgcaaaaatcggcatttttaaagaagctcccgtccccgcagtttgattaatccccgctcgtccaagtccccacattttcctatacagctagagcaggattaatggcataattagtgattattgccaaaatgattggaaagaataagttcaagagaagccaagtgatcagtaacattcattagagtgcgagggacgggagagaagcgaattttgtcaaaaaaatgatcaaatttaaggatttttaggttaaggtcaagttttaaaaacatctgaggacaacgcatccaccacactgaccaccgccagcagcggcggcagaggaggcgaggccgatgtaatcatgataatccggggattagtgtgctatttgaaaccaaaaaattccagagactcaaaacaaaaccgcggcttgtccgaggcttgagaccgaaaaaatcgaggccatcaagccttttctcgatatcaaaaacccaccataatgggagctattttaaaacattttgcttacagcgccgggttttttttgaaaacttttgtgatttttttttgaactttcgagcgctaatttagacattttaagctatcaaatgatagcaagaaattaaaaaattagttgctttggagcaaacttatgaataatttgatggttttttttgacaatatcattcataaatctgaaaattcattaaaattaacagacactgtccccccgaacgtgcgacacttttgacgatgcctacggcggtggctcatcatcaattgacggacattcggtgggagggaaggggaaaatattgccgtaatgggcacagggggacagagcggtggtccactattaaaaacggaaacgcacacaaatttggctttatcttgttgactcggttagagacaatgtgaaaaaacgcaattttgcggaaattggcacggattttattccattaaaaattcccaaattttcccccagcggcgcttctattagcatcaccggaatctgaatttggggggtcaaaagctgcgaacttttagtgggaacactcactgtccattcaaagggttaaaatttgccattgtaaaaaataacgaacgaccaaaacggcacagatgaccacggtgcactcgtcgtcaaatcggcattttgtcacctccaccgttccgccggtgtccatcgtggtcaatttgtcctcctgctgcaactgcacggccaacaattgctgtcgctgcaacaacagcaacgagttcaagcagttaccgccccctctggcggagggcggcggcggtgagcaatgattggtcaaatgatgcgccggtgccgacagagcgaaacattctcgtcaacattttgtccattgtgataaagcaggggagttcaaatgctttcttttattttcgttttatcaacactatcgctcacaaaatttgaatatttccggaacaaaaacaaggtctaggaaggaacccaaattttctgtccatatagatgggcaggaacttacagaggaatgcatctcctaggcaagctaattccgaaatgttgcgcaaacatcatagaaaatgaagggaataccgattttcagaatatcgcgtggcttcctccgatccagtcgggcaactgtggattcaggcttttagcaaactgaatttctcaagncgttagaatttgccccagaaggctnngtattgaanntgaaacgtatctttacaggtttcgtagcaagaanaagcgatttctatccatccctcgtgcttggtatcaaaaca

SEQ ID NO: 14996 - DNA, 2209 bp, Heterodera glycines
aatttttaataattttaaataaattaaagcaaaaaaaaaaagttgtaagaaaaatttacaataaaataattagaaatattactaattaaaataaataaagattatgatgatttgctcgtcgaagattatcatttttatatgtgatatgaatggcatccgccgatggggggcgagtgacaaagttcgttcggtatcgcccaaccaaacaataattaaagcgcctccccccaaaccgcatcattagacgtcgtccacccccaccaaatcgtcgccaaatgactctgatttttgattgattggatcggcaaaggtggtactgctgctgctggtggtggtggtggaggtgggggcggattggatttgatggggcggcgcggcattgatggggggggggggagcgggggaaggacgaataatggcgcggaagaaagaggaaagtaagcggggggtcaccagcagctgggcgcggcccaccttggcgcagtggaacttatctatgtattttctaaccgatcctagttttattttagaaatttcagtatgatatgtgcccgatttgcataccaatgccaaaaaattcattaattttcaaaattaaaagggggagaagcggagctcagtcggctttattttggcacaaggtgccgaaacgggggatccgcgctaaattgggtggattaatttgagcatgccggggatggggcaggggttggtggggacaagaaactcgtcgtacccccacaatccggcgttgatgaaaggtgatgatgttgtgacctccaaccgctggacgaggggcggggtggtcatctccatctccacaaaatcagtggcggcaccggtggcggagagattagtggtggacaaatgaatgaaaggatggaattaacgggacgaatgtgtacaaattgtgtaacaaaagtatatatatatagcagtaatgattggatgattatgataattcagtgatggacagaatgaatgaataaatggatgacctcctcctcagtgtgtgtgcttttctcaatgagcgaaaactgcggggctgctgctcgagatattttacgagaatttaagaaagatggtgaccaagaattgggccctcccccccccccctccccaaattcccaaatgcgagaccgggaatgatcctgaaactcgagaccgagaacttcgagaagaccaaaaaaaaactcgaaatttctcaactcgagactgagtctctcgagaagcctagtaaactgacccccgtcgccctcccccaaaaaaacaggaaccaaaattttaaactataattaagtatattgatattaccatttgaatcaaaatttgcacgatttaaaaaataattctatcgaaaaaaattggagattttctacatatatctctctcaaaatagaaatgaaatggacaaagaatgcatatatatatatatatatatatatatatatatatatatatatatatatatatatatatatatatatatatatatatatatacgtatgtgtacttaaacaacacataaatatggtaccattcaaaatcatggtcagagcactgaaaggcaaacaataggggcttaaaggaagaagagcaatggttagttaccgatttttgactgctgccatttttaaagtggtggcttaacttaagcacttttgtcgcgagaagaattgagtaaaagcgcaaatgttttgtgaaatagtaacaatttggccatattataggaagggtaattcaaattcatcaaatgaatttaaaaaaaattaatttagaaaagattgaggcctggctgtggcgacagacgcgcgacagggaaatttcatggaactttagttaaaatttcggcggaggggggggggggggtggtagttcagtaccaaaattttcatttttcgaaaattttgcattaattttttggaaaatgtgggtgaagcagattttagaggggttaaaatatggaaaaaatcaaaattttcacagcacaaaatacacaattttcccttaaaatttcgagtgtcctcccccctggggctgtcctccctgctaaatgatagtggacagaggggacaacagcagcagaaaagtgacgggacaagcagcagcagctgggccggggtcaattggtgacacttggccaccaattgggggcggggaggggagactgaggaggacagaaccaattgagaaataccctcaaacgaag

SEQ ID NO: 14997 - DNA, 2431 bp, Heterodera glycines
cccactgatcagtcaaacaccaccgacgaatgaacacacatatacaacactagaaaaatggtctgaatttgagaaggtgtttgtttgttcgtccacattcatcgctgctgctgctgctgtgcgcctgccgaggatgactcaacggttggctgtgaggtggtggccaaaccggcatttttgcttcccggcccgtacatatctgaaaaaggaataaaaagaggtttttcaataaaaaattataattaaaaaagcacttacggacaaatgagccgtcctcattgtacccccggtcattgtcagtgccaaattcggtcaatgaatcctaaaggagcccatttaaaaatgttttaattgtttacaaattagaaaaaatcttctttttttttgttgaaaacgcaccgattccgactctccgccaccgccccaaacgtgtccggaaagtgaacgattcgtctcttctcccctgcaaaaatagttcgtttataaggcagggatataaaaatttcaatgattttcaagatttttataaactgatcgatgccctaagtttagattgccataatcccatgttttttttttgtcggatgaattggtgaaatatctgagttctgatgatcagaaaagattttttccaaacacggactcgctcactttccaaactcctcaaattgacgctctttgggcaacattggctcccgcccgtgcaaccgctccttctccgccaccggatatttgcgaccacgctggtagaccaagcagcacgcaacgcacacacagaacagcaacagcaacaggatgagcagcacagcgagcacccagtagagggtggcacgtcgtggagctgacgatggaaaggaatgaatttttgattgacattcaaattttcaaaaaaaaaattcgataaatttccatttttagtgaaaagatccatcctacttgataattctcaagaactggtcagaaaacaaagaaagcttttgaagaaatgtatcatcatgatccatataaaccttccaaaatgatcaaaaccactaatatattgaattaattgaaaacttccttcaaaatgttttaaaattgaagtgagtgatcaaacggcaaaaatcccttttcaacaaaaaaatgttcaaatgccaatcacagcacttacaaactcccgccgttgtgatgtgatggacacgcgactcggtgctggacaacgtgctgccagcctcgtcccgttgcaccgccacaaccttcacatcgtatttggtgccttgcgtcagaccgtccactgttaactgtataaagaaattggtggtgatcgatgatcagcaaaagacggattaagtgtttcaaacaagaatgagagaaatttatcgtgtttttaggccccgatttcgaactcaagggtggggagttagttattccggccgcaaagcgttcctctcccgaaattttcaagaaaaaattttttcagggattttttgatccgtgatcaaaaaaagtcaagtaaagaactcattaggaatcaacgtttttgcgcacacaactgctggactacctgcagcgttgatttgtccaccggatgcttctcctgccacggcgccgtttcgtcgtccgcctcacggtagcgcaccaaaaacgcgttgcccaccggcgcaccgctggcctcgttgaaagcgcccggcacaaatgtgatgttgaaatggtcttcgccgatgctctccttgaccagctggggacggcttggctctgctgcgaaagcaattggcattttgaaattgaggagtggccaaaacattggcagaaataataataaaaaattataatttggcatttttttaaagaatgcgctttaaaaaaaaattacataatttgaaaaaccttataaatatatttttaaaaattatttaaaagaaattagcaatgaatgcttttgtgtcttttgattagactaaaagtgttattttgcggtgtgagattatataaatccatcacaagattcaagaatatttctgacgcgattaatgcttaatcaggattaacattaaatattactgtaacagaatcgtctcaccccctggattttcattacaacaaacaggcgattttttttttgttgataacagtattaaaaatgaggcaatgcgaaaaatgatttgaataatgcaaaagttaattctctctccatcccgcgcccaaaaaaaggggaaaaagttggaatggaatggaaaatttgaaaaaaagcacttgataatagaaggaataaatagacagacggatggaattgcccaactttcaaacccaaaatgctcaatgacaacaaaatcccctacccattgttataacaaccatttgaaatgttggacatagtacaaggccccagacaataatacacacaatgaatgtgaatgggttttgaataaagaacaaaacataatgatgggaa

SEQ ID NO: 14998 - DNA, 1672 bp, Heterodera glycines
gtcaactgacgacagcagtagaagtaaaagcgagcaaatgggaggggatgaagcacagctgaggatgactgctgctgaccgatggagggggggggggtgaggggataagaaggataagccgcaaaaatgcagaggagtaaaagcaacgagccaacccacagcagtaaatggggggagggagagatgggaggagggaaaatgtggccaacaaacaagcaaagaaatgcgagaaaatgggagaggaggaaaagtgaaatttgtggacatgaaacggaagggggaggaaggagggcaatgggccaagagaaagaattttggggccaaagggataataatagtcctggagcagagcaacgcaggggggggggggattattacacaacagcagcagcaatagaggaatatagaagggacagaacaaacaaattttggctggattatgatcgggaaatgtttgataaactttgaaaagcatccatcggaagtaatttgggagggggaagggtgacaacaaaaggtgttgaaaatgaggcaattgatgaagaggaaaatctgtctgtggtaataatgctgggattcaaaatttatggtggaatggcaaattggatggaaatgacgaaagcgtcgatggacggaacagctgactgacactgaggctttgaaagcttgcgcaaaaaacgtgttgccgcacaaaaatttgcatataagtgtcaatttagacaaaattaaaaaaagtataaagcataaaatattaaatataaataattgtgtaagaattaaatcctccttttaaatctaaccatcaatgaatgcattaatggttcttatgataagactgactcatccaaatttggttaattaaaaagaaaagaaatgttcataagagcaaatgctgcgcagaagcaaatggaaaattatgcataaattacttttaataaaatgacaaagagaataaaatacataaattaatatggcggaggaaatgggaacaaatacataaataaataaatgagtaaggcgggaaagaaaggacgcgcgccatttccattcaaatgacaagtgccgaattaaaggaattgagcagagtgttggagggcggaggagggagggaatggcacccaccacaaaacaaaattggtgggaaatttaattaaaattgacagaaagtgaatgtgccggcctggcggcggtaagtggggggggggggagaggaaataatattaaacattagggaggcatggcaaaccctcactcttgagcattttttggttgttgacccaagaaaggcatttaggtcggattttggaggatgggtggattttgtcaaccatcccatgcaaccaaaaatttcgaattaggctatttaactaaaaaaatatataaaatttttataattttttttttggtgcgccgtttcagccagcgacattttgtcttgcattttttgtttttgttttttatagtaaaatctccatggaaccgatgagtgttcgaacatcacatttgataatcgtgataaaagagaaagagacagcgagaagaaacctccaaaaaaaggcttattgggggaggggaagaagccacaaattttaacaaatttaattgtaaatggttagacgaaggcacatacacaaagcgcccgccatatgtccgtccccaaaaaagcaaagca

SEQ ID NO: 14999 - DNA, 2307 bp, Heterodera glycines
  unsure (1)..(2307): unsure at all n locations
tcttattgcaaattgataaaatcatttnttgttaatattttttctaattcaataatatgtaaatctaggctttataatcgcgttttaatgtacatatttatttttgatcagcgatgttttgacatgctattagcatttttggttgattgagaaaagattggataaatttgtagatattaaaataattttgccgaaaattggttggatcggggttagcagcaggaattgcgagtatttagtccgtgttttcccttgcgggacgggccaactccgtctgagtcagctttgagtcaatataactttgttgttgatcgaatccaaccaatcttagaataattcaaatttataccaaaaaatggaaaattttcttaattttcttcaaaattaataattagggcagcaacttttagtgaaaaaactttttttttgctcaattgttttgaagaaagaagctcaaaaaacgcatttctgcgttaaaattttttcatttggacgtcacttttcgtcactataaatcactattttggcgacttcgtcactaaaatagttaaaaatcactattttggcgtttcgtcactattttttaactatttcgggatttttcgtctctaaaagttctgccctattaataatagctttagtatttttcttcaaaatgatttttcaaactattttagctatttcatgatatttagcttaaattcgacgaatttgaataattttggagaattttcccctcaatttgggaaaatttatatgcatattttttactttttatgtgcatattttgcaatttttggtgcagaatattttgcaatttttggtgcagaatcattttgagtattgagcaatggagtcaaaatacaccccatggacggtaaaaaagaaaaaaaagcgacataaatctttttatggataattacagaaaaaaattggcgttctgtcacaattaatttttatctttacttatctcaattttatgtactatctcttcattcttaataatgtaaaaaacatttacttcatcctgtttaactttttttctgtttgttaaatccacaccaaattttgcatatcgatagagaaaaggaaaatgagcaaactttcagtgttttgagtaaaaattttggcctagaacattactaaaaatgggatgaaaaaaatttgcatttctttttctctccttttggcgtactattttcatgtctctaacacattaaaaaacaccaaattcgaaaattctaataattttggttataagggtacaaaatcactttgaacatttagaatcaatagaaaaaagaataaatttagcattttggttagaaagagctgcctaggacttgagttataacgtgatgaacatttgaaactcgcacaacttttcaaaaaaataacctttttttgcctttttttatgggaccaatgatgttaatgattaccaaattatttcactattcgtctctattttggaatttttactcactattttagttaactatttcaagattttccgtcactaaaaatcgctattttttattacatttttcaaataacgaaaaatgtctgctaatatttctgaaaaggatgaagcattgagcgatctcaactgtctcttcgttcaaatgaagaacaagaagttcagcttcagtttgatgtcaaaagtggcacagaaatttggcgatggtggagtcgccgcaaaagtccttctgccatacgaagtgtacaaagagtgagtcgcgtcgaggatgggattcaatgcgttcctttctttttgcctttagggctgtcgatcttttggcttccgctcgctttgaaattgattatcgcgtggtgatgtacacttttgtttacttttttcttggaagaaatcgcccttttcagtcactttcttcccactttcaaagccattttcctccatctcagttttgacgattggcaattggcgatggaacgtttttttgagatcacagaattgcgtcagactcatcgaggctttccacgagaggaaatgcacacgctcagtcactcatattcggtaataaaacattaaaactgaaacgctttggtccgtcgtttctttcttctctctccgcttttattcttcgcttactaagtttatacctctgaaatgcgtttgtttcagcttgctttgttggaaaatgccaatttcaacaaagaaactgacaggacttctgagtttctcttcactgactatggagacttggccaatttcattgacaattgcttcgaatgccaatgccgtcaattgtcttttctcattttactggagggaaaagcgttgat

SEQ ID NO: 15000 - DNA, 1334 bp, Heterodera glycines
aaagtaagtagttcattttttacattttttaaatataaaacacgctcatgtccatcactttattcagtttatgaagtgcactcccgcgcttctgaagtgtgcaccgcccgtggcactgctcagacaattgcacgaagcggtgggacacgagggacaaaaccttatgcttgtacgattgaagtttggactcacatcgcagtgcgacaacattaagcgaattgtagactttggtcagttgattgcatgggcgtagccagacccttggctttgggggggggggccgaagtcaaaaattaaatttttagggttttgtttttcttttttcattcaaatggtaaaatgggggtctggcgtatacatgaaagggggggggtcgtagcgaaggggaaaattctaaaaatttggctttttcttaataaactcgttagaaaatttttttgagaattttaatgcaatttttgttaaaatagtgctaatgaacggaatgcattttcttgtccacttttatgggcacattttggattaaaattttgttggttttaatatttttttaaggtgaatccagctttagcgttgttgaggactgtgggcccttattcacagaaaaccaattaaagtttatggtcgacgaacaattgatcactcaaacttggaggaattccaatgccatgacagaaaccaaggaggaaaattgtaaatagcaaccaccgtaaatattttccccggttcacgactgactgattttggaagcctaatttgccgttaattcctttccccgcacctgtttttgtttcccagaaaccatccaaagttctcatctactgtatttatatgtgtgaaaaataaatatactgtatttaccatgacagatattgagttgtggaactgtgctagagttctttgaaaataaaacaaaaaatgctcagatcctaagattttaatttcaaaaacaaaatgactttttttgtcgtgacaccacatcttttttgaatttaaatttgaaaaacgagacaataagttttagaattaagcacatttccgaacactgattaaaaataacaatcacagtggataatgtgcgtgatcacatttattttatcctgaagatgaaagtgtgcaagtcttacacaaatggataatcagcgtgtcgaatacatccgtcatgccgaaatgagcagcgatggaagcgcatttgcggtagccggacaaacatttctgacaaacgtaattatgaaaggattattagccatgcagttttgtaaaaaatttccaaaattttttcatatattgtaaaaggaagtaaactataatattgctcacacctgtcttgtgat

SEQ ID NO: 15001 - DNA, 4717 bp, Heterodera glycines
  unsure (1)..(4717): unsure at all n locations
tttttggtcccatattttatgcccatatttcgcgattttatatccatattttggatgccctatttatgatggtgcagggaatgagaataagagganaactatagagagatgaaaaagaagcaagagaggggacagaatgaagaaattctgagaagaaattagagaaccgtgagagagagacagaggtgagaggacgtgagagagagaagggaaagagaaggaaagagagagataaagagcagagagagagagaagagagagggcagagaaagcgaagagagagaaagcagagagataaagagataaaaagagaaagcagagagagagaagagagagtaaaagagaaagtgagaaaaaattagagtcgtgagagagagagagagagagaggtgagaggacgtgagagagagagaagagagaggacagagaaagcgaagagagagaaagaaatgagagaaagaagaaaagggagagaaagggagagagataaagagagggagagagagagagaaatacggatagagagaaagagagagagtgaaagaaatagagatagaaacagggagagagagagggcgaagggagagaaggaaagaggcagaaagaaagagaaagcaagagaaagcaagagggagagagaggaataaagagcggttcgctctttctatatattaattttgcagtgtgtgtcacaaattaaacaaaaaatttaaataaaattttgacgcgattgtttttatttggatggaagaaatgaagtgaaaaaacagagataatagagataagttgtattgtaagaaagagtgaagaagagagagagatgaagacagttaggaacaaagagcggagagtaaaggagagagaaatgattagagaaacaggaaaaaagagagagaaagtatgggagtgaatgagacagagacaaataagagaaagagagagaggggggagagagaaagaagaggagcgagagagagagaaaaaaggacagaaagagaaagagaagagggagagagtgagagaatgattaaatcgagagagaataaaaaaggagttgagagaatgagaaaaaggagagagagataaagagaaaacaggaggtagagagagagagggggagagagaagagaagcgagagagagagagagaaacagaagagggagaaagagaaagaaagggagaagaggagagagagtgatagagagagaaaagaagagagagagaaagagagagagagagaagaagagagagagaaagaagaaaggagagagaggaagagagagagaaaaagagaagagggagaaagaaagaaaggaggagagagagagagtgaaaagaggagagagatagaaagaggagagagagagagaagagggagaaagaaagaaaggagagaagggagagagagagagagagaagaggagggagagaagaggagagagatagaaaagaggagagagagagaaagaaaaaaggagagccacgaggagagtgagaaaaagaggagagaaacgaagagagagagatagcaagaggcagggtgagaaagaaagagagaaggagacagagagaaaagaggagggagtgaagaggagagagatagaaagaggagagagagagagagaaaagaggagagagaggaagagagagagaaagaaagagaggaggagagagagagaaaagaggagagagagagagaaagaaaagaggagggagagaagaggagagagatagaaaagaggagggagagaaagaaagagaggagagaagggagagaaaagaggagggagtgaagaggagagagatagaaagaggagagagagagaaaagaggagagagaggaagaggagagagatagaaaagaggaggaagagagagagagagaaaaagaggagagggagaaagaaagagaggtgagagagagagaagataatagtttttttcaaagctcggctagcgcgaggtgcgcgagcgaagcgagcgcgcctgncgctagttttattgaatcaaaagtttttttttttgaaaatctaccattttgcaaaaaattgaaaatttcgtgttaattattttgaacttactttttctttttttttaaattgcttttttcatttttgtttaggaatttctcgaatttgtccgcgcggtgtttgcgctgcgcggccgcagcgaccaatgcgagcggaaacgaaaagccgactctcttctggtggccggcactggcggcggtgcgtcggctccaccgcaacaacgacgcggctccaccctcgtgcgaaaaacaacgattgtgcgcagtgcggtaaaaaaaattgttaaaattttagcgagatttttccggagagacaatgaaattcccatttatggacctgtactgatcactactgatctgccgaatattgatggatcaatctaaaattaatccccctcccctaattaatccctcctaaggcaatgtttgcgtcggcaatcaccgcgcccaccgctggccctgccattgcgcattttgggcgcgcgcggagttcgtcgggcgcggacggtgacgcaatgacacggacagcaagcgaacagcgcgcattggttctgtttaaagtgcgtgcggaatgttgaaaagcaccaagcggcttttgagggttgaaatttttcgagacttggtcgaaaaaacttaggccaaggcatcaaaaaaaaacaagaaatttttaaaagcgagaccaacctaaactcctagagtttaggcccgatgtgcccctaaaaacagataaattctagaaactccaggaaattgtttgtagattaggagaaatcctaaaaaacctgggttttcagtcccttaattacctaattaggtaattaattattacggtgtttttgtcaaattgcgctattatttggacagcaggaattggacacggatgagaaaggctttctgacgaccaacgattttgaacagtttttcgcctgccaacagaagccaatgatttttgtaagttgactaaagcaactgacaaatcagagcaaattttgacaaaaacctttttaattgaactcatttaatttgtaaattataatattttaaataaaatttagtgatataacattttttagaggtttttcgagatcgctgatcacgaatctgcaatttttcaattttactttggttttaccgatggatttcggtttcaggaaatcacaaaaatttattcctaagatatacaacagtcacaaatcaatattgatcattcaagcaaaaaacaacaatttctatgagcacgtcaataattattccataattcaaattgatcaatcatttctcagcaaatcattcattaactgctgcagctgatcacttgggccgggatttgcgtcgaaaagcctaaaaattgaaaaacaatcaatttcaatttttgaaaaagcatcacttacccatcgcctatttgttcatcacgatgcacacgaatgtcaattttgttccactgatcaaaacatttccactcaatcgcttcttcttcccattttgtccatttgctttcatctcgcgcaattggatgacggaccaacagaaaacgatagctgctattgtaagttcttttcaatgccagttgttcccgagtcaattcattggtcagcacaaagggcacaacggaggtatcgacagacgttggacgtatccaaatggaaacgatgaaattgacgggagatgaagccgaggcaaatgtctaaaatgtgggaaaattgactaaagaaacacggaatcaaatcacctttttgagcggctcgatttttgatgcccatttttccaaaactaaatgcaacgtgcatttgaatgtctttggcacaccgtcaggacgaggagtgaaaagccatttggccaatgcttgtccatccgatgccgcggcactgtcatcgcatggaaattcggcgaagaaaccgtcatgaaagagattgaaaaagcgaagcgatggacagtcgtcgagaaatgacggggcgaatttgcgcaaacggtggaaatatggggcaggcgatcgtaagccatgaatgttttttccgagcaatgaccaaatgtgggtaacgagcatatcaaaaatgtagctttttgagctatccatggccacaaaaattggacagacggcgaaaagttggcgaaaatggtggagaaaagtgatgacattgcggtcgatgaaactgaaagggaagtgttgacaaaaaattttgacattggccaatttacgagatgttgatccattcgaatccgatgactttgcgtggcatttgaatttgcggaattggcaatggtttccaacgagaattgacaatttccatttccttggtgccattttctccaattttgcttcgaattcgaataagtgccaatgtccttttgcgcgttttgaagtgttcgtccacgtaaatgtcaaaacggtggctgatcattgcaatgccaaagccaagttgtgaaggcgtaatcaaatcgaacacacaaagccaacagtcgttggagatgaaactgaagaaaaggaaaacaaaatttacaattgaattgaaaatggcattttaattttacattgctttcgccattttctcctccgcttcttttcggttgtcagacattttgttgagcggaaatgattaagacagttttggacgtgcttaaattagcttagcaaagatgaaaaaattatgtgaaaatcagcatttcctttttgaaatctgttggcttttg

SEQ ID NO: 15002 - DNA, 3787 bp, Heterodera glycines
taaaggattaattttaggattgatttatcccattttcccggttcctaaaatctttaaaaaatagtttttattttggataaaagcgagattgaaaaaatgtggatttggaaagtcataccagacgcgtcaaaccaagctaaacacttttttcatatgtttcagggaacattccaggaaaaaaatggatttccatatgattttaagctctatcgatgaattttatgtaatttccaaatgattttatttttttgtgatttttgaattttttttttttttttgaatttgatttatagaatagtttggagttaaagtgcgtgtttttaattgtccttttttggtcacgtgattgattgtcgtcaattgtcactcacctttctttacctttgttaaaattttagaaaagaagtctctttaaagaattgtatttacgtcgaattagtacattaaatgattttatataattttatgatactaaattacactaacagtttaggaattaaaatgagttttatgcaattgtacaccgtttggcttacattattttccatctcatttacttttttgccactgtaagtgcattttttatatatatctcatattttttttttaaatttagtttcgtggtatccgactggaaaaagcgtggatcagccgatgggttttcatctgtcaattttgttttgccagtttttatgtgggtttattattttttttctttgtaatttaccaattgtgcccctccttccctttcgagaaatttttctcaaaaaattctttaggatagattatgtatatattggggtgttcggaaagttctttcatagcggtcgttttatgtaaattagaatttttttcgcacccaaccgcaacctttggccaaattctttctgttctatgggaaggagcacattttgctgcatatgttacgagccatttcattttcctttctttgtaaattgattttttaaaattatcccaatggagcacccaaaatcccaaatccgatcacttttattgtacgggtcaaaactttgctttgatcagttggaaatttattaaaagcagtttttgtggccaaatcaagtccggagaatccaaatctggcctcagatttgatctctgaattgtctctggcattgtactgctccatgtcgttgacaatttgtttttcctctttaggatgagttgttggttcaaacatggctatctcaccaatgacaatttgaatatgcttataaatggtatcaacttgtgcttatttgccttttacattgcggcctttgccttttatcagccaaaaagggtaggcgataaaacagagttacactaaactggaaattattatatttttcaagagcaaaatgagaatttgaaaaattgtaattatttttaagttttgtttaaattcgggattcgaaattaccgggttaaatgtcagaatttgtgattagcgagtccgaaataatggatttcacaaaacaagaaataaaggcacaaatttattaaaattatttcctcaacaattcttcctttggttctgataggcgccgccagagaaaatttcaaaatttttgacgaatattgtaacagattttgcccaaaaaatacctgaactattttaatttatggtggaatttgttatgctttcaaaaataataaaacaaaggacaaatcatttaaaatggatcttttagaaatatttgtgtgttcaactgacttctctggtcattgccctctttactttgttctcttatgtgaacaataaaccagccgaggcccagcccgactcaatgggatcaattgcagcagcagctcaagtagcatcattagcaggtgggggagggaaaggggtaatgccacggggcattaattgcagtaaaagagcacatatccattaattcttttcaggaaatgtctatgatttggtcagtttcgtcttttccttcggttgtctctctctattcggtatttcatttaagaaaagggccattttcgacttgaaaacgaccgaatatatccccgcctcaattcaattcggcctctttgcccttaccattcagtggtccatttttgcacttattgtcggcaattcttatatgctggtgagtttcgaagctctccttgtctttcttttgcaaaaatgggcttttaaggttgccaatttggctggtttggcagttaatctcgccactttggcaacatttgttgcgtatccacccaaaacttggaaagtgccaatatttggtgttggtggagaagagaaaaagcagaagtgatcgctcagaagaagtattagtattagtgcaattcacgagtatatgcctagagattgcccaattcaatgcctccgaaataaacaacaaatagtattatttttgaaatgttaatcatattaattgctgcgcgtatcgataaaagaataattttccgttttgttgattatttctgcaacaatttcgtcttttttgcgtgttccatcgattgtcaaaacgccaaattcccctccgttttctgatggtaattctaaatcgtccaattgtgatggtatcaaattacacttggcgaagtgattgctcctttcggctgttcttttccttaaaattttttcggggaccaaaagcataattatcattttgtttttgccgttcggttgcatccgatccaagagaaataatctgccaggggttaatttgtgacaattaaaacacaaggagaggttaattgtcacttgccggtattttctcttaagcgctgagcaggcgacgacgaatctttcggctttttctccgttcgcccaaattttagaaaccttttccaaccatggcatccgatcgacatcttaatgaaacacctaattaaaaatgttaattagtccatgaatcggttaattttaaactccccccattcgtttttctgtaagtaaattcggaccggagagtgcctcccctctgcccattttcgctttgttttcctccgtatgaaaatcatccgcatcgacgaaagtgtaaccgatttttgtcgccaattcctttccgattgtgcttttcccactcccacaaaaccgccaatgattagaacagaagggagaaccattcgacgagaaacagaacgatatgcactaacagaataaactgataaatgagcactaattgtaaatgaaataactagggctgcgacttttagtgaccaaaaatctcgaaatagttaactaaaatagtgagtaaaaatgccgaaattttgtcacgaaaaaaaatttgggggaagaatttttgagaaaatttagtgacaaaaagtcaaaatagtgatttttaactattttagtgacgaagtcgccaaaatagtgatttctagtgaccgatagtgaaaacagaatcgaaagtttttaatgctgaaatgcgttttttgagctcctttcttcaaatcaattgagaaaaaaatttagttaaaacttaaaagtcgcagcactagaaataataataaataccaacacaatcgcaaaaaaaccgaagccacacaatggaaaaagaccgacatatgcgaacaaaagtgagaagtgttgaatgaagattactgtgattaacaaagaggaatttaccaatttatgcaagcttttgaatttatttgcgacttaattcgcggagcattttgagtaagaacaatgttccaacaattcttttgataatgctagaccatattccctgactttatttatccttttcattgagattaactcttcgcttcctcagcatgagaaaaaggcttgaatttatttgtgacccaattcgcg

SEQ ID NO: 15003 - DNA, 2631 bp, Heterodera glycines
catttctttttttttatttcttttatttttcccacttacctcttcttttttcccactccttccctctcccacacacacgcacgcatccaacagactgctgctgcacaacagcacgcgcctgttcactgtctacccctcccacccaccgctgcccgcatcaacagacagtcagacagtgcactatctccctcctccctctacctaaccacaacagcctgggaagagaaatcttttagctttaactatttcttttgcttttttcttttcctatactatttcttttaccttcttctttttcaaaactatttcttttcatctctttttcttttcaatctctcctcacagcaaatacaaaacgccacattcaaaccatgttacaaacagacaaacactcaactttattatataggattttattgaaaaaagcagagattttcaacgcgattttttcgcacctaacccctaaattgaaatttttcggccatataaatccgctcgctaaatttattttctctcttatcccaaaggtaaaatgattgatttttcattttataaaaccacgcattataatgatgaatgtaacgaaatgcttaatcggcaaccaagaaaatttgaaaacaaactcagtgcatgtggtgatcagaagaattttaaggccatgcttgagaatttcaactctttacgcgttaacaggcaattgtgcgacgtcgaaattgaggttctaacagagcatttttgcattaaaatatacagcacatttagtgccagggaaaatcgcttttggtacataaagttgttttggccgcgacaattgattattttcgcggtttatataattttggaatggtcgacgcgcaggcggacaaaattgaaatcaaagttagtcaaaatgcttaacaattacatcagttcaaagttttcttaggaagtgtcattcataggactaagtcaaatcattgacttcgcttatacttacgaggtgaaaatcaacgaggaaaacgtcagagaattgttacacgcagcaaattatctcggagtaatttttgaaattaaaatattaaatgaattatttcattcgataaccctttttcagcagttcattcactttggttacctatcctttgcttttgagcgtattagttaatacattcattttttatttcatttcaggtaacttttgtgaaggatggctgtgagcattttttgataaaattgatgacaattgaaaactgtctcgggttgcgagaactctctgatcagcacagttgcgaacaacttcttgccgcaattgaggcatttatgcttgaacattttatggtaaaaaaaacattatatgagttgaatttttttcattcaaaggaaatttgccacaaagaagaatttatggcattggattcggtgacaacattagagcgactggcgaaaagtgacgatctaaacataacagacgaacggtttttgttcgaattcctcgtcaaatgggttgagatggacaaaaccgggttacaaaccgccggactaacaataaagaatatttgataattggcatgttcaggttgaggttaaattcgctgactcgcctccttcgatttgtccgtttttttcaacttcccttcgactattttgtgaacatcaagcaactcccgttgatttcccaatcgtctgaagcattggcatttgttcagtctcaatccgaagcttttttggaggcaatttctgcttctggtatttattttgtaaatttttttgcggctaacttatccgggagacgggaataaggcccctgttcatgagtccggcctcccataaacgttagaccttgtcaaacagaattttccaaatcgttgggccgtttgcttgcctcggcctctaattaaagggctctttagttttctgcttttagtttgttcggcttctcattcgttggccgaccaatgtctccaacagcgttttgttggcggccacaaaagcacgctttctggctccgacttgcacatttccagccgttcatttccgaacaaaaatcaaccttccaacagagagtcgtcactcacagcttcaagctgtttgggccagcatcaattaaatattttgtttaaaaagaatggttagaagaacatttattggtttctttatcacttatttccttgtagaagatttgaaactcttaactcgtccaaggaaggccagtgcgggtgttatattttgcgttggaggacggggaccacgactggatccatttcgttcggtcgaagtttatgattggctgcacaacaaatggagacaaattggcgagttgcgcatcggacgaaggcacgtcggcgtcgtttgtgccggccctcgcatttttgcgattggtggtcatgacgggacggaacatttgagttccgttgagtgtttggatttgggagacgagtcatggagcgaggtggcgccgttgaatgtgcgtcggcgtgggatggcggtcggaaccctcggcggagcgatttatgctattggaggtcttgatgatcagaattgctacaaaacagttgaacgctatgatattgagcggaacgaatggactcatgtccaggagatgaacactccacgagggggcgtcgcggtggctgcttacggtgtggtgccttg

SEQ ID NO: 15004 - DNA, 1420 bp, Heterodera glycines
acgacgacagcccattaagcacttgcgagcgttataattttgcagatgactcgtggacagaaattccgccgctttcctgcgcacgcggtatctttacgactttccgttaaaagatgtcccttctaattgtaaggcggagttggcgttgcggcgatgggcgcgcggattttcgcaattggaggccacgacagcaagagctacttgaacacggtcgaagcattcgatcccctgagccaaaattggacagatgttgcgccaattaaccaacgacggtagtgatttatccggtagtgtattttcatgttcatttgcatatttaagagccggtgctggcgttgcatggtcaaattgctttataaatgaactcacgtttccgttgaagtagttttcacaaaataattcgagttttcagatatttttttgattttttccattttttccaaaagattcgcatattatctatcgctgcataaaaatcgatgttcttttagttattttttggtaaaattacaactagaatccttcaattatgccctaaaaacccaaaatatgcattgtcactgatcgcgaataaaacaccgatttcaaccaattcctaccatgattcaaacaaaaagtcgaagccaaatttttcgtctaaaaatagtttaaaatccttttattgaagcattgatgactttccttccctggttcaaaattggtcgaaatgaaatggatatctattcgtgatcatttacccagaaagtccttggaaaatatccaatataaatatggcattttttatttatatttttatatattgatatccgattttccagtggaaaagacgtatttcataaattaagtagagcccggaaattacaaagttgcagatcacacttcggtattggaactaattgactaattttgcggcactggatcccgcaaacccgtttaaatttatgggagaccgcgcgggattgcaggatttttggtaatactgcagaattgcggtcccgatgaaaaataaattttgttttatgcttatctccttgggtaaaaaagggtgctcattacaatctgagctcaaatttgcaaaatcaatgtttttcataaagtatcgtaaaaaaatgatccgcagccaagcggatccgaaccccagacccccgtctcatatgacccatatggccagcaattaaatttcaaaaaatcgtaaaaaacgaaaaacttagcttctccgaacattcagtaacattttatttttatctttcctggggtaaaaaagggtgctggttacgaatctgagctcagattttgcaaaatcattgattttgtctatgactgttcatcaagtacttgattttttccaaaaattttaagaaaattaatcgggcgtaaaatattcattcctagatgtatagagctcacaaagagctttcga

SEQ ID NO: 15005 - DNA, 2359 bp, Heterodera glycines
atggaaaaaatcgtcctgacgacgaccctattttaaccaaaaatagtcgatttttgagtccaaaattttaaaaatttttggggcccggcggtaccgatggatggcatcggcactcaacgggtcgtcatgccgtagccatttctatattttttgttgttttattttgcgttttgccataatggcaaagaattcaggcaaccaaaagaaaaggtgatgccataaatgttttcgaaacgaactttgatacaccgcgttcgaaacgggacactaacgggccaataaatgttttgttgccacagaaatttttttcttggccaaccaaacttggcatcattcaatagatgtacatatccacaaatatcaaagttttggtccgcgtgtcccatactcaaccaaaacgactcccaaattttcaatgaaacatggagaggcgcgtcggtgaaaattttttaaatttactttgttcagaaaattggtttacattgaattaaaaaggtcctagaggttatcaatgttttccattcccacccctaatttgtatgtaaaaactgagttggcatatcgtacttttgacaattgtcgagtcgagcaacagccgtttccatggcacacaaacggtcagttcctccacatatccatccttcagtgaaaggattcgaacacctaaaaaagtgggttaaaaagcagttaactttagatttggggttggccaacaaatgcaaaacgatgaaaatgttccatttaaaaagtcaggtctaacgggtcgcaagaaattgcgatagggtcgaagaaaacgccaatttttgatgccggaagacaaatcatgttccaatgtattccaatgaatgcaaatatgttttaggtgagattgaggagggggtagtttcaagaaattagggaaatttgcaaaattgcacaaaaattggcaaaaaatgcatgcaagtgtccattttgtccacccacccgatgcttccaacgtctctttgatgcactccgaattgagcgtgtgcggtcggccaaatgcaactccaaccggtccgagctcagctccgtcttcaaatattgtcctacatagctaaaaaaggcacaaatttggggaagctttatttgtccaatggcattttatgagttcaatcagaatttaatgagtccactaactatcaataaattttaagctggctaccctgtctatatagctgttattaattaataattatcattttgtcactttctttaaatgttagtacaaccaacaaaaagcatcgccccgacgaagaaaaaacatttttatggctttaaagctttttttttttttggaaaacgggcctgggtgagaaactcggtaatagtggagaattggtgtcccggcgaaaaataaattttaaaaaatttatttttcgagtcttcaagctttcgctttataacaaacagccaagtattggtggtttttttaaatttgtaaatttcttttaatcctcccttaaatttgtttcttaacgtttgtgttgaaaagtgaggggggggggggggagagagggcggaagcaaaaaaaaaagcgaaataatcaaattttattcattttcaaaaatgtctgtgtgtatgcatgtgccaatatcaatgggtgtttcttcgttttttgtgcctctattgattcccgaaaagacggcggaactgaaaatcacaggaattgttcgaatgaagaaaggctgagggaatgacaaaaactcacgaagaagacagagctcgcggcgagttgcgcgagtcgcaaacgcacggcaaacgcgacacgagcaaacggtggacgtccgcgtagttgtgtacagggttaaaacgacgaggaaacggacgacgcacattggagaaatagaaacggcgaagaagaacaatgaccaggattacgcagcaaacggtgccaaacggaacaaaaaaccacggattgaagaggacggccgagaaatgtgaaaactccattttttctatctaaattgaaagaaatgtctctaaaagataagtccatgaatatatgggggaaaacctaattagtttttcaataaaaaaatactgtatttttttaatgaattttggcactttggaaaacttcttgatttatggttacgattacaataatatttgttatttaaagatacgaagaataaatttagaattttggttttctgaaaacagtagacgaatttgtttttaaaaaaacaacaataaaatataatagtttttaatgcataaagcagccacagccattcgttttagcgaaaataaattgaatttgcttgggttccattccttttatatgtagttattcttcgagacattttttacaaatatttaatattggggtttttaa

SEQ ID NO: 15006 - DNA, 4282 bp, Heterodera glycines
  unsure (1)..(4282): unsure at all n locations
ttttgaaattttgcaggctaatagagcatgttaagagctttcgaatgatactaagaatgttgaatttggttgacagtgaaaaaagttatagccaaaaagccgctggggccgaactgattgtgagccggtccgtccgtaatcgcattttttaaaaacaaaacataatgccaattttctaagaaattcgttccgataaatttaagacttggccaaaataaaatttgcacaattttaaatcgcgggtgataaataaatttacacaatttttaaatgccttaattaacaagagttaaagcttaccctaatttgtttacatattttagcccaaaaaacaacaatgataattttgtaaccaattttctctttttcctcaaattcggaggcttgtgattaggaattggacaaaatttgtatgattcggaataactatttatacaacatattcatggatggatacatacataggtatgtacattggtaacaatgttgggggtcacacaaacacacactattgagaacattcgcgtcgagatgctggaccaatgctgggggtaatttgggtgcctttgaagaatctgaaggacagctgcagcttcgcgtcaatcaccagcaccgctcccacattcttttcagtcacgtacatcggtgcggagaacagcgtcagcatgtaggagttggcaaagaatgagacaccaaacgggacacactgaaaaagtggggagaatgaaataaattacacattttcggatcacacaaatcccactaattcggccctctaaaaacaggggagaccaaacgcggaccgaaaaattttgttattcattttcaaataacgttttaacgctttgaaaatgaccaaaaaaatcgcttcgataaacagtcagtcgtccatgtgccgtgccgattatccagccccacctgatgagcgcggacgaccaattcgatgttgagctttctgcaaacttcggcgacgacatcggcaccgaacaggatgctcactccacgcgggttgggtgccgtgccttccacagcggttgatggatcagcccacagcaggtcgagctccagggacggaactggcgggtcgatggacggacggcgcagcatgcggagttgctgaatgttggtcatctccggcgcgattccaccatgcatgccttaaaaaaagggcggggggattagagttcgtccgatcgatcagacagccgatcaacggcaaaaaactcacacagaatacagtcgctgaccaatccgacgaacggaagccaggcgaatgtcatgttgaaccgctcccacagaggccgcacattatgttgtccataacgctcgtttatttcgtcatagaacccatatctgaaaatggggggggggattttttttttgctgaaattgagttaaaatgtgacacatgggacggcaccacagcactcacattctgttgatgctggcacattcgtggttgccgcgcagtatatagaattcggtcgggtagcgcaccttaaaattgggggggggagggaaattggccctgcaaaatgatcaaattctccctcccgcggcacgacatttccacccaccttgtagagcagcagcaggacaatcgtctccacactttgattgccacggtcgacaatgtcacccaggaacatgtatttggtgaacggcgggtagcccatcttgttgaaaatcctcttcaggtccacaaattggccatggatgtcgccgcacatgaccagcggtggtttcgtctcgacaagtgacgcctggtcccgcagcacattggtcgcgtcctcgcacagttgccaaatggtcgtcatgctcacctgtgccgttgaaaaacacaattagcaatgtgaaaaaatgccaaaaaaaaaaatttgcggcgcctcacatcatggatgaactgttcaggggacgggcagttaagagttgtcgcgatcagcgtatccaattgcttggtggtcaacggagttgaagtcgtcggcgcaattgatgaaacagtcctcaatgacgacgcgccgtgttgctgctcgccaccgtccgccatttgttgttgatgatgttgttgatgttgaatgacgatgaataaacagaagcagcgccggagagcaataggagaaataaggaggacgaaattatggattaatgagtgtgaggagggaaaacaaagcacttttatagcaaaatttttttgctttttctaccgaaagtttgaaaatttcgaaactaagagaaacattatgtcaaagcttctattttcaaaaaatttttttttgttttttttcaaaagcagaaaatctacaatttcgccttttcttcaaaaaagccttattgtattccggattactaatttatggttggcaattcaattaaaaaataataataatttgccaaaaaaaattttaggaaaacgatcaacaacaatctccggaagaccaaatttcagcggaagcggcaatcaatttgttggccgttaccaccactcaccagcacatttttgggggcagaaatggtgcactttttgtggaaatacggcgaattgcggagcaacaactggaacacgcgttggcaccagtcgatggtacacaaaatttggatgggattttttggctagtgattagaacatccaaaaaactattccttgctagatttctatttttgtttttatttctccgaacgttcagattaccgacaaaaaactgagtggtaaaacgtgtctgttgcagttagttacattaccacaaaatctgtttttttggccctgtttttatacatttgagaaattttctaatccaatgcaaatctattttaaacaaaggttgcttaatttgtttggtttcagttgctggcggaaaatgggagctgtttgtgaaggacggcgaactgcgcatgtacagccgcgagttggaagtggagaatggcattgcggttgacccgttgaaagcgcttcatgtcattgatgtgcgaaaattgcatttttaagcgtaaaacaaaattcaaaattatggctggtgggccgtccagttttacacaaaaaaaaaacttattcggcgccattttggtcacacagttaagccccatcgagcaaaaattatcaaacaccgacaaaatcaaattttcgacatgaatttatcgtttttcagggtgtgtcggctcacgaattcatcgacctgttctttcgacctgaactcaaaaaggaatgggatggtgaggggagagcgaattcaaggcccaaaattcctaaaaaaatctgttttttttcagatactcttgaactgggtaaagttgtggagactctttcgccgcacactgccgtcatccatcaaatccatcgccgggtttggcctgccgcacaacgcgagtcacttttttggtattttccaattaaattttttgatttttttttcaatttatgtttttaggtcccaacggttgaatgtgttgtcggaatgcagctctgtgactgaccatgtgccgggtgaacttcttggcgcttggatggtaaattttggacaaatttaaaaaaaataaaaataattttaggtatgcaaccaatcggtggaacgcgacgatgttccggtgattaaaattttgatttttaagtccaaattttaaaccaaaattctcggcaaattttctttatttttcggtcttttattgtttcgacatttcctttccattcagtgtaatcggataaactcaattttgtcagctttccgacccatccgcggtccgtgtccgtctcacaattgcgatgttatgccgcacagtgttgaagcccggggcggacagaacgaagccccgtgaacaaatcacacgggaggacatccgttgcaaaatcacttatgtggcacaaagtgaggaggggaaaaatacgaaaattcaaaggtgtaccccaaaagcagaattacagttaaaattttttgcatttttttacatttctaaggaaaataaatacctaactaatgccattgtcattggttacatctgtgggacacacagaaatcgggcaagcgaaatacggggaaaaactgaggggggggggttggctcggtcctggtgccgaacagtcaaaacccaaaaaagggaaggaaaatgggtccaaagcagtaggtgctgactttggggaccgaaatgggtacaagcggctgaaggagccgccggacaggaaattggaaagcccaaggggagggccaaatgtgaagcaaacgtgaaatgtgacaaaaattggaaaatgaatgaacgcanaagtattttttttgttggttttatttggtttttt

SEQ ID NO: 15007 - DNA, 1419 bp, Heterodera glycines
  unsure (1)..(1419): unsure at all n locations
attcaagattttttttatttttaaatgcattttttaccacatgaattatgattaaatttttgcgtttggaattcattttggaattaagaaaaataaaaattgataatcatttgatcatttttagcgcactttaagcaccgccgttaggcagcgcagttccaaaatttattccatgccacagatattatgggcaggacacgccaagtacctcaaacttgggtaattaaaccgaagaaagaagtgcagtggggaagaatgacgcctaaaatgaaggaaatattcgatgctgtgcgaactctttgtgacccctctctgactctgccaatgcagcagttgaccatttttaccactatttttctctcactcatcgtctgctcgtctctcctttattataagctatttttccaaagcccacgcctttctctcttttttctgtttgttatttctcattgctgctgacggtgtcttcctattttgccatttttggtgcttattttttctcacctaatgcatccatacttttttcattaacctctggaagccatgaaacgcacgaaaaaaatgtttttttggtttgacgctattggcttttttaaccgtaaagaacgtaaatactcggaaaaaaactttttcaatgttttttttctcgggaattttgtttaaaaattttgtgaagataaacaaaatagcaaaaaaaaaaaaattcacgtcatttttttttcttttgaaatcattttaatatcgcatttagccattttggagatgtttttaatatttattgcttaatttgttaaaatttagtgtgtccatatttcgcaatttttatatcccctacatacatattgctctgtcgttttatttttatttatcattttatttattttttggatcgaaacaatttctaatggcaccgcctgtcgtaaaaaagaaaaaactttcatccgtcgttgaaaatcagcagcaacaaccgttgggttcaattgtgacaccatttggaagacggcaaagcgttcgcttagcaaagaaaatgaacaatcgaactttgaagaaaatgtgagccaaatttggcattttttcatggcattaaactataatgtttcagctggatctgtaacgatgttttgatggacattctgccattctttgaccgtgtccaactcggcctcaaattggcaatgatttcgccacgttttgatggtttggtggacacgcatttcgacagtggaaaaacagaattggcacttcggagagaatacattattcgaaaaaacactgatgaagctcaaaagcccatatttgttgttgccgaacacgaaagtgtgcaatttccgatgcccgaccgtccgctgcccaacagaaatcgnttttcgaaggcttacgattgcgtaatttgaactggggccccgacataggtgccta

SEQ ID NO: 15008 - DNA, 1882 bp, Heterodera glycines
ttagggccccgacttttagtgacgaaaaatcgcaaaatagttaactaaaatagtgacgacaaagtgccaaaatagtgacaaaatagtgtaaaagtccaaaatagtgacgaatagtgacataattttcagccaaaaattaagcaaaaaatttttttattcactgattgcagttgcaaatgaagtaaatttactttctaataatttcgtggcaaatattgacatttttaaaccaaaattttgtcaagaaaaaaatttggtggacgaatttttaagaaaatttttctaaaaaattttaaggtcgattcttaggtgtatctttgaaaaaaaaattttggtcgattcttagtggtgtattttttggttttttggcatttttgttaataaattttactaaaaatgtcgaaatagtgaaaagacaaaaagccaaaaaaagtgaattttcactatttgaagtgacaaaactccaaaatagtgatttccagtgacgaaaaatgacgtccaaatgaaaaaattttgacgcagaaatgcgttttttgagctcctttcttcaaaacaactgagcaaaaaaaagtttttttcactagaaatcggtgccctaattattgtatattattttttgctattttccattaggcatttctccgtgccaccaccacttcttctgcctgctgctactttattcattttttgaatccgtcgacgccgcacatggaaccatttgaattgacgaacgaagcgacccaagaaatgttgacattggagaagctacgcaatacaaatctgcagtgtttgaagcgacaacaatgctcaattggggcgaagacggacgacggcgattcgacagcatcaaaaagatggaatttttatgcttcgaacactgtcatctttgatttgcgtcctccaaattgcattgggtgagcagtggggcagggagcagctcgttccccccatcccgagtaatttaaaaaaaattctcaaacaaatttttcatgaaaaatctagaaagtttttctgatccgtggggaatcggcgggggaggggagggaaacgtagtgcacccgcgggacaagttctaggggtatttcgaggcggcgcttagtacgaatttctcctccgttttatccattttgaacccctgacccgaattcgaacatttacacttttgttgttgttgttgttgcaaatgttgcttataaaaccgggacgagtaaattccaccttggggagcaggtcgtttcccctcccccacatcgaaatttttttttaaattttcaaacctagaaatttttcaaaaaaacttataggaaattttctcataagaaaatttcaagaaaaaaattttgaaaaaatttcagcgattttttcaaaattttacgatgaactactaagttttttcaaaaatttttccaaaaaatcgctgaaacattttcaaaaaatttattcgtgaaattttcacatgataaaacttgctacgaattatgcattggctgagcaacaaacagctgcttttccttttttgtttgaattactcaattcaaattgcgttgattttttaggcctttgtctccaccaacggccacaaaagcggggaaaagcagcgaaaagggcgtctgattatttggaaatgaatcctttggcatttgacaaaatggtcgctcattttgaatgaaaattgttgctttgatacatttttctctttaaatgttttttttattggtcggttttttcgacaatatacctatcggagtaagacatttgcgcctatgtccaaactcggattcaaactaaaaaatttttaagtagaagtctaaaattattaaaattaagaaaaaacacagtcaaagagtttattaggagcattaaataatttaatttttcaaaa

SEQ ID NO: 15009 - DNA, 2872 bp, Heterodera glycines
ttttcgcttgctaaatgtttttaaatatttaaaattcctcccgacgcttattttaaaatatgtaaaaaaaaaatttaagcgtctaagagcaaaaagagattttctgattccttctccaattttttcctggttgcaggcctgcgccaccactaattaattaattaatcaatttttttcaacgatttcccacattcatgcccttaatgcgttccaaacgtccgctcatcggcggcgtccacacgtacaaattcagtcccatgtccaaaatgaacacatcacccaaattcaagctttctttaatgcatttgaccttaaatgtgtttttttaaaatttaaattcaactcataaaaaaatggattcacttgggtacagcggacgtttcgcttccctttgcagtggaacagttttggggcccaattttggtaggggggcacaacatggcggaatccggactcggctccaccttccaggtacctgcatttttgtaagagaattggttaagttcaataattgagattggtatgaggtggggggatttcttctatcttttcggagttgaatttgcctattagatgatttttttaaagttggaaattgtccaattttccgcttttcctgtccgttttttgccgtactttacttatattttgaaaatcacttaatatattttcttattttgatcacttctcactctttatcaattgctttttttactttattccgtctttgaaatagctcaggaagagcgaactctcatggtcctggacctgcaaaacattttaattaattaattattaattcaattaaagtaattaataaaatatttttcaaaaacgcacctctctgtactggacaggcagtccgtttaatgagtcgtccagctcaaccgttttgatcgcagcagtgcccatttcatcctaattaatttcctaattgaacacccgaaccaaattatgttttaattattttttatattttatttttcgaaatacaatttacttgagaagtttgttttccgagccagaaatggacatcaaattcagcaatttcacccacattttttgtctaaattaataaataattcattcatttttaaagatattttaattcataaataattaattaacccccccccccccatacattcaatattatgtatgagtctcctgtgtaaaaattgccatactgctcttctggcacatcttcgagagcaaatttctggatttgtgtttaaatttttcattttttcaatttaaaatttttcacatttatgcgccaaatgcgaattccgcgctccttgccaatgcctttcagcttcgggtcgataaccatgggctttaaatatttaaatgaaatagataaataataattagatttttttaaatataataaaaataaaattgaaaaattacaatataaataaatatttatttttttaaaattatttgtctaaaataaattttatggaaacactaatgagtgatgatcatcgtccaaaggtttaaaacagtttgtcaatgtgctccagaaacagcccgagaaccacctgacactttttcaaccgatttcccgggagattcattacccttccacttaggataaagcaaaatttattggccttttggtatactcatggaaccttgaggggccatatgttgtcattttatgttttcaaaagcttaatttattagcccgaccatctggcaaaattattttggatgaaatttgaaaaaaattaaaaacaatttttacaattaaaatattttattttgagggaagagaataaagaccatgtcaaatgtgaaaagctcatcttttctattttgaggtgtgtgtgtgtgtgtgtgtgtgtatgtttaatttagaacaaaaggatggatgtatccaatttcattttttgtcttccgaccaaaaattatgtcaaaaataaactaattaattaaatatattaaaaatattttacaatttaataatttaataaacatctgtgccttgtaaagccttagtgcaatttccaacagttgtggtgaaaaattggtttccaaaagatgcaacagttcctgtgtgaaagtgttgtcgttgttttgaccactttttgccatttttgccctgaaatttttgggattgaaaagagattttattaaaattttgggattaataagagtttttattaagattttttttgccattttttgggattaaaaagagagattttattatagattttcttgccatttttttgggttaaaaagagagattttattttttaccaaaatttttggaattaaaaagaaatttaattagattttttccaatctttttaagtaattaaaattaatcacaaaattagttgctttttttaattatataatttaatttaaaaaactatgaattaaaaaactatcgtataaaaaaagattaaaatgggtgaataaatcaaaaaaggggagttgaaaattagttgctgttttgttgggcccaatgattgagagtgaaaagtgctttttgatttgatgaacttctctttttataccagccaccctcgcatcaatttgtgttgtgctgaaattctcacgtcacaccaattacacgcacttctcttgtgtgaaaaacagtgacacaccataaaattcgccaaaaagtttcgtcactcggctcaaaaactaaattaaaaaaaaatgttaattgccgatacataaaattcttaaaattgccatacataaaattctaaaaaaatttaaattgccgtatataaaattctaaaaatttaaaatttcactcaccaaattgccaaaaagcttcgtcattcggctcaaaaaagcatttaaaaatgtttttttaattgcatagataaaattctaaaaaatttaa

SEQ ID NO: 15010 - DNA, 3067 bp, Heterodera glycines
  unsure (1)..(3067): unsure at all n locations
atcaaataaatcttcatcaattccatcaattagaacctcaccctggagaagaaaataatcacaaaattaattttcaccatctttttagggncaaaatatcgaaaatcaaaattgtgataattgtatattaatattatttattaaaaatatcaatgattgcaattcatatttgctttttaacttgttgattctaaattttttctttcttcattaaattgaaattaccaaatcaattataattagtcatgttattaatgatgaaataattgatttaaaatttgattttataatttccttcccttttaaataatattgaaaaataaaatagagaataaattttaaagggaaattattcggttaagaagtttttgaaggcatgcaatttttttgataagcgtccttcttccaaactttcacccctggcagacaaaatttggtccggacaatccgtcagtggacaatccgtcagtggtcaatccgtcagtggacaatccgtcagtgaaggacaatccgtcagtggtcattccgtaagtggtcaatcagtcagtggacaatccgtcagtggtcaatcagtcagtggacaatccgtcagtggtcaatccgtcagtggtcaatcagtcagtggtcaatccgtcagtggtcaatcattcagtggacaatccgtcagtggacaactcttctgtgaaggacaatccgtcagtaatggacaatccgtcagtggataatccgtcagtgtactattcgacacaaaatttttttgagcaataattaaaaatcttgcttgaatgattgttaaatttaataaatacaatttcttatagattctaacctttctaattaattttaattcaattaattgaccatctcgagaaattatcatttaattcttttaaaaaagattaattcataatttttataaaataacccaaattattaattcatatttttaacgacttaaattaatctcacattattacaaataaatctgagtgatttaaaaataaatttgcttatggattaattactgacggattgaccactgacggattgtccgggagccgggagtcgacccctccctctcccctttgtatgatccccattttaaaagaaaacaacaaaattataaaattggtgttgctatttcaggtatccatccacctatgtaattgcaggttggccacccgtcgtggcggcggttgcggaggcacttttggcttttctggtgccattgaagaagccggcgttgtcgttgttgccgccgccttcgagttgtgttgctgcgcttcggctcgactccgttgcttagtgtggccatttgttaataatgttgatgacgatgggcaggggtcgtacgattcgatcacaatgctttcggtccctttgatttcgcatcgacaaaacggacaatttttctcgccgtccgctttttcctaaaatgaaataaaaattttaattttttaaaaatagaaaaaaaaatgataggaaaaaataaatgaaaaatggaaaaaattatgacgagagtgggattcgaacccacgcctccgaagagactggtgccttaaaccagcgccttagaccgctcggccatctcgccattggagcaagcggaataacttttatataaaaaattaatttttcgttatcatattgaagattaaataatattttatattttattttaagattataattaaatgaaaaatgaaaaaaaattttaataaaattcgtgaaaacctcaaaaataatttaatttttttgtttttgatcaactcatcatttttggttgtttattaatgaaaaaattcattaaaaataaataaaatactcaaaaatcccttaaacaccatagaattttcagaaaattctctaaaaatcgtatatccaaagaaagtctcccatttttcacctgccaactgatcagacaaagtttgcatagcaaatgcccgcacggctccaacttgcagtttttgttgcgttcatcacaaattttgcacaattcaaaggtcgtgcccatctcacagtaaatttggtattgctccgacgaaacctgcgggagagagggcattttttggtttaattaattttattttttggttgagttttacttgcatcattttctacatataaaataattattttttgaacattaaaatctaaatttataatttggcacaaaattcagaattattcagaaatgatcaagcggattgggaaattttgatagaattaaattgcgaatgaatcggtcactgatcagcagggctgcaaaaaatatgcaaatgcatattttttcctggcttctccatgctctaaatagtaggaaaaacacttttttttttgtgtttgcgtataaaaatcgggacttttatttgcatatttttgcatatttgggtttttatgcatattttgtcattttttgtacgtattttcagattttttgcatattttgccatttttcgtcaaatttttcagatttcactatctcttaggaaaaaatttcgaaaatgcctaaaattaaatccaaatctgaattgatgcgcgagtgggtcaacagtgagtttcactgccgaaaaccttgagaaatttttgatttacaattacaaaaacaaccgatataatttatgaggaataaaatttttatttattttgcacccctaatttaagattttttgtgcatattttgcgatttttgtgcatatttggcaattttatttgcatatttatgtgcatattctggtcatttttcgtgcttttttttgcagccctgctgatcgtgccggttgagtccgattaagcaatgtgacaactaaataacataaaccccacctgaactttgcccgactcgggaggaaattgcgacacgtaggacaagtccatgtttttgttccgaccatttgggtaaaggtaaaagccctccctgctgccgtccacctgaacgtcgatatggaaacgtacaacgaacggaggccatgaattttggataaacaaaaaattgggaaggatttccatcgaagatcaacccaatgaaaaagagatatccgcgacaattttaccaatgatggatgag

SEQ ID NO: 15011 - DNA, 1387 bp, Heterodera glycines
  unsure (1)..(1387): unsure at all n locations
agggtccaattttccattggtgtcaaaatttatattctccaatttgntgtgtttatattttgtaatttttcaaaattttattaatttcgctcttttttcaattaattatacattcatttgagtaaatcaatgtactgatattaaatgcttgcattaatttgttttaattattgttttatttacctaattgagtatcacagcctgagactcgaaaattttttgactctaatttaattgaaatcttatatcaaaaaaaaatttttttttataaggctttgcttaattgcaattaatttaggtagccaaaagatttatcatattatattgtcataattcaaaacatagtgagggagatgcgttgagtcccccagacgactcaccgcttaaagaataaatgggaggacgattgggagacggatcccgggtccagggattggtggtgaaatcccctaaatagcgcccccatgttaatagactaattaattttctccggataaatgtaagatcgaactgcttgggcttgtaaaagatcgtccaaaaaacggaattattaaaaagtcagatttacgttttagaaatgtctaaaaatttatcttttgtttagtaattttttcatgctaaattttcgaggaaataagccaatttaaatttcattaaatttttattttcattgtttcaaaatttcattcattttaaatgttaaaaataaatttaggccctgcaaatagaaaatttgttgccattttttactcaaaaattaaaaaaaaatgtgaaacaaatcaattagtgttataattaagaaacagtgagcaatacagcagaattaataataaaaataataaaggataattaaggacgtgatttcgttgttaaatggaaaggctataaaaatgggaggaacagtaaatgtaaaaaaataaaaataaatttttaaatgaattacgcattttatgaaaaagaaaattactcaaaaattaatggagaaggtgagagattaatcattctcttttttaaaatacaaagtgattgggtgcgcaacaaaacaaataaatactgattaaataaataaagtctaattggacttaatgaagctggtccatatcccgaaaagctcaatttacaaaactgagaaagtctcattgtcagacaaaaaattttaaaaaattattctttttttgttccagacaaattcaaaaaaaaatgatcaatttttgtctcagacaaattctaaaatttgaatttattcaatttttgttaaaacaaaattcgaaaatttaattaggtattcaatttttaaatgataccaaaacgaatgattttagttttactatttttttttgagaatttggtggattggaccaacatcattcgtaccgatttgactcta

SEQ ID NO: 15012 - DNA, 1839 bp, Heterodera glycines
  unsure (1)..(1839): unsure at all n locations
aggggtattattttgtaaactctttttttccacaataatcttttcatccctcatttttcgcaccgtgaatgttatttttaccgaattttgaccctgtttgagttccttagagtactatagatttaaaattttgatatcatctttcgcgctaccttctcccaggggtattattttgtaaaaagtctttttttacgcaatagacttttcatatcccattttttacaccatgaatattatttttatcgaattctcaaccggtatgagtagattcggctactgaacattggggctttcgttatggatcttcattcattttcttgcctgtttctgctcagacatttctctgtcggacgggcggaaatgaatgccattttgaacaaaaatagcgcttccgttgtcggggcaacattgtgtaagtaagaagaatcgggcattttctgtggaaacagagaacattgttcagacacgacgctttttccatgtgcggaatgtgccaaaatgatcatccaatcgcgcatcagtcgggttgtttatttgagcgacaaaaataccgtccaaatggaggcttcgcgtcgccttttcaacatcacaggcatcaaattcaggtccgtccttccttatccctctcgcaaataaatgcatattctcattttactaatgtgtaataattgttccctttagccgatacgaatcctctcgtcccgaggtgactctccgcttcaaatgaactcttctgacggtgccgtgccttccattttataattttctttgttactttgtcttgttatttgagctgcctgctctcataagggcattattgtatttctgtcctcactttcgattttcatgccaaattccctcactttctctttttaccgaaaatgccttcgattaccctttttccctgtgctttccttttctgtttaattcatttatcgattgtctttgctcgccttcgttcgtttgtttgtccatctgtcctctttcactgatttcttcttttgaccaacttttgcatacctttctttttttcgtttaaatgttggcataagaaatatgggtatttttgtcattccaaaatgttcttttttgtttaaattgataaattttagggaatttctttgttggtttaaattcaagttaatttttcattgtaccttttcggatttttaattattcgactaattgtaattggagtaaggttaaacgttcccattgccttccattaaaaatgtcagcgaaagttaaaacggaggcgtcgtcgccaaaacaaatgaacgaaaaggcggaagagaatgaattgacagagcgtttggagttagactttgtcgaagtgcgccttttttctcgatagtatttggcaccatcaatccaaattgattgctaaaacttggcgaaaatggctaaatttcctgggttttcccgccgtgcagaaaaatttaagggaagttacatttgtcaaaaacttgggccagaagagtaaaaacttgtagagcctcttccgaaattttctttcttctatacgcacctgtttagaatgtccagtttcacccatctttatgaactgtttaggagtcagtcggcgacgattgggacggaaatgccatcatggaatgcgacgacactttagccaccgcagatgaagcggaggaggagggcccactcaaaccgtcgcccgactcgccgcgttcgttgtctgccccgcgttcccccgaagacgaagtggagacaattggtgccaaggaattaattttcaaaactaaaattttttttttgggggggggggnggaatcatcgggcaccaattatgccactaatttgtttcgcttccgtcagatg

SEQ ID NO: 15013 - DNA, 1439 bp, Heterodera glycines
  unsure (1)..(1439): unsure at all n locations
actacgaggaggacgacgaggagcgaatccgacgcacaaaaagggcgcgactcgtccggttgaggtntaatgggaaggagggagggaaggggaagaaaagggcgacacaaaacgaatggttgttgagcaattaatccatgccattactgacatcttactttcattaatcatacatcctcttgttcagggaagcccgctcccgacagattggccatgaatacattccgccgctggccagtcggagaacgtccgcatttggtggccgttttgccccacagccctacttcaagaacccgtcatattatccgcgggacaaggaactgtcgtcttcctctgctcgatccgtcgctgtgccggtgagtaactaatactacggcacagaagtgccaatctctgtctgactgttccttggcattttgagtgggtattgtttcatttgtttgccacttttccaaaggtgcctctcgcgcgtgttgaaccgatgcccggcggccgtcttccgctcgtccagcgccgttcgtctcctccgccgccgtcccttgtgcagcgccgtcgcggcccatctccccaagcgccgcttccgccgttgctgacgaaaaagcgtcgatacattgtggaggaaataagtcacgtgccaagacggtgggtacttttgaattggaattactggtaaaatgatgctgtctcataaagacgttctaaatttggaccggccattaaatcccccatttcgttttctgtgctgtttttccattccaactctcctctcggtctttgtgagtcccattcaatacctatcaattcctcgagattcgtctttctcctgcgcttgcttctccgccttcgcacaaaaaattctgtcgattttgttggattggtggtgaacaacaaataaagaaccgaatagatttagtcgctaacattcgaaacaacgcaatcagcagaagagcgaatgtgccgctcttttgggcttcgtcttttccctccctcaacagctgctttaaaatgttgggtcggctgcctactcaattttattactgccgaatgaaattcgttctcaatcgactcccatttctcctcctcccagtttgggtttggcccagggaacagcctcaaaaatgcaaaaaacaaccattccaacaacaccacagaagagggagggctatgcctatgaatgagagagtcttttcgtcgtccatcggcaaaaatgtgaattaaaaacccaaatgagtggagaacaacacagcaaatagagaaaggacaaaaacaacatcccttgtgtttgtccatcaacaagtttctgtggagggacgacaaaaacattcgccgcaccaaacagccaacaaaaactgccattttccaccatttccattcttccgtcttctcccctccatcctccccgcgattctcacgagatcgcgcactccgccgcctccgca

SEQ ID NO: 15014 - DNA, 870 bp, Heterodera glycines
  unsure (1)..(870): unsure at all n locations
tttcaagccattatgataaacggcccaactgcgcgagtccgttaaatttaatattaaattgaattttcaggcagacaaaaattttggaaataattattagttgctaaaaaaagcttggaaaatgtacgaccagtcaaacaattgtaaaaatgtcatgtccgatcttccagaccacctgagtcatccgccgccgtttgtccacccctacaacattgacaatgcccaattggttctcattgccctccccgtccgttccaattgtgtcattattatacggaatatcggcatttgttggctttctttcgaactgaaataattatctagcttttaatccaaattaacgtgctgacaaaagcctcataattccatcaaatgtgcaacaacaaaaataaagtttaataaaaaaaaagtcatcaaagttacgacgatttgtaatgactagggatacaatttttaggtgtttacctattttttttcctaagctctccctattgtctgaaagagcataaaattttcaaaaatactcacctaagaaataaaaaatttttctcaaaaaatcgtattcaaaatttatatttattaagttatgcgcctatttgtttttttttctgactgcataaaaatcgttttgggcacggcaccgcacgcactgaccccaaatgaaccggcacaaattaaatttatataaaagttcatgccaccataccatcatttgttcattgttcacagccatacgaatgaatttgaaatgagtgccgtcgttgtttgaacaattttcgctgccgatgatcactttgtaattttttggtcgctccgtcgaattgaacttttcccnncatatccacataaatccgtacatcgcattgatga

SEQ ID NO: 15015 - DNA, 2672 bp, Heterodera glycines
  unsure (1)..(2672): unsure at all n locations
ttaccgaacataaattttttcgcaaaattcacctaccccactatattagacccgcctcccctcgtgtactcaaaacaggctttaaaaataaagccgtatggggggggggctctattagatgacggtttggtaaagcatcatcacttcatatcgctgaatggttgttgtcccagacacagaaaatccaatttgctcatcaattcggttgtgcggtacaatttgacgctgttcgtcaagttgtgcaccaattatttcatgtctggccattttcggattgaatttggccttcaatttaaaccaatagccaacgggaaaattgtgaatatgttcaactgggaaaataaacagctgagtggcatagtttggcacgtaaacaaatttgttgaatgctaaatggatgaggaacaaataattttgtatttattataataccctaatgcgataaattaataaatgctttttattttggtggttgaaaaatgcaaaaaaagcgaaaaatataccttaaggaccgctttttgtaaatttttttaaaatactccattataatataaaccgaaaatttttgaactttttgtaagaacttttgaaaaaaattttgtttatattaaaaagtaattttattttagcatataataaaaaatgttaaaaattcgaaattgtatttgtaaagtttgaaaagcaaattttttgcaattgtcaaaaaatgctctaggcattgttttgatgtttttaaggccaaatctgtatttttacacaatttttagcatttttatgagggttaaaatccatgtttggcactttttaaggcatattatcatatttagcatttttttagtgcatataatttaaccctaattatgtcacgaaaaaaacggacaatcatagatgaacccgtcggcaatgagctttttcgatgcggacaatttgtttgccttttgtaccatacgaactgtttcaattggttgaacctcgtcgtacaatttgaaacggcataatttgtgcttgctggggcccgagtcgacaatgtaaatgctttagatcaagaaaagtttttttttaaatattaaaaaataaaataaatttattgccttgatgtatttatttttacagaaaggtcccgggaatcctattcaactcggttcccactctcccgcatcgacggatgggagctttaatgaaggagggtatgtgttaatgatgtgcgagaaaattacccgggaatctggaactgagacctggaaaaaagccccctggaaacatcaatgggatcccaaaatacccggaccctaggggataggatattaatttatttttacagaatttttcccgtgtactgctccgaatcttcctcctcccgctttgccagatcatcagctgctacggcgacatcagcagcatctttgttgagatttcgaagcacttcatccatgtaaggcaaagtgccgagcaaacgagttggatcagcaacaagctgaaaaaggaataagcgttgagagagtgagtgaatgagagatagaggagagcgggagatagaatagagagcgggagggagaaagagatggatagacagagaggcgagagagagagagagatagggaggggatagagagggaaagatgtgggaggagagagagaaggagagagagagagagtggggaaaagagagagaggaggaggaaagagagaaatagagtgatgagataacaaaagaaagaatagactgagtgaaagatagagagagaaataaaaagacaagcgcgaaagatggaattccgtgcccccaaaatttcaggaacataaaattctgaatttcaccctaaaaaatctataaaagtcgaatatcagttgaaaatttccgtacactgattgcaatttttaagcggaaaactcgaaaatatatacaatccagggatgggccaaattgaaaaataaaaagcgaaatgcgaaaagcgaaatttgcgaaactgaaaaatgcgaaatgaaaaaaaagcgaaatgcgaaaagccaaaatatgcgaaaatgcgaaaagcgaaatgcgaaaagcgaaattttttctacaactttttaatagttaaaatcataaagcaaaaatcattttttaaaattttattccaaatttaaaaatcaataaaacgcttttttgaggcgcgctttttccaaaaaaactttttggaagagggggcaggcggcgccgggaaaatttttgaaaatttgattaaaatttgttgacagattttcaccaaaaaatcatcaaattttgtgatttttgtatcatttttctaatgagaaataagagttttggcgcgccgctgcgaacagtttttcatcaaattaccaaattttgcgattttgggccattttctaagaaaaaataggagttttgggggcgcggcggtgccgataggcgccgccggggaaaaaaattggaaattttgatcatttataaacagtttttcactgaaaattagccaatttataggtaaaattttgaaaaattttatgggaatttaatcaattcttaggggtgtaaaagtcgcatttcgcgccaaaaagcgaaatgcgaaaagcgaaatgcgaaacgccaaaaatgcgaataatgcgaaaggcgaaatgcgaaaagcgaaaccctcggccatccctgatanncatcataactgtgtgaaaagggg

SEQ ID NO: 15016 - DNA, 1731 bp, Heterodera glycines
  unsure (1)..(1731): unsure at all n locations
tttaaccgtcacaattttaccataaataactctttttttgcaaactaaaagctgcataagaggtaataaaggtcgctgaatacgatagtgttgaaccttcaaacaaacaattttacaatggaataaattttataattatttaaaaaaagcaaagcaattcgtcaatctttacatttaacatatgtctctgcacatgcttgatttgatgctaatcacgcatatgcaacacatgccattatgggaagtgtctgagcatttgtaattaaatagatattttataaaacaattgcaaatgcaaaaataaataagaaggataggtgtaaaatataaaatttatataatacatttatttaaaaattaaaaccaaaaatatactacaatttaaaatagaaaaaaaacacaaattatttgataacacctttggtatataacttaaatgattcaaaagtaaaaaaaacagttaaaaacattaatttacccacaaaggatttgaatataaaaattttaatgaatatgtttatactagagtagagcgggaccgggactaaaacacggacaactgagtacaactgagtaccgaggtcccggttttgaccgggaccgggaccagtcccggggtttttcccgggtttcccagccaaaaattcccggtttttcaacccgaaaagtagagatgcgccgtgaatcacggtcacggtcacggttaccgtgaatttcacgggtttttttactcatggtcacggtcacgattcacggtaccaattcagtgttattccgtgaaaaatttacactggataaaattgaaaatttacgaattacatattgtttcatagagaaatttggtccctttttgggaaatttttgctaagaaacagagcaaaattttcaaaaatttacccggcggcgcctatcggcaccaccggcccaatctctattcctgaaactttttgaacaaaatcaactaccaatattgtgcaaaaacaaataaaaagcaaagtttcaaggatgaccccacttaataaaaactcattaaatttctttaaaaaaactcgctcgaataaatctattttgggcaaaatcagttaacaaatcccaacaaatttacaaaaattttccactataaccagggcaggcagatctgagttaaaaattcgatgcccctgctggacaccctattcccaaatttttggaaaattttaccacgaaaaaaaaacagtgtaaaaacaaaaaattcaccgacaggaaaaaatttaactcaaaaaattcacggtcacggtcacgattcacggtaccaattcacgatcacggtcacgattcacgggttttttcagtcacggcgcatctctaccgaaaaggtcccggtcccggttaagcccaaaattcccggtcccgctctactctagtttatacttatcattaaaattccatttttaaacaatgatttctagttaaacacagaaaacatgcgtagaaggtttgcaaaacgaagacgtcaagacctggagtacaatttgtaataataaaaatgtgaatttaaccagaaataaaaaatccaaaaaataaataaaaaatctatgagaaggaacataataaataagattaaccaacgcgaaaaagataaacgtaactaaatttttttagttccgacaagagattaaagcgatcgctttaacttattcaacaattanataaaaattgcatattttgctaaaaatanataaaaagccacta

SEQ ID NO: 15017 - DNA, 2474 bp, Heterodera glycines
  unsure (1)..(2474): unsure at all n locations
cgctcccttaaattattttttaccgggctctaatcttagcacatcatttgatattgccccatccgatgtgcccttccaattctcncaaacaccacgtcatcttcatattttgctttgcatattaattttttcatccaatttattttttggctcagtgtattgcagtttacacccggaatcagatcgaaaattttaaaaatcagattatcaagtaaaccaaaaatcagatttcggagtcaaacaattttcaaaaagtttaaaattagttatttgaataatttacttgttcaaaattttttcacttttatttttcgcctcccttatcgatcgattataacaactttttggtgccgcgtttttcacaaaaaaatcttcgtgacaagggagggagacggattttatccaaaaactatccaaattttatgtaaaagttaatagagataaagtattgacattatggcataagattttaaaataaaaataattataagaaatcagaaaaaaatttagtcagtattcaaaaaaacaactgacgttttgtttttatgtattaaaaagtcgcgtacaaattttgattaaatagacttcagattcaaataaaatgaccaacacttatctcattaataaaaatttaattattattacgcatttatttttacttggttatttatttaataaagagcgggtaactcaaaacctcaacgttattgaattgaatttcgttaaaattttatgaaattctatttaatttttttcccaatttgtaatcttaaagaatgaatttagtttttcaatagtagtaaggggtgggcccgccggacagttgcaagacaatgggtacgggaaacttttctttatttttttgctgttaaccagggcggttgtctttttatataagcatcgtttattctggcagcaattgccttttagggcttgaggtcgttcgtttgacttgactaattttctgagtcgtttaggtgccctgtcgtcttctgcttcatggatggcagtgcgctgctcttcaggtcaagatgggtttctataccgaatattcagaatataattaataatattattattattattgatgaatctttctcggcacattcccagtcaggcgttttttcctgatgtgtcttggagcaatcccaatcaggcgttttttcctgatgcgtcttatcctttgcgcgtttccagtcaggcgtttttccctgatgcgcattatcaattattttcatccgttaaaatcgtttttaacatcaattcgctaccaattatctcacccgttcgttccaatatattgaatgtattgaacattaaatttataagcatttgcgacctataatttaacttacataatatatatatatttttagccttaaattaaaaaaatctcattttcaattctcttattattattgatttttaccatgactatttaacttttaaaaaagaaacgattactgctgaaatttaaaaattagaagggtaagacgcaataaaactttgtaatgattaaaagcaaattaaaattaaaatagaaatgttttttttaattatatacaaaaattgttatgcagaaaatttaaatcaaagttaaaataaaaattttttttatcgagtttggaatatctgtcgccaatttttctattggcgacgagaaggccggtgccaacccgccacggcgtgcgcgagtgctcgcgttcaacaagggcatggacgggcagcgaatcgggagagaattggacacggacgaagaggaccgccatggggactcagttttctcggtaccgaatacgaacccgtgggccggaccctccaagacgaagaaataccgaaagaagagcagaaaggcaactagacgatcgggcggactcccgattcatcaatttctcaatcgctgatttcgatcatttttcctttcgttattcgtaccatacaacaccattttcctattcttcttgtcccatttttacttcacttttcaaattcatttctcatcggctggctaatctccggcccaaactttgtgcaaaacaattttgcacaaagttctttcttctcaatttccttaacttttcacatctgccaatttacattttatttttatgcgccatttctttgttcacatttttcacatcacaatttctgcccattttttgtcccatttttctcatcgcattaccgggccgtctgtcactccgcccattttttcgaattgtctatttaagcggccctgctcaaggggtcgctctcttcgcttccttcacccccccccccaaccattcgcgtttattcgttttgctggacttttcgatcaattttcaccatttacgcatttttaattcgtcgatcgcttcgttaataaattttgtgtcggagtcggagtctcggattcgttttcgggggacactagaaggagggaaaaagnccctcttcaaaagatcacattcggcaaattctcgtgcggggcc

SEQ ID NO: 15018 - DNA, 2836 bp, Heterodera glycines
  unsure (1)..(2836): unsure at all n locations
cagatttatcccattccgagcccggagccgaatgaatcttttatacagnttccaaatttcatttttttaannaatccattttttcgtaatatntggtttntgttaaataacaatttttttcgagatacaatattttaaaattaattctttgagttttgttcatattcggacacagaattgggaaatctgaggtcgattcgatattgatcaacactcttaaaaaccccggaaattggttttgagcagaaaattataaaaaatcgaattaaagacgtaattcttaatcattgactatctttgttaattttgctaaaaaatatatgtaataatctgcataagtatgtagttagttacatatataatagaaattcataacccttacaaataatctggtggatatttaattttaatttcattgaattatgtacccattttgaattgaatttattttttgcgcctatttttccgtttattcaattcaaatatcagtaccttatttactcacttacaattagctctgctgacgttcgccaaggtctctcgcggtgttttgtaaatgcttatttgagttgttattaaaatggatgaaaaaaataaaaataaatttttaagttttctttgatgtattaatttatcagatcaggtttttgaaattgatagaataaaaaagttttattttttgaaaatatttcaatttaattaattcaaaaataattatctggtaaaatggggccgaattcgaattgtttctgtcgtccgataaaacattcaaaaaatcataattctaaaaagagaattacattgaattgttaatgccggattcgtgatcactgataagcgaccccgaaaacacttggaaacatattttcatgacttttgaaaacaaaaaaaaccttcaaaaaaggggggctacaatcgtaactattatcgtgttatttttcctattttctgtttcctgtaattacttaaattcttttcaatttttaaattcttcgcgcctccaaaaaacaattgacacatcgcaacaaatgaacaaatggagttaaaaggcgcatctcattgccgaacaatggcataaaacatcgctgttttggagcactttgcgaagcgtccgttttggaagaccataaagggtccgtcccattggataagagtggtgagtaatcccgttaatcggccctttgctgcttttgtccccccccccccacacacttttattctatgccgaggaaaggcattgtgctgcgatgccgacaaattaaaggcgaaaaattgtgggaacatataaggacaaaaaaaagtgaagagcgcaacagtggacagaaagacagaaaaacccacgggggaggggagagggagggattgttttgagaaaaagggactttgatggactaattgccattttggaagtgctaaccgtgccgatcatttgtcaaaaatatttaaacaccgaaggtgaactgttcatttttatgcttctttgtatataaatgcattttacacccaataaataaatgtaaaagcaaagtcgaatttccaattttattacactttcgtctcaattggccgtgccgttcccttccccggccacttccaccatcattttttgctgctgattggtgattatctgctgatgcgctcgctggatgagttgaagcagtgccaagtgctgctgcgactgttcgttttggctgtgttgcgcgtacgcttcgatcatttgttgggggaacagcggagagggcagcagaggcggcgagtgcagcaccagcgacagcggggaggacagcaaatggctgggcggaggcgattgggcggccaagcagaaaaagggcggtggccgcatgaatggcgaagtggttgagtgctgtgccggcactttggccggcattgtgcccagcgccgccagtgccgcgccgctcggctggcatagcagcgattgggacgaagtcggagctgcgaacggactctgctgcaggcatggcattgactgctgctgcactaggccgtgctggtgattgggccggccttcgttcagccctttcagcacggccgagccgctttttctcagcatgccgtattgctggtggtggtaattgtgcccaattccgttcggacgtcgccgtcgttggagtttccccgtggtggcaccgatgaaaatttcgtctttgaaatcagggtcgagcatccaataattgcctggcaaatgagagtgatgaaaaattctgaggggaaattgaaaaatttagaaaagtgccaattcgaaagggacggattttgcataattcaaggtttttccctgaaaattcccatggttttctttcattgccattttctgttttccgcaaaacaatcaatcatttgtccctctccctcgacttgttatgatcgtcgtaaatttgtgctcggcccaaccaccgatcggctgtcatttacagaatgcttcaatgaattgggggggggggggcgaatgttgggagagaaagccaaggaaatggggacaattggtgagtttggcatgaaaattgggccaagaattgtgaatttagtgccgactccgtccgtgttcaccttttcccgggtcgtcgtatgggcgggggtcctttttgaagcatttgttcagcgacagattgtgccttatgctgttttgccacgcctttcgatttgtgctgaaaacggcaaatttaaattgataaaatcccactcaaattctgaccgatagaatgggaatttgttcattatgtactcgtaaatcgcgtagaaagtcagtcgtccgctcggactttgccgtagtgccaaagggataaggctaaatttgactgtttttcatcatcgccct

SEQ ID NO: 15019 - DNA, 1555 bp, Heterodera glycines
ttctactaaattgcctttaatttcacctgtacccaaccattatccttccgccaatgtccccctccctccccaaggtcccttctccgcgccgaccatggggcttctcatccttgcccccgtcggttgtttccataataaaatgcatttatcccaccctaaatcccttcattttgcaccttcttccatcatccactttcaatttcattttcatcccctccgccgcgccgcactttcacttgccccgtcctcctcccctcactcttctcaccgccgttgtcgtccgttttcatcgccccgcatcatcggacgggggcggaggagtggccctccacttttgctgatgaatgaatgaatggatggatggatgaatgaagaatactcctcctcctctactgctgctgctgacccccaacaaaatgtgaaaatgtgtggaagaaaaatcaatcacaaagcaaccaacaccccacccgaccagcagcagcaaacagcacaaaatgtgttggacttggacgaaccgccggggaaggggggggggcaaatggacgcggagcggacggaagaatcgggggacggaagaggaagaggatgaatgaagaattggacggtgatgccttccttttgttgctgctgatcgtcttgtcgtcttgctgcggtgtgtgtgctttccgcgtcgtcgtcgtccgtcccgttgtgtccgttcttccccccccccccctgtcctccgccaaatttgatgtgtttgttgtctcttcactcacttccatcttttttctcacttcccctctcccccgtccctgctttttattttctatttttttcatctttccacacccacagttatttattgaaaaataattaagaattaatttgattagtaaaataaggaaatatttttttaaaaagttggacattcaaaatttttccaacatcgcatctctaaaacccaaaacaaccatggcacgtagtacgccaattgaaaaaacgtggaaaactttttctacgttgtcggggagaaatttctggcatttttagcaaaacttaccaataaaattgtacatcaccgattggaatcgtaaaatttgagcaaaaaaaaaaagggtcacagatttgcccgttcaaatttattgtcttctgctggtgtgcctgattatacgaattccacaattttccctgcccctctcttaatttgcctaaatccaattgataatacgactaaaaatgccgtgccgttggcgaaccacaatactgctgggcgcaccattattgtttaattgaattgttttagaatttttttttaaattattattatttttttgtttgtttttttaatttcctttttcacaaccatcttttcttagccatctactcgagatttccggccaagactaaacactttctcgactccacagatcgagactctctctagcaggaatatcacaaataaatccgtttctccatcctaatcaatcctcattagctatgacaaatcaattaagtaaaacaacccccctcccctgttggccaatgagtcggaattgcgaaagaagccgctttt

SEQ ID NO: 15020 - DNA, 1710 bp, Heterodera glycines
aagatggatgatctcgagaatcccgaccatcccaatcccgtcttctcatccgaggcatttattacacaaaatgcatatgtatagtataagcataaatatttgcattaaaagtgattattattagggtcgggatttctagtgaaaaaactttttttttgctcaattgttttgaagaaaggagctcaaaaaacccatttctacattaaaatttttcgtttggacgtcactaaaatagttaaaaatcactattttggcgttttgtcactattttgtcactatttcgacattttttggaaaattctttaacaaaaatgcaataaaaccaaaaaatacacccctaagaatcgacctaaaaattttttcaaaaaatacacccctaagaatcgaccaaaaaattttttttaaatacaccactaagaattggaaaaatttttcaaaaattcttcccccaaattttttttcttgacaaaatttttgatataaaaaatgtcaatatttactaagagaattttataaaggaaatgtagctcatttgcaactgcaatcagtgaataaaaattagttttgcttaatttttggctgaaaattacgtcactattcgacactatttcggacttttttcactatttcttcattattttggcactttttcgtcactattttagttaactatttcgggatttttcgtcactaaaagtcgcgaccctaattattatcattatccccctctttttctctcgcttggttttccgctttctctttttctcattatatttcctgattagtgacggttggagagcgaatacgggtcgtacctgtatacggggtttttagggacccgtcgtctgtaacccatatttttccgaatttatgaaactttaaccaaaaaatggcaaaaattattcctttttttgcggctataaattcatgtttttgctctccggcgctgaaaattttaaaataacaccggcgacaattccttttttggcacgaagagcaaaaaaaaaagctcttcggttgccgctcccgaaatttttttctgattacgggtctggcgtcgcctgaaattttttttaaaagaaagtttctttaaattttacaaattattgacaaaaattaaaattatacatagggaaaatttcctcattatctctctttctttcgccagttctgtgttgtctcaattttatcaactatttttccgctctctttcttctcgtccattctcccgccttttacatatttccttatttctcaaaattttttgcctttttcttttccctcacacactctctctcactcaaatttttcccctttcattcgcttgctctcgcgctctcaattgcacacactattcctctgcgcatttctcggctttcccacactgtctcttccccactcttgcgttaccttccgccatttttatccctttttctcatttggggatcgataaacaatggaaaatgacaaaataatccgctcgcctcccgccgccgccgattcgttaatgtttttcctttttaatacttagtacattgtttatgcctttgtgttaatgcgcgatcgaaattcttctgctgattgatcacttttccatcataaaaaattcaaattaatttaattacaaaattcaagagacgaaattgccgttgtcgaaattctaggccggaagtctcggtctaataagaaaaatcgcatttttttctaaag

SEQ ID NO: 15021 - DNA, 2071 bp, Heterodera glycines
agcctcagacctggggacccctgattaataacaagctaattatgagcaactttctgtgattaaacattagggcttccattttttctaagaaactgctaatttttttttttggacctaattaaatttgttttacaataacaaacggacattccaaagacaattttttaaaatgaaatgatattgtttgacctcataaataattctttttaatttctaagattatgcactagttagttttttaatttcatttaatcgcctctctcagtttgatatatttcttttataaattagttgacattcttcctttaaaattaaagaagaatcggcacaaataataacccaatttgatatttaaatcaattagttgatcattaattaatcttctatatatttattaataaaaagtatctattctatttttcattctctgcaaaaaatttataaaatatggaaatttttgccgagtttaccatttccgaggaaaattcaaaatacctaaaaaatattaaaatattttagcgaggccctgctcgacagtttttggctgaaattcaaagatgtgggaaacgttcttgaacaaaatgtgccattagcacaaatcattttatgggcgtgggacgacaacggggcacaagtcatcaaagaagtgattaccgaccaaaatgctgtttcacaaaattcttaatttagtcagtgatcctgaaaagcggcggaatggtttctttaccggtagatgcaatttcatcgccttcaattgtcgtccgttttctcaaaaaacgcgaagactcagaaaagtgaaaaatttacttcatttgtattttggttttcccctaattttttcatttttctccagtccttgccctccgctgagttcgccagccgatgatttgactgtgcatattggagaccggcaggtaataaaactgctaattgctctcttttatataagccaactttataacaagtcggcaccgacccgtatttgaaaactctatttttagacattgctaattttttccaaaattatttcaccggttatcgaatttggtgttaaatttggtctccaaactcactcccaaatagaaatgattcctaggatctcgagcagcaattctcggtcccgggatgttttagatagaattattcattttcaagcatgaattgttgtgttgtgtcagatcactgtgtccgcttcttggcttatgtctctgtctgtgatggtccgtcgtatgctaagtgtggaaatgaaggggtttttgcccaaatacccggacccgcctaaccctagtattaatcaacaaaattccacaatttccaaaaaattcgggattgcagtttggatcccaaaaaatcctgcgcgggacccgatcactcacgtttttctgtgcatgaccatttaggctatcataaccatggaacggatttatattttgctaaaaaacgcatattttctaaaaatgccaaaaacccttctcaattcgattttcttgctgaattttaatttgtcaatgtatgagcaacggaataaagcgatcatattttttcaaacgaaaaattcataaaataacatgaaaagatttcaaatttcatttaatcagtgcttggaactttttaaaaaaaagttattgctcaaattttaatctgtattaaaaataaaatatgtatacagaatgatttcaaattttcaacttttatcagttcttggaagttgtttagtaaaaattttagtttacaatattttactgaaaaatggaaaactaacttgggaaaaacacacaatctctaataagcaaattcaattagaaatattagcaataaaatgacgaacattgtttacctatctgaactcttaaaaatattaaaataaacacaaaaataaattttttttaaacacattataattaataaaggaaaatagcgcacggtctgcgaaaggattcacaaaaattcggatattttttctgtattttgagtatgttgatgctctaagtcagttttctgtctgtaagtcgaatcgtagacgtcagccgatcacgtatggaagtgaagtttaccttttcgagtgtgtaca

SEQ ID NO: 15022 - DNA, 1484 bp, Heterodera glycines
ttccaatgataataagtgattacattgtgctgataatgcgcttttgtcagataaccacggggtccaatgggacgccgaaggtgcggccaacaaatggatggacgcgcattcgcaacgcgcattcgacagaatggccaaatgcgtggtggacgagtactcgcagctgtgcccattccctcccgatggcattgttcaacccgcgtgcattgacggagacaaaactcaggcggaaaacatcgccgacaacggaggtcaccaaataaacggactcaaatgtgatctgcttttgccttcaaaggtctccacgccgccttccgtgcctatcgctctgcgctcgaagtggacggaccaagcaaagcgttaccgggcaaattggtcggccgcttcaaccacgaccagctgttcttcctgtcctttgctcagccgtggtgtgatcagcccgacgatttcgagacgtaccttcagctgatcggcgattctcattctcccgcaaagttccgcgtgttcggctccttgcgcaattttcccgccttccgcaacgctttcaattgtccgttgaattcaaaatacgcgcccgaaaagcattgcaatgtttgggtgagccccgtgacgtgacaaaagttcaaacggagaaccgaatttggattaacggagattaaggacgaaaaacggatgcaaagcccaccaatggaaaatcactttattagcattattgttcaactaattgttttgtttttttgttggtattcaaaaagaataaatcaccaattaagtcattaaattaattattattaattcgttttttgttttatttatgaaatgccaatttaaagtgaccaccgccccagtgaactgatcatttaggtttttgtttttcttttagaatgttttatcgttccttttttagtacaacaaagcacccactcctccactgccccctccaatttctgccatttgctcgctgaaagtgaaaactcgttcgctgacctacattttggctttgtattagttgatcaggctgatcactctgcaaaatccaatgggttttcctgatcggtcatttgccgtcagttggtcgaatacaccggcgaaaagcgcacagaaaacgcaaccgacgaaagtcagtcatctccaaatggcgtttcccttgtctcttccgcgagtgtttcgctgttttttctgcgtcgttttgcttctctttggtaataacttttgccacaaattctttccgttatttacccatttttaggcttttccttcgttttgacaaagcccgtcgaattgccaattcgaattcccttttgccccgttttttcccgcgtaattaggaggccggacggagaggcgaggaaatgtcttccgcaccagctgaatctctgtttgaatgcattggacgaccaatcgctggtcattttttgaaataaacaaatcaatttaaattggagttgacagatcgatgccccggggcgtatgctgctaccata

SEQ ID NO: 15023 - DNA, 1783 bp, Heterodera glycines
  unsure (1)..(1783): unsure at all n locations
ttttccttcaaaagcatcccncctccccccccccccccaggtccgtcctaccgtaatgttaccgtcgtcattcacaacaatttcccgcaaagtccgttcccggtaagtaaagcaatggaagtgcatttgcaaatatttgatcttttttacaacactatcattaactaattaattcaggtgcgctctttccatttccggaaaggtttgaccactgaaattgaaagtttaccagcggcaaataatttcaagaaaaactgaccgataaacgaacaaaaaaaatcgaataaataaagcacaaatgaacattaatttgcaaattcaaatagttatttgaattatttttgcgattaaggagaaagtccaatcaatcggcatcatcaaaagcatttttactaattgggcaaatgaaaagaaaacagtgaaaaggcaaaaaaggaataaacaaagtggaaaaagaggagcaacgacctgcaattttatccgttgcaattctgagtaaattttataatttgatgaaaaaggtggaaaatgtcattttaaaattgcgtggggggaagatatttcgaaattcaaaaaggaattcattttatgatgcattaaaatgtttttaattcacattaatccaaaatccttgcgttgccattggctaccaaacccgagggatttgtggcagataatgcttaacgacggaacgtgccaaggaaaaacgatggaaaggcaaaggcgaggaggaaacctttcgggaaaacgatgccaattcactggctaaagtcgaggagcgcttggaaaaatgttttttgtgggaagactgccgaaactttagttttcctaatgcattttaaaaatttttggcattgtccacacttcttggcattctgttcagtgtctcttccaattcccctctctctcctccctgctttctcttccgtttctcccccctttcccgatgtctcttccttcttccgatcatttcgccctcccctcctccgacccgcgcccctccaccctttgggaggctcttcgccacgcggtgaccaatcgtcggctgatcgcaatgtacggactgaccttcgcattgtcacttaccattccgctctttgtcactttggtcatgagaaaatggcgggaaagaaaacatcggcggaaactgaaggaacgcgaaggtaaagcggacagaggcgacgggcgacagcccaaaccctaatttttcccaacggaaatcggcgttgatcatcggacgcctcgtcggtcctccccccgccccccccccctccgggattggctaaagcctaagaaagggagaaacaaaggttaagccaataatagaaaatgtatccggcatagaagaggaggaacgaatggccaatgaaacgggcggaacattcaacaaagccattctgaactcattacgccattttgagatgaaagaagaagatttgcaaaaggaggtgggtgaattaggtagcgaagtagaattttgaaataaaaagaggggggagggagataatatacgatttaaattaaattaacccaaagaagtgccaaagtgaacgactccaagcaactgttgtggacgccgaaaataagcaaaagggcagtgaaaaagaaggcgaagcagcaacgaacacaatgttggaaaaggaggaagggaaaaggaaggtgaaggaagaagaaaaaaaagaggaggggtgagagagagagagagaagtcgggggagggtgacaaatagaggaagggtatgagagacactatgggtcaagccccagtgttagacaaaattact

SEQ ID NO: 15024 - DNA, 4752 bp, Heterodera glycines
  unsure (1)..(4752): unsure at all n locations
aatttttaaaatanttttcgaattaaaccgaaaaaatggtttcctttttgttgaattcggaaagcacacaatcaaagttgagataagactgcccaaattcttttcatatgccaatttgaaagcgctgtcgaaaagtgcgagcaattcgtgaaattcgtcgattcgttcctaaaaaacaaaataaataaaaaaccaaaaaataaattcgaatttttgcctcattgtcgtaaccgtagccaaagagagtacagtttatgatcgatccaattgaaatttcgacgtctttgatcagattgatttcgctgctttcactctttgccaatttgcggtcgattcgttcgaacattcggctgagttcgaccaaaatctttaaaattgaaaattttatagtttattacttcgatttttaatgctcacttttttctccattaaattattgtacagcccaaagttacggaaaactgtggacgcaaattttcgttgttctgaataaaattttaatgtcagtcaattaacttaaataaattaattaaaaattaaattaaattaaaacctttccaaaagtcgccgtttatgaagaaaatgccataaatattgcctaaagcaaattaaatatttaaaattctttgcttatgtttggcttgtgcctctgaattcgcgcgtaaaatccacaaaaatttgtcgttgcgtaaattcttcgccgcctttgcggaaaacttcgacgatatttttgtagtcggcgacacaaacgacgggctaaaaggggaaggaattaattaattaattaaattanattattttctatttaattctaccatttctcccagccaataagtgtaaattggcccgtattttcgcttccattccaaaaatgcgtcttcgcccggcttttttcggatgagtgtcaaaatattgccgaccaaaggcagcggaattgggcctaaaataaacggcggaaatttaacgaaaatggcaaatttaataacttaacctggaggaagttttctgcgtttgtagtaaaagttgtaaaaggcgaggaaaaaagagaaacaaagcacaaaaatgggaaagacgaacattttgagggaaattagcggaaaaaataaaaataaaaagtagcacatggaaaataaacaaaaattaattaggcactaattaaatttggcatcaattaaacggtcgtcgttgtctcggtccccccaacctgttcctttggcttttcctctcgattttcgagactttttttttcatttttttaaccgttcgttcgtttgtttgtttctttctttttttgtctcgaatgagagtgaattcatctcaatttcgtccgttcttaatctgacaattcgaattccattcaaaggaactttttcgctcatttcgcaaatctttgccccaaaaaggcctttggcctccccagtggcatttttctttcacaatttgtgttcaacaaattaattgtacacacatgtgatcgaaaacactaatagatttgaaatgggccttggtccgccgtcccctatttcgtcccccctcttttttcccattttttccctttttcccatccgttcgctgaatttccatttgttgtaaaattaaaccggagaaagttgctcttcccttcccttctcttccattttcttctcttctcacagtgacgtgggaagtgatcactttgggccgtccaaaagtcgaatttcgacaaaacaaacaaaaaaaagcagaaggaaggtcaaacggaggaaattgcaattttttacgactgaataaatgccacaaaagtatttaaatttggtaactttttgtaaggggatgagaggaaaattgggaaattacaaattttggaaataaaaaaaagagggaaaatggaaaaacggcgggcgaaatgcgaacaaataacaaaatatgagcaaagaaaaatggtcatttattaattactcgttttggccactttctcggaacgaataaataaataaataaataaataaataaatgttctcttttcctttccttcctattttaatgcgcaattattttgtgtaaatgttttttaacataaatatttacaccgaaaatactttttaataattataatcaatattatttaattatttattcgctattaatgtgcatttctgaatttaagcaaaatggacaaagtgactccgaattttaaagaggagaaacgaacaaatgccatcgttgttcccccaaaggatgcaattggtacaaattaataattaaacaaaaaatgatttaaataattattaaataataattgaaattaatatttttcataaatttcagtgaaacgaaataataaaactgctgttattgcccatttgcacgtcttttaccaaaaatgggctctttttgtggtgaaacatcgcactttaataatggcaatttgctcaattctttcgactttgggcgcagtgaaaatattcaaaacgccgtaaatgaaaattaattaaataataaaaagttaaaaatgagtgctcatttgtcagctttgtgaatgatctcaacggatggaccccttacggcgcgcgttctttggccgaatcggacgcatggaacgaatttttcaacgacaccggcacaggcagcaatttcgccattttcgtgctgatcaaaccgaaagtgatcggcacaaatatgctgcagagcaaaatgctggaccaagtgatcagagtgaggagaaaagcagccaaataaaatcataggaaaataaaaaatagagggggaggaaagataattagggcgagcgggggtaattaacggccatattgatatccataatggcacaaggcgcgaatctctggttcgtctacaggtcgatgacgggagagaattggtacatctcgatacaatgtctagacgaggatgtttcggaagcatttaaagagatggggtacaacttttttgacattaatatactcgtaagagtcggaatatccagttccgaaacaaacaaattagaggaaggcttctgtatttcggtaaatttaatgtggaattattccttccgggaattttcgctcgtaaaagacggagtgtcctggtccggaaaaatgtatagaggaaggagttctgggttccggaaatttaaggtggaattgcgcgttccggaaatttatgctagtaaaaggcggaatatccggatccggaaaactgtatagggtagggagttctggattccggaaatttaaggtggaattgcgcgttccggaaatttatgctagtaaaaggcggaatatcctgatccggaaaactgtatagcggaaggagttctggattccggaaaaatgtatagaggaaggagttctgggttccggaaatttatggtggaattgcgcgttccggaaatttatgctagtaaaaggcggaatatcctgatccggaaaactgtatagcggaaggagttctggattccggaaaaatgtatagaggaaggagttctgggttccggaaatttaaggtggaattgcgcgttccggaaatttatcgctagtaaaaggcggaatatcctgatccggaaaactgtgtagaggaaggagttctggattccggaaatttaaggtggaattgcgcgttccggaaatttatcgctagtaaaaggcggaatatcctgatccggaaaactcgtgtagaggaaggagttctggattccggaaatttaaggtggaattgcgcgttccggaaatttatgctagtaaaaggcggaatatcctgatccggaaaactcgtatagaggaaggaatctgggttcctgaaatttctatacattccggaatttaagaaactatttatgtgaattaaaaatttgtttcataagtcaaatgtaaattacaataccccactgacgcattttttggaggcattaaaatcaaatttaaataggttgagtttatataattggcgaagtgttgcgcaggtctttttttacctcctcacccatttgcagaattggtacatcaccagcagcagcagcaacttgccaccagtggcctattccaacgtcaacaacaacaaaatttttatgctgaaagaaccagcaactcctcgtcggttgttacgaccgcgctgctggcacaacgtaattagtgtgccaaccgtctggtctcgagagtctcggtatcggttcttgaggccaaaaaacgatcggaatttttggagacttcatgtcatttaagcagctcgagagtctcggtatcgaatctcgagcccatgaaaaatattcgggattcttagatacggtatatgttggtacagtcactcaaaatataagacaaatgccatttatacatataggcacattgtaattgtactctcttcagatcccctggttgtcaacatggacaccaacaatgttgctgttgctggcgatgataatgatgttgccatagttgaacaacaacaacaacaacagtgtcggaatggtggtgttgctgctgatgagggagaaaatgctgcagcaacaaaaatgacggcaacaacgcccgtggttgttgaagcagtagcagcagcacacgaaggccagcagcaaccgacggagccgaataaggtgggttgtgttatgttgcagtaccatccatgacatgaatcgtgtactgcttgggttggatgaaagcgatgtgtctcctcgataagcaaatgttttttttcaaaggtttccgacgtcgtcgactcagtggtggccaagttgcgcaaaaaaagctttagcacaaccagcagcaatgccacgcaaca

SEQ ID NO: 15025 - DNA, 3860 bp, Heterodera glycines
ccatgccaatgccaacagaaagagggaccgacctgtgagccgggcatggaccgcttctactgtccatgtccacggcaaagccaacgaaaggaggaccaatcgcaaaccaatgacgaactcacgacggaatacggccagaaaaatccacgggggaaaatgcggacaaagagcagcagcaacaacagacaaacacaacaacaccgacacgttcacgaagtggcaatgggaaggggggaggacgaagggaggaggaaatttgcctaattggcaattagcagagcagaataatgaccattcttatcaaggaaaaacttgatttacatggtttaaaaatgcaaattaaaattaaaaatgtaaattaaatttgatcgtttgtctctctgctcctctgatcactcgtctcttttcctttctccgtctgctgttcttcctccatcttttgctttaaaagtgtgaaaaggctcttaaatcaaagtaattaatattttcgcttggtttggctttctccgacctccgtcaaatgttcatgtcgaacgatcacttcgtcctgaaattctcttccatcaaattgaaaatgcctttccatcgactgacttcgtcgtgcggtgccaacaatggccgatcactttggtacccggcataaaccattgagaaaacgtcgaagaggcggtgaagcggccgaacactttcgatggcggaaaagacagccgaagggaagggctaattaattgtaaattggaaaataatttgcaaaaattgaaaaacgaaccaaagcgaaaaggagggcagcggaagccaaaagagggaaaagcgaaggtttataaaaatgggagaacgaagtcagatcagacgaacgaagggaagtgaccaattcacggaagggactcagctgttggattcggtctgaagctccattaattgcccaattagtcaaaaatatccgtcaaattgccccccccctttttcattccgttttcacttgccaaaaagagccggcattggctcgtcataaagcattttcagcttgccaagtccgctcccggggaatttatgctccaattggtcggctgttgatgaacatcgtccggtctttctgtaggaacagtcattaatggaaatgtttcgcttcttcgctttgactaacatcagaatccgctctttgtttctggccattattttgtcctccttcagaacgttttccaaactcttcggctcgcaaaaaaattccaccgcttcttccaaatgccaaaaatgctccgcaagtgaagccaacgcgtgaacaaattgagcactgagagggcaattaacttaatgagggggggggggggggtaaagggaacaaagcaaaatgggacaataattacaaaaaaggcttttgagcacttcgaagtttatcatggacccttccgcgagggcattccgtcgccgttggcggtcaagcaaaaagtaacaatatttttggactgcaaaagccttaaaacagaaaaatatataacaaatatcataaaaagaaagaaaactgacggatggcttcagaacaatggcatgccgatacaaatccatcgtgtcataatgatttgactgttcggcatgaatggcctaaagggatgggcacgaggggtaatcaagagtaaattgaaagtaattaaaacagcaattaagggctacattgggaaatacttacgtgtggaagccaagtttcggacattgacggattgatcatttgcgcattgttcatcgcctcaagcgcttcgtcattctgagaattttaagtgtttaatttattgaaatattcgggaaacaccaacaaggccaagttggaggtagagaaaggaaaggagagcccacgcgatggcacagtgccgattcagctgaatggcacggacgaggcaatgttgggcccgggaggcatttccctccagcaaataaagtcgagctaaatcaacgaaaattggcaatttcaacggcaaaatcggtaaacaacccattaaatatcacccaaattgcaaaggtattccgattttttgagacttgagctcgaaaaacgaacagccgcttgaaaacaatgaagagcactgaaaggaaaaaagcggaaaattaacggaaagaaataaaaacgagagagcacctctcgagaaaagtgtttggcttggatttcttgccaatatttaataaaaatgtgtccaaaaatgcctaaacaaaatgttaggaaaataatatcctgctaattagttaattgacctttcctaattcgttccacgtgtcggacgcccttcgatttgcccgcagcacagcgaccagcgaacgaatgcgcgcctttgccaactccgaacgagaacagattgcccacccgccatccgacaaaggtttgctcaaagccgatgaaaggaggaatttgcgcatggtaagctgattaaaactgaaatgggcaattggataggttaattgaatgagatgagttcagcaaccaacccctggacaattttgaatgtttgtgccaaacagcgatggagcaaaacagaggcggcattttccccttcgtcgagcagtactttggcacgtgcaaaaatgtgtggcaatgtttccaattgggttttaacgaagttcgagcgacgcatttcctggaattattgtttgtggtctgaattgttacattgctcacttcggaatcgctaacaaacagcacgagggactgaagatgaattgttcggaagtgcgcgaagagaagggccggcaacgcattcgactgatcgcattcggaaagcccatcttcgaattgttctccaagggcaattgcatcgcggaaatgacccatggattgctgaagttggataagctgaaaggaggaggagccaattaattaagaaaggcaaacgcacggacaaacacctgcaatttggccgtgtgattggcttcgtccaattcgatgatggcacggcacgcgcggacagccgactgcaaattgcccttctgacgatacgcctcgctgagaaaggcccaaatggcacaaatttgttgtcgatgctcaatcttggcagatgaagagttcaaatcataaattagcaaaatgcaatcgaacattttcgggtctctcgccaaatgtatttgccatcaatcgaatggaccgttgacatttgtcaatggcactgtcgaatctgcccgcgttaacatccagaattgctgtttggcgcagtgcccacagcgaagttggccgattggacagaaactgttggagagcattgaaacgaacagcatcagcagaattctgcaaatgaaatgcaaaagagtaaaaatcatctccaattcaggaattgcattgtgcaaagacccccccccccccatctccagccccattctgtcccccaaaatcatcaacaattgaacaataagccgattttcacgcttgcctggacttgttttcgcaaatggggatggatcaggtaggccacccccccccccccctcactcttaatgtgtctcaatccaacagagagaacaaagtctttcgtagacattgcgcaactaacccaaattctgtgatttttaatataaaattttgattccgaaaacaaccaagtatagttttgagataagctgtaaatgaagcccaaatgaagtgtccattgacggacggatgattcccatgtcctaattgaaaggatccgtgtgtccatgagattttggagaaaaaaacggagggatatttaggtaaagttgtatttgtatttgtgttgttgtttggttagtctccctctgattgactttcttttgaccttctccgatcggagcagattcaatcccatccgccggtagcccaatcacctcaatttatttcctggtttttcgcatttcccttcatt

SEQ ID NO: 15026 - DNA, 1505 bp, Heterodera glycines
  unsure (1)..(1505): unsure at all n locations
aagatgcgcaaatttttgagaattnttatcgcggcaattcgatgaaattattttcttttccaaagccgcaaaaagaaaaataaaattcccatttggtgtcatnttgtgaatttgttgttctattagagtaaaattatgtgaaatgttattatttttgtggattgttttggcttacccttanttactgtatttttaatttttgaatcatccgaaaacttttcnccanccgttttcgaggatttcgtccagcagtttcgcgcacagttcgcttttcgtattggtttttcgcgcgtgttccacacaaatctttgccttctccaacattccaatcgccagcaaattctcggaaagccaatagaaaacacgccaatcattgggtgctaaaatttgcataatttattcgttggcctattttatggtcgttttattgcattttccgaataaatgtaactgtccgtccactcgccttccttcgccgcgttcaccaattgagtgttcgccaattgtcgttggcctttggcgatgaaaatttgtgccgaaatgagagtgtcctcaatgtcagtctccgcaaaagcaatcgcctgaaatttgaaggcattttaaaattggaatgaaactgaaggccaatgcctttcttatattggcacgcgcattttccaaatgtttgtccacaaatagatgaaaaagcgccaataaatgatgaaagatatgcaaagattggtcatttttatcggggaacaacgcgtcaaattcactctgaaaggaattttttgaaaagaatggcgttttttaaaggaaaaggcacctgtaactcataggaagtgccaatttcacctgccctaatcagacatttaagcaacaaagcattccgaaaggactcctcgcaatccgaagaagacaaaggcattccctccgccacattccctccgttatttttcaatttttctgataattttttggcatcgaattcattctcaaccaaaatccattgggcctccaattcttgaaatgacattttggcttcaaaagtaaatttaaaattaaatttttaaaaataaataaaaacggaatacaaattgattaagtcaaatccgtagaaaaatacatgccaacagtcagcctataatctgctttattgcatggacaatcaaaaaacaatgaccgaaaaagcaataaacggtggcctaataatcgtatccgtaatagggtgtcggatgcgcacttccggaaacagtcaaacggcgacctctggtccggtcccaccacagcatttcgcccttcgcgcactcgtccttacgtttctcctgcaatttttacannnnnctaacccaaaatttaaatttattccatccgattggaaatagaattacaacaactcttttgctgtacctggatttttgaccgggaaacccaggcccatattaaaaaaaacagatccgggccaggttaggcacgtaaaacctggaattcctggtggataaaaattttgaaatttgttatttttg
